(19) United States
(12) Patent Application Publication
(10) Pub. No.: US 2007/0042361 A1
(43) Pub. Date: Feb. 22, 2007

(54) Human secreted proteins

(76) Inventors: Craig A. Rosen, Laytonsville, MD (US); Steven M. Ruben, Brookeville, MD (US)

Correspondence Address: HUMAN GENOME SCIENCES INC;INTELLECTUAL PROPERTY DEPT., 14200 SHADY GROVE ROAD, ROCKVILLE, MD, 20850, US

(21) Appl. No.: 10/472,963

(22) PCT Filed: Mar. 26, 2002
(86) PCT No.: PCT/US02/09370

§ 371 Date: Mar. 30, 2004

Related U.S. Application Data
(63) Continuation-in-part of application No. 09/950,082, filed on Sep. 12, 2001, now abandoned.
(63) Continuation-in-part of application No. 09/950,083, filed on Sep. 12, 2001, now abandoned.
(60) Provisional application No. 60/278,650, filed on Mar. 27, 2001.

(51) Int. Cl. C12Q 1/68; G01N 33/574; A61K 38/17

(52) U.S. Cl. 435/6; 435/7.23; 514/12

(57) ABSTRACT

The present invention relates to human secreted polypeptides, and isolated nucleic acid molecules encoding said polypeptides, useful for diagnosing and treating cancer and other hyperproliferative diseases and disorders. Antibodies that bind these polypeptides are also encompassed by the present invention. Also encompassed by the invention are vectors, host cells, and recombinant and synthetic methods for producing said polynucleotides, polypeptides, and/or antibodies. The invention further encompasses screening methods for identifying agonists and antagonists of polynucleotides and polypeptides of the invention. The present invention further encompasses methods and compositions for inhibiting or enhancing the production and function of the polypeptides of the present invention.

### FIELD OF THE INVENTION

[0001] The present invention relates to human secreted proteins/polypeptides, and isolated nucleic acid molecules encoding said proteins/polypeptides, useful for detecting, preventing, diagnosing, prognosticating, treating, and/or ameliorating cancer and other hyperproliferative disorders. Antibodies that bind these polypeptides are also encompassed by the present invention. Also encompassed by the invention are vectors, host cells, and recombinant and synthetic methods for producing said polynucleotides, polypeptides, and/or antibodies. The invention further encompasses screening methods for identifying agonists and antagonists of polynucleotides and polypeptides of the invention. The present invention further encompasses methods and compositions for inhibiting or enhancing the production and function of the polypeptides of the present invention.

### BACKGROUND OF THE INVENTION

[0002] Cancer and other hyperproliferative disorders are a diverse group of disorders and diseases sharing one characteristic in common; all result from uncontrolled cell proliferation. The human body is composed of many different cell types, e.g. liver cells, muscle cells, brain cells, etc. Normally, these cells grow and divide to produce more cells only as the body needs them (e.g. to regenerate blood cells or replace epithelial cells lining the stomach). Sometimes, however, cells begin to divide unchecked even though new cells are not needed. These extra cells accumulate and form a mass of tissue, called a tumor. Although each of the over 200 cell types in the body can potentially become cancerous, some cell types become cancerous at relatively high rates while many other cell types rarely become cancerous.

[0003] Tumors are either benign or malignant. Benign tumors are not cancerous; they can usually be removed, they do not spread to other parts of the body and, they rarely threaten life. Malignant tumors, however, are cancerous. Cells in malignant tumors can invade and damage nearby or distant tissues and organs. The spread of cancerous cells is called metastasis. Malignant (or metastatic) cells can invade adjacent organs by proliferating directly from the primary tumor. Additionally, malignant cells can also metastasize to distant organs by breaking away from the primary tumor, entering the bloodstream or lymphatic system, and settling down in a new organ or tissue to produce a secondary tumor. The origin of secondary tumors is established by comparing cells comprising these tumors to cells in the original (primary) tumor.

[0004] In contrast to solid organ cancers (such as cancer in the liver, lung, and brain) cancer can also develop in blood-forming cells. These cancers are referred to as leukemias or lymphomas. Leukemia refers to cancer of blood forming cells such as red blood cells, platelets, and plasma cells. Lymphomas are a subset of leukemias, primarily involving white blood cells, in which the cancerous cells originated in, or are associated with, the lymph system and lymph organs (e.g. T-lymphocytes in the lymph nodes, spleen, or thymus).

[0005] In 1999 over 1.1 million people were newly diagnosed with 23 different types of cancer. The vast majority of these cases (˜75%) involved cancers of the prostate, breast, lung, colon, or urinary tract, or non-Hodgkin's lymphoma. Among the most fatal cancers are pancreatic, liver, esophageal, lung, stomach, and brain cancers, having up to 96% mortality rates depending on the specific cancer. In all, some 23 different types of cancer are expected to kill over 86,000 people each year.

[0006] Most cancers are treated with one or a combination therapies consisting of surgery, radiation therapy, chemotherapy, hormone therapy, and/or biological therapy. These five therapeutic modes are either local or systemic treatment strategies. Local treatments affect cancer cells in the tumor and imediately adjacent areas (for example, surgical tumor removal is a local treatment as are most radiation treatments). In contrast, systemic treatments travel through the bloodstream, and reach cancer and other cells all over the body. Chemotherapy, hormone therapy, and biological therapy are examples of systemic treatments.

[0007] Whether systemic or local, it is often difficult or impossible to protect healthy cells from the harmful effects of cancer treatment; healthy cells and tissues are inevitably damaged in the process of treating the cancerous cells. Damage and disruption of the normal functioning of healthy cells and tissues often produces the undesirable side effects experienced by patients undergoing cancer treatment.

[0008] Recombinant polypeptides and polynucleotides derived from naturally occurring molecules, as well as antibodies specifically targeted to these molecules, used alone or in conjunction with other existing therapies, hold great promise as improved therapeutic agents for the treatment of neoplastic disorders. Currently, most biological therapy can be classified as immunotherapy because these treatments often use naturally occurring molecules to assist the body's immune system in fighting the disease or in protecting the body from side effects of other cancer treatment(s). Among the most commonly used compounds in biological therapies are proteins called cytokines (e.g. interferons, interleukins, and colony stimulating factors) and monoclonal antibodies (targeted to particular cancer cells). Side effects caused by these commonly used biological therapies range from flu-like symptoms (chills, fever, muscle aches, weakness, loss of appetite, nausea, vomiting, and diarrhea) to rashes, swelling, easy bruising, or bleeding. [symbol] eted proteins associated with initiation, progression, [symbol] of neoplastic diseases (including antibodies that [symbol] eptides), satisfies a need in the art by providing new [symbol] on, prevention, diagnosis, treatment, prevention, [symbol] liferative disorders.

### SUMMARY OF THE INVENTION

[0009] [symbol] ases human secreted proteins/polypeptides, and isolated [symbol] proteins/polypeptides, useful for detecting, preventing, [symbol] ad/or ameliorating cancer and other hyperproliferative [symbol] lypeptides are also encompassed by the present invention; [symbol] ombinant and synthetic methods for producing said [symbol] ntibodies. The invention further encompasses screening [symbol] antagonists of polynucleotides and polypeptides of the [symbol] encompasses methods and compositions for inhibiting or [symbol] f the polypeptides of the present invention.

### DETAILED DESCRIPTION OF THE INVENTION

[0010] [symbol] on concerning certain polypnucleotides and polypeptides [symbol] vides the gene number in the application for each clone [symbol] a unique clone identifier, “Clone ID:”, for a cDNA clone [symbol] in Table 1A. Third column, the cDNA Clones identified [symbol] indicated in the third column (i.e. by ATCC Deposit No:Z [symbol] ts contain multiple different clones corresponding to the [symbol] Vector” refers to the type of vector contained in the [symbol] a the second column. In the fifth column, the nucleotide [symbol] NO:X” was assembled from partially homologous [symbol] a the corresponding cDNA clone identified in the second [symbol] ional related cDNA clones. The overlapping sequences [symbol] us sequence of high redundancy (usually three to five [symbol] position), resulting in a final sequence identified as SEQ [symbol] NT Seq.” refers to the total number of nucleotides in the contig sequence identified as SEQ ID NO:X.” The deposited clone may contain all or most of these sequences, reflected by the nucleotide position indicated as “5′ NT of Clone Seq.” (seventh column) and the “3′ NT of Clone Seq.” (eighth column) of SEQ ID NO:X. In the ninth column, the nucleotide position of SEQ ID NO:X of the putative start codon (methionine) is identified as “5′ NT of Start Codon.” Similarly, in column ten, the nucleotide position of SEQ ID NO:X of the predicted signal sequence is identified as “5′ NT of First AA of Signal Pep.” In the eleventh column, the translated amino acid sequence, beginning with the methionine, is identified as “AA SEQ ID NO:Y,” although other reading frames can also be routinely translated using known molecular biology techniques. The polypeptides produced by these alternative open reading frames are specifically contemplated by the present invention.

[0011] In the twelfth and thirteenth columns of Table 1A, the first and last amino acid position of SEQ ID NO:Y of the predicted signal peptide is identified as “First AA of Sig Pep” and “Last AA of Sig Pep.” In the fourteenth column, the predicted first amino acid position of SEQ ID NO:Y of the secreted portion is identified as “Predicted First AA of Secreted Portion”. The amino acid position of SEQ ID NO:Y of the last amino acid encoded by the open reading frame is identified in the fifteenth column as “Last AA of ORF”.

[0012] SEQ ID NO:X (where X may be any of the polynucleotide sequences disclosed in the sequence listing) and the translated SEQ ID NO:Y (where Y may be any of the polypeptide sequences disclosed in the sequence listing) are sufficiently accurate and otherwise suitable for a variety of uses well known in the art and described further below. For instance, SEQ ID NO:X is useful for designing nucleic acid hybridization probes that will detect nucleic acid sequences contained in SEQ ID NO:X or the cDNA contained in the deposited clone. These probes will also hybridize to nucleic acid molecules in biological samples, thereby enabling a variety of forensic and diagnostic methods of the invention. Similarly, polypeptides identified from SEQ ID NO:Y may be used, for example, to generate antibodies which bind specifically to proteins containing the polypeptides and the secreted proteins encoded by the cDNA clones identified in Table 1A and/or elsewhere herein

[0013] Nevertheless, DNA sequences generated by sequencing reactions can contain sequencing errors. The errors exist as misidentified nucleotides, or as insertions or deletions of nucleotides in the generated DNA sequence. The erroneously inserted or deleted nucleotides cause frame shifts in the reading frames of the predicted amino acid sequence. In these cases, the predicted amino acid sequence diverges from the actual amino acid sequence, even though the generated DNA sequence may be greater than 99.9% identical to the actual DNA sequence (for example, one base insertion or deletion in an open reading frame of over 1000 bases).

[0014] Accordingly, for those applications requiring precision in the nucleotide sequence or the amino acid sequence, the present invention provides not only the generated nucleotide sequence identified as SEQ ID NO:X, and the predicted translated amino acid sequence identified as SEQ ID NO:Y, but also a sample of plasmid DNA containing a human cDNA of the invention deposited with the ATCC, as set forth in Table 1A. The nucleotide sequence of each deposited plasmid can readily be determined by sequencing the deposited plasmid in accordance with known methods

[0015] The predicted amino acid sequence can then be verified from such deposits. Moreover, the amino acid sequence of the protein encoded by a particular plasmid can also be directly determined by peptide sequencing or by expressing the protein in a suitable host cell containing the deposited human cDNA, collecting the protein, and determining its sequence.

[0016] Also provided in Table 1A is the name of the vector which contains the cDNA plasmid. Each vector is routinely used in the art. The following additional information is provided for convenience.

[0017] Vectors Lambda Zap (U.S. Pat. Nos. 5,128,256 and 5,286,636), Uni-Zap XR (U.S. Pat. Nos. 5,128,256 and 5,286,636), Zap Express (U.S. Pat. Nos. 5,128,256 and 5,286,636), pBluescript (pBS) (Short, J. M. et al., Nucleic Acids Res. 16:7583-7600 (1988); Alting-Mees, M. A. and Short, J. M., Nucleic Acids Res. 17:9494 (1989)) and pBK (Alting-Mees, M. A. et al., Strategies 5:58-61 (1992)) are commercially available from Stratagene Cloning Systems, Inc., 11011 N. Torrey Pines Road, La Jolla, Calif., 92037. pBS contains an ampicillin resistance gene and pBK contains a neomycin resistance gene. Phagemid pBS may be excised from the Lambda Zap and Uni-Zap XR vectors, and phagemid pBK may be excised from the Zap Express vector. Both phagemids may be transformed into E. coli strain XL-1 Blue, also available from Stratagene

[0018] Vectors pSport1, pCMVSport 1.0, pCMVSport 2.0 and pCMVSport 3.0, were obtained from Life Technologies, Inc., P.O. Box 6009, Gaithersburg, Md. 20897. All Sport vectors contain an ampicillin resistance gene and may be transformed into E. coli strain DH10B, also available from Life Technologies. See, for instance, Gruber, C. E., et al., Focus 15:59 (1993). Vector lafmid BA (Bento Soares, Columbia University, New York, N.Y.) contains an ampicillin resistance gene and can be transformed into E. coli strain XL-1 Blue. Vector pCR®2.1, which is available from Invitrogen, 1600 Faraday Avenue, Carlsbad, Calif. 92008, contains an ampicillin resistance gene and may be transformed into E. coli strain DH10B, available from Life Technologies. See, for instance, Clark, J. M., Nuc. Acids Res. 16:9677-9686 (1988) and Mead, D. et al., Bio/Technology 9: (1991).

[0019] The present invention also relates to the genes corresponding to SEQ ID NO:X, SEQ ID NO:Y, and/or a deposited cDNA (cDNA Clone ID). The corresponding gene can be isolated in accordance with known methods using the sequence information disclosed herein. Such methods include, but are not limited to, preparing probes or primers from the disclosed sequence and identifying or amplifying the corresponding gene from appropriate sources of genomic material.

[0020] Also provided in the present invention are allelic variants, orthologs, and/or species homologs. Procedures known in the art can be used to obtain full-length genes, allelic variants, splice variants, full-length coding portions, orthologs, and/or species homologs of genes corresponding to SEQ ID NO:X and SEQ ID NO:Y using information from the sequences disclosed herein or the clones deposited with the ATCC. For example, allelic variants and/or species homologs may be isolated and identified by making suitable probes or primers from the sequences provided herein and screening a suitable nucleic acid source for allelic variants and/or the desired homologue.

[0021] The present invention provides a polynucleotide comprising, or alternatively consisting of, the nucleic acid sequence of SEQ ID NO:X and/or a cDNA contained in ATCC Deposit No.Z. The present invention also provides a polypeptide comprising, or alternatively, consisting of, the polypeptide sequence of SEQ ID NO:Y, a polypeptide encoded by SEQ ID NO:X, and/or a polypeptide encoded by a cDNA contained in ATCC deposit No.Z. Polynucleotides encoding a polypeptide comprising, or alternatively consisting of the polypeptide sequence of SEQ ID NO:Y, a polypeptide encoded by SEQ ID NO:X and/or a polypeptide encoded by the cDNA contained in ATCC Deposit No.Z, are also encompassed by the invention. The present invention further encompasses a polynucleotide comprising, or alternatively consisting of the complement of the nucleic acid sequence of SEQ ID NO:X, and/or the complement of the coding strand of the cDNA contained in ATCC Deposit No.Z.

Description of Table 1B (Comprised of Tables 1B.1 and 1B.2)

[0022] Table 1B.1 and Table 1B.2 summarize some of the polynucleotides encompassed by the invention (including cDNA clones related to the sequences (Clone ID:), contig sequences (contig identifier (Contig ID:) and contig nucleotide sequence identifiers (SEQ ID NO:X)) and further summarizes certain characteristics of these polynucleotides and the polypeptides encoded thereby. The first column of Tables 1B.1 and 1B.2 provide the gene numbers in the application for each clone identifier. The second column of Tables 1B.1 and 1B.2 provide unique clone identifiers, “Clone ID:”, for cDNA clones related to each contig sequence disclosed in Table 1A and/or Table 1B. The third column of Tables 1B.1 and 1B.2 provide unique contig identifiers, “Contig ID:” for each of the contig sequences disclosed in these tables. The fourth column of Tables 1B.1 and 1B.2 provide the sequence identifiers, “SEQ ID NO:X”, for each of the contig sequences disclosed in Table 1A and/or 1B.

[0023] Table 1B.1

[0024] The fifth column of Table 1B.1, “ORF (From-To)”, provides the location (i.e., nucleotide position numbers) within the polynucleotide sequence of SEQ ID NO:X that delineates the preferred open reading flame (ORF) that encodes the amino acid sequence shown in the sequence listing and referenced in Table 1B.1 as SEQ ID NO:Y (column 6). Column 7 of Table 1B.1 lists residues comprising predicted epitopes contained in the polypeptides encoded by each of the preferred ORFs (SEQ ID NO:Y). Identification of potential immunogenic regions was performed according to the method of Jameson and Wolf (CABIOS, 4; 181-186 (1988)); specifically, the Genetics Computer Group (GCG) implementation of this algorithm, embodied in the program PEPTIDESTRUCTURE (Wisconsin Package v10.0, Genetics Computer Group (GCG), Madison, Wisc.). This method returns a measure of the probability that a given residue is found on the surface of the protein. Regions where the antigenic index score is greater than 0.9 over at least 6 amino acids are indicated in Table 1B.1 as “Predicted Epitopes”. In particular embodiments, polypeptides of the invention comprise, or alternatively consist of, one, two, three, four, five or more of the predicted epitopes described in Table 1B.1. It will be appreciated that depending on the analytical criteria used to predict antigenic determinants, the exact address of the determinant may vary slightly. Column 8 of Table 1B.1 (“Cytologic Band”) provides the chromosomal location of polynucleotides corresponding to SEQ ID NO:X. Chromosomal location was determined by finding exact matches to EST and cDNA sequences contained in the NCBI (National Center for Biotechnology Information) UniGene database. Given a presumptive chromosomal location, disease locus association was determined by comparison with the Morbid Map, derived from Online Mendelian Inheritance in Man (Online Mendelian Inheritance in Man, OMIM™. McKusick-Nathans Institute for Genetic Medicine, Johns Hopkins University (Baltimore, Md.) and National Center for Biotechnology Information, National Library of Medicine (Bethesda, Md.) 2000. World Wide Web URL: http://www.ncbi.nlm.nih.gov/omim/). If the putative chromosomal location of the Query overlaps with the chromosomal location of a Morbid Map entry, an OMIM identification number is disclosed in Table 1B.1, column 9 labeled “OMIM Disease Reference(s)”. A key to the OMIM reference identification numbers is provided in Table 5.

[0025] Table 1B.2

[0026] Column 5 of Table 1B.2, “Tissue Distribution” shows the expression profile of tissue, cells, and/or cell line libraries which express the polynucleotides of the invention. The first code number shown in Table 1B.2 column 5 (preceding the colon), represents the tissue/cell source identifier code corresponding to the key provided in Table 4. Expression of these polynucleotides was not observed in the other tissues and/or cell libraries tested. The second number in column 5 (following the colon), represents the number of times a sequence corresponding to the reference polynucleotide sequence (e.g., SEQ ID NO:X) was identified in the corresponding tissue/cell source. Those tissue/cell source identifier codes in which the first two letters are “AR” designate information generated using DNA array technology. Utilizing this technology, cDNAs were amplified by PCR and then transferred, in duplicate, onto the array. Gene expression was assayed through hybridization of first strand cDNA probes to the DNA array. cDNA probes were generated from total RNA extracted from a variety of different tissues and cell lines. Probe synthesis was performed in the presence of ³³P dCTP, using oligo(dT) to prime reverse transcription. After hybridization, high stringency washing conditions were employed to remove non-specific hybrids from the array. The remaining signal, emanating from each gene target, was measured using a Phosphorimager. Gene expression was reported as Phosphor Stimulating Luminescence (PSL) which reflects the level of phosphor signal generated from the probe hybridized to each of the gene targets represented on the array. A local background signal subtraction was performed before the total signal generated from each array was used to normalize gene expression between the different hybridizations. The value presented after “[array code]:” represents the mean of the duplicate values, following background subtraction and probe normalization. One of skill in the art could routinely use this information to identify normal and/or diseased tissue(s) which show a predominant expression pattern of the corresponding polynucleotide of the invention or to identify polynucleotides which show predominant and/or specific tissue and/or cell expression.

[0027] Description of Table 1C

[0028] Table 1C summarizes additional polynucleotides encompassed by the invention (including cDNA clones related to the sequences (Clone ID:), contig sequences (contig identifier (Contig ID:) contig nucleotide sequence identifiers (SEQ ID NO:X)), and genomic sequences (SEQ ID NO:B). The first column provides a unique clone identifier, “Clone ID:”, for a cDNA clone related to each contig sequence. The second column provides the sequence identifier, “SEQ ID NO:X”, for each contig sequence. The third column provides a unique contig identifier, “Contig ID:” for each contig sequence. The fourth column, provides a BAC identifier “BAC ID NO:A” for the BAC clone referenced in the corresponding row of the table. The fifth column provides the nucleotide sequence identifier, “SEQ ID NO:B” for a fragment of the BAC clone identified in column four of the corresponding row of the table. The sixth column, “Exon From-To”, provides the location (i.e., nucleotide position numbers) within the polynucleotide sequence of SEQ ID NO:B which delineate certain polynucleotides of the invention that are also exemplary members of polynucleotide sequences that encode polypeptides of the invention (e.g., polypeptides containing amino acid sequences encoded by the polynucleotide sequences delineated in column six, and fragments and variants thereof).

[0029] Description of Table 1D

[0030] Table 1D: In preferred embodiments, the present invention encompasses a method of detecting, preventing, diagnosing, prognosticating, treating, and/or ameliorating cancer and other hyperproliferative disorders; comprising administering to a patient in which such treatment, prevention, or amelioration is desired a protein, nucleic acid, or antibody of the invention (or fragment or variant thereof) represented by Table 1A, Table 1B, and Table 1C, in an amount effective to detect, prevent, diagnose, prognosticate, treat, and/or ameliorate the disease or disorder.

[0031] As indicated in Table 1D, the polynucleotides, polypeptides, agonists, or antagonists of the present invention (including antibodies) can be used in assays to test for one or more biological activities. If these polynucleotides and polypeptides do exhibit activity in a particular assay, it is likely that these molecules may be involved in the diseases associated with the biological activity. Thus, the polynucleotides or polypeptides, or agonists or antagonists thereof (including antibodies) could be used to treat the associated disease.

[0032] Table 1D provides information related to biological activities for polynucleotides and polypeptides of the invention (including antibodies, agonists, and/or antagonists thereof). Table 1D also provides information related to assays which may be used to test polynucleotides and polypeptides of the invention (including antibodies, agonists, and/or antagonists thereof) for the corresponding biological activities. The first column (“Gene No.”) provides the gene number in the application for each clone identifier. The second column (“cDNA Clone ID:”) provides the unique clone identifier for each clone as previously described and indicated in Tables 1A, 1B, and 1C. The third column (“AA SEQ ID NO:Y”) indicates the Sequence Listing SEQ ID Number for polypeptide sequences encoded by the corresponding cDNA clones (also as indicated in Tables 1A, 1B, and 2). The fourth column (“Biological Activity”) indicates a biological activity corresponding to the indicated polypeptides (or polynucleotides encoding said polypeptides). The fifth column (“Exemplary Activity Assay”) further describes the corresponding biological activity and provides information pertaining to the various types of assays which may be performed to test, demonstrate, or quantify the corresponding biological activity. Table 1D describes the use of FMAT technology, inter alia, for testing or demonstrating various biological activities. Fluorometric microvolume assay technology (FMAT) is a fluorescence-based system which provides a means to perform nonradioactive cell- and bead-based assays to detect activation of cell signal transduction pathways. This technology was designed specifically for ligand binding and immunological assays. Using this technology, fluorescent cells or beads at the bottom of the well are detected as localized areas of concentrated fluorescence using a data processing system. Unbound flurophore comprising the background signal is ignored, allowing for a wide variety of homogeneous assays. FMAT technology may be used for peptide ligand binding assays, immunofluorescence, apoptosis, cytotoxicity, and bead-based immunocapture assays. See, Miraglia S et al., “Homogeneous cell and bead based assays for highthroughput screening using flourometric microvolume assay technology,” Journal of Biomolecular Screening; 4:193-204 (1999). In particular, FMAT technology may be used to test, confirm, and/or identify the ability of polypeptides (including polypeptide fragments and variants) to activate signal transduction pathways. For example, FMAT technology may be used to test, confirm, and/or identify the ability of polypeptides to upregulate production of immunomodulatory proteins (such as, for example, interleukins, GM-CSF, Rantes, and Tumor Necrosis factors, as well as other cellular regulators (e.g. insulin)).

[0033] Table 1D also describes the use of kinase assays for testing, demonstrating, or quantifying biological activity. In this regard, the phosphorylation and de-phosphorylation of specific amino acid residues (e.g. Tyrosine, Serine, Threonine) on cell-signal transduction proteins provides a fast, reversible means for activation and de-activation of cellular signal transduction pathways. Moreover, cell signal transduction via phosphorylation/de-phosphorylation is crucial to the regulation of a wide variety of cellular processes (e.g. proliferation, differentiation, migration, apoptosis, etc.). Accordingly, kinase assays provide a powerful tool useful for testing, confirming, and/or identifying polypeptides (including polypeptide fragments and variants) that mediate cell signal transduction events via protein phosphorylation. See e.g., Forrer, P., Tamaskovic R., and Jaussi, R. “Enzyme-Linked Immunosorbent Assay for Measurement of JNK, ERK, and p38 Kinase Activities” Biol. Chem. 379(8-9): 1101-1110 (1998).

[0034] Description of Table 1E

[0035] Polynucleotides encoding polypeptides of the present invention can be used in assays to test for one or more biological activities. One such biological activity which may be tested includes the ability of polynucleotides and polypeptides of the invention to stimulate up-regulation or down-regulation of expression of particular genes and proteins. Hence, if polynucleotides and polypeptides of the present invention exhibit activity in altering particular gene and protein expression patterns, it is likely that these polynucleotides and polypeptides of the present invention may be involved in, or capable of effecting changes in, diseases associated with the altered gene and protein expression profiles. Hence, polynucleotides, polypeptides, or antibodies of the present invention could be used to treat said associated diseases.

[0036] TaqMan® assays may be performed to assess the ability of polynucleotides (and polypeptides they encode) to alter the expression pattern of particular “target” genes. TaqMan® reactions are performed to evaluate the ability of a test agent to induce or repress expression of specific genes in different cell types. TaqMan® gene expression quantification assays (“TaqMan® assays”) are well known to, and routinely performed by, those of ordinary skill in the art. TaqMan® assays are performed in a two step reverse transcription/polymerase chain reaction (RT-PCR). In the first (RT) step, cDNA is reverse transcribed from total RNA samples using random hexamer primers. In the second (PCR) step, PCR products are synthesized from the cDNA using gene specific primers.

[0037] To quantify gene expression the Taqman® PCR reaction exploits the 5′ nuclease activity of AmpliTaq Golds DNA Polymerase to cleave a Taqman® probe (distinct from the primers) during PCR. The Taqman® probe contains a reporter dye at the 5′-end of the probe and a quencher dye at the 3′ end of the probe. When the probe is intact, the proximity of the reporter dye to the quencher dye results in suppression of the reporter fluorescence. During PCR, if the target of interest is present, the probe specifically anneals between the forward and reverse primer sites. AmpliTaq Fold DNA Polymerase then cleaves the probe between the reporter and quencher when the probe hybridizes to the target, resulting in increased fluorescence of the reporter (see FIG. 2). Accumulation of PCR products is detected directly by monitoring the increase in fluorescence of the reporter dye.

[0038] After the probe fragments are displaced from the target, polymerization of the strand continues. The 3′-end of the probe is blocked to prevent extension of the probe during PCR. This process occurs in every cycle and does not interfere with the exponential accumulation of product. The increase in fluorescence signal is detected only if the target sequence is complementary to the probe and is amplified during PCR. Because of these requirements, any nonspecific amplification is not detected.

[0039] For test sample preparation, vector controls or constructs containing the coding sequence for the gene of interest are transfected into cells, such as for example 293T cells, and supernatants collected after 48 hours. For cell treatment and RNA isolation, multiple primary human cells or human cell lines are used; such cells may include but are not limited to, Normal Human Dermal Fibroblasts, Aortic Smooth Muscle, Human Umbilical Vein Endothelial Cells, HepG2, Daudi, Jurkat, U937, Caco, and TIP-1 cell lines. Cells are plated in growth media and growth is arrested by culturing without media change for 3 days, or by switching cells to low serum media and incubating overnight. Cells are treated for 1, 6, or 24 hours with either vector control supernatant or sample supernatant (or purified/partially purified protein preparations in buffer). Total RNA is isolated; for example, by using Trizol extraction or by using the Ambion RNAqueous™-4PCR RNA isolation system. Expression levels of multiple genes are analyzed using TAQMAN, and expression in the test sample is compared to control vector samples to identify genes induced or repressed. Each of the above described techniques are well known to, and routinely performed by, those of ordinary skill in the art.

[0040] Table 1E indicates particular disease classes and preferred indications for which polynucleotides, polypeptides, or antibodies of the present invention may be used in detecting, diagnosing, preventing, treating and/or ameliorating said diseases and disorders based on “target” gene expression patterns which may be up- or down-regulated by polynucleotides (and the encoded polypeptides) corresponding to each indicated cDNA Clone ID (shown in Table 1E, Column 2).

[0041] Thus, in preferred embodiments, the present invention encompasses a method of detecting, diagnosing, preventing, treating, and/or ameliorating a disease or disorder listed in the “Disease Class” and/or “Preferred Indication” columns of Table 1E; comprising administering to a patient in which such detection, diagnosis, prevention, or treatment is desired a protein, nucleic acid, or antibody of the invention (or fragment or variant thereof) in an amount effective to detect, diagnose, prevent, treat, or ameliorate the disease or disorder. The first and second columns of Table 1D show the “Gene No.” and “cDNA Clone ID No.”, respectively, indicating certain nucleic acids and proteins (or antibodies against the same) of the invention (including polynucleotide, polypeptide, and antibody fragments or variants thereof) that may be used in detecting, diagnosing, preventing, treating, or ameliorating the disease(s) or disorder(s) indicated in the corresponding row in the “Disease Class” or “Preferred Indication” Columns of Table 1E.

[0042] In another embodiment, the present invention also encompasses methods of detecting, diagnosing, preventing, treating, or ameliorating a disease or disorder listed in the “Disease Class” or “Preferred Indication” Columns of Table 1E; comprising administering to a patient combinations of the proteins, nucleic acids, or antibodies of the invention (or fragments or variants thereof), sharing similar indications as shown in the corresponding rows in the “Disease Class” or “Preferred Indication” Columns of Table 1E.

[0043] The “Disease Class” Column of Table 1E provides a categorized descriptive heading for diseases, disorders, and/or conditions (more fully described below) that may be detected, diagnosed, prevented, treated, or ameliorated by a protein, nucleic acid, or antibody of the invention (or fragment or variant thereof).

[0044] The “Preferred Indication” Column of Table 1E describes diseases, disorders, and/or conditions that may be detected, diagnosed, prevented, treated, or ameliorated by a protein, nucleic acid, or antibody of the invention (or fragment or variant thereof).

[0045] The “Cell Line” and “Exemplary Targets” Columns of Table 1E indicate particular cell lines and target genes, respectively, which may show altered gene expression patterns (i.e., up- or down-regulation of the indicated target gene) in Taqman assays, performed as described above, utilizing polynucleotides of the cDNA Clone ID shown in the corresponding row. Alteration of expression patterns of the indicated “Exemplary Target” genes is correlated with a particular “Disease Class” and/or “Preferred Indication” as shown in the corresponding row under the respective column headings.

[0046] The “Exemplary Accessions” Column indicates GenBank Accessions (available online through the National Center for Biotechnology Information (NCBI) at http://www.ncbi.nlm.nih.gov/) which correspond to the “Exemplary Targets” shown in the adjacent row.

[0047] The recitation of “Cancer” in the “Disease Class” Column indicates that the corresponding nucleic acid and protein, or antibody against the same, of the invention (or fragment or variant thereof) may be used for example, to detect, diagnose, prevent, treat, and/or ameliorate neoplastic diseases and/or disorders (e.g., leukemias, cancers, etc., as described below under “Hyperproliferative Disorders”).

[0048] The recitation of “Immune” in the “Disease Class” column indicates that the corresponding nucleic acid and protein, or antibody against the same, of the invention (or fragment or variant thereof), may be used for example, to detect, diagnose, prevent, treat, and/or ameliorate diseases and/or disorders relating to neoplastic diseases (e.g., as described below under “Hyperproliferative Disorders”), blood disorders (e.g., as described below under “Immune Activity” “Cardiovascular Disorders” and/or “Blood-Related Disorders”), and infections (e.g., as described below under “infectious Disease”).

[0049] The recitation of “Angiogenesis” in the “Disease Class” column indicates that the corresponding nucleic acid and protein, or antibody against the same, of the invention (or fragment or variant thereof), may be used for example, to detect, diagnose, treat, prevent, and/or ameliorate diseases and/or disorders relating to neoplastic diseases (e.g., as described below under “Hyperproliferative Disorders”), diseases and/or disorders of the cardiovascular system (e.g., as described below under “Cardiovascular Disorders”), diseases and/or disorders involving cellular and genetic abnormalities (e.g., as described below under “Diseases at the Cellular Level”), diseases and/or disorders involving angiogenesis (e.g., as described below under “Anti-Angiogenesis Activity”), to promote or inhibit cell or tissue regeneration (e.g., as described below under “Regeneration”), or to promote wound healing (e.g., as described below under “Wound Healing and Epithelial Cell Proliferation”).

[0050] The recitation of “Diabetes” in the “Disease Class” column indicates that the corresponding nucleic acid and protein, or antibody against the same, of the invention (or fragment or variant thereof), may be used for example, to detect, diagnose, treat, prevent, and/or ameliorate diabetes (including diabetes mellitus types I and II), as well as diseases and/or disorders associated with, or consequential to, diabetes (e.g. as described below under “Endocrine Disorders,” “Renal Disorders,” and “Gastrointestinal Disorders”).

[0051] Description of Table 2

[0052] Table 2 summarizes homology and features of some of the polypeptides of the invention. The first column provides a unique clone identifier, “Clone ID:”, corresponding to a cDNA clone disclosed in Table 1A or Table 1B. The second column provides the unique contig identifier, “Contig ID:” corresponding to contigs in Table 1B and allowing for correlation with the information in Table 1B. The third column provides the sequence identifier, “SEQ ID NO:X”, for the contig polynucleotide sequence. The fourth column provides the analysis method by which the homology/identity disclosed in the Table was determined. Comparisons were made between polypeptides encoded by the polynucleotides of the invention and either a non-redundant protein database (herein referred to as “NR”), or a database of protein families (herein referred to as “PFAM”) as further described below. The fifth column provides a description of the PFAM/NR hit having a significant match to a polypeptide of the invention. Column six provides the accession number of the PFAM/NR hit disclosed in the fifth column. Column seven, “Score/Percent Identity”, provides a quality score or the percent identity, of the hit disclosed in columns five and six. Columns 8 and 9, “NT From” and “NT To” respectively, delineate the polynucleotides in “SEQ ID NO:X” that encode a polypeptide having a significant match to the PFAM/NR database as disclosed in the fifth and sixth columns. In specific embodiments polypeptides of the invention comprise, or alternatively consist of, an amino acid sequence encoded by a polynucleotide in SEQ ID NO:X as delineated in columns 8 and 9, or fragments or variants thereof.

[0053] Description of Table 3

[0054] Table 3 provides polynucleotide sequences that may be disclaimed according to certain embodiments of the invention. The first column provides a unique clone identifier, “Clone ID”, for a cDNA clone related to contig sequences disclosed in Table 1B. The second column provides the sequence identifier, “SEQ ID NO:X”, for contig sequences disclosed in Table 1A and/or Table 1B. The third column provides the unique contig identifier, “Contig ID:”, for contigs disclosed in Table 1B. The fourth column provides a unique integer ‘a’ where ‘a’ is any integer between 1 and the final nucleotide minus 15 of SEQ ID NO:X, and the fifth column provides a unique integer ‘b’ where ‘b’ is any integer between 15 and the final nucleotide of SEQ ID NO:X, where both a and b correspond to the positions of nucleotide residues shown in SEQ ID NO:X, and where b is greater than or equal to a+14. For each of the polynucleotides shown as SEQ ID NO:X, the uniquely defined integers can be substituted into the general formula of a−b, and used to describe polynucleotides which may be preferably excluded from the invention. In certain embodiments, preferably excluded from the invention are at least one, two, three, four, five, ten, or more of the polynucleotide sequence(s) having the accession number(s) disclosed in the sixth column of this Table (including for example, published sequence in connection with a particular BAC clone). In further embodiments, preferably excluded from the invention are the specific polynucleotide sequence(s) contained in the clones corresponding to at least one, two, three, four, five, ten, or more of the available material having the accession numbers identified in the sixth column of this Table (including for example, the actual sequence contained in an identified BAC clone).

[0055] Description of Table 4

[0056] Table 4 provides a key to the tissue/cell source identifier code disclosed in Table 1B.2, column 5. Column 1 of Table 4 provides the tissue/cell source identifier code disclosed in Table 1B.2, Column 5. Columns 2-5 provide a description of the tissue or cell source. Note that “Description” and “Tissue” sources (i.e. columns 2 and 3) having the prefix “a_” indicates organs, tissues, or cells derived from “adult” sources. Codes corresponding to diseased tissues are indicated in column 6 with the word “disease.” The use of the word “disease” in column 6 is non-limiting. The tissue or cell source may be specific (e.g. a neoplasm), or may be disease-associated (e.g., a tissue sample from a normal portion of a diseased organ). Furthermore, tissues and/or cells lacking the “disease” designation may still be derived from sources directly or indirectly involved in a disease state or disorder, and therefore may have a further utility in that disease state or disorder. In numerous cases where the tissue/cell source is a library, column 7 identifies the vector used to generate the library.

[0057] Description of Table 5

[0058] Table 5 provides a key to the OMIM reference identification numbers disclosed in Table 1B.1, column 9. OMIM reference identification numbers (Column 1) were derived from Online Mendelian Inheritance in Man (Online Mendelian Inheritance in Man, OMIM. McKusick-Nathans Institute for Genetic Medicine, Johns Hopkins University (Baltimore, Md.) and National Center for Biotechnology Information, National Library of Medicine, (Bethesda, Md.) 2000. World Wide Web URL: http://www.ncbi.nlm.nih.gov/omim/). Column 2 provides diseases associated with the cytologic band disclosed in Table 1B.1, column 8, as determined using the Morbid Map database.

[0059] Description of Table 6

[0060] Table 6 summarizes some of the ATCC Deposits, Deposit dates, and ATCC designation numbers of deposits made with the ATCC in connection with the present application. These deposits were made in addition to those described in the Table 1A.

[0061] Description of Table 7

[0062] Table 7 shows the cDNA libraries sequenced, and ATCC designation numbers and vector information relating to these cDNA libraries.

[0063] The first column shows the first four letters indicating the Library from which each library clone was derived. The second column indicates the catalogued tissue description for the corresponding libraries. The third column indicates the vector containing the corresponding clones. The fourth column shows the ATCC deposit designation for each libray clone as indicated by the deposit information in Table 6.

[0064] Definitions

[0065] The following definitions are provided to facilitate understanding of certain terms used throughout this specification.

[0066] In the present invention, “isolated” refers to material removed from its original environment (e.g., the natural environment if it is naturally occurring), and thus is altered “by the hand of man” from its natural state. For example, an isolated polynucleotide could be part of a vector or a composition of matter, or could be contained within a cell, and still be “isolated” because that vector, composition of matter, or particular cell is not the original environment of the polynucleotide. The term “isolated” does not refer to genomic or cDNA libraries, whole cell total or mRNA preparations, genomic DNA preparations (including those separated by electrophoresis and transferred onto blots), sheared whole cell genomic DNA preparations or other compositions where the art demonstrates no distinguishing features of the polynucleotide/sequences of the present invention.

[0067] In the present invention, a “secreted” protein refers to those proteins capable of being directed to the ER, secretory vesicles, or the extracellular space as a result of a signal sequence, as well as those proteins released into the extracellular space without necessarily containing a signal sequence. If the secreted protein is released into the extracellular space, the secreted protein can undergo extracellular processing to produce a “mature” protein. Release into the extracellular space can occur by many mechanisms, including exocytosis and proteolytic cleavage.

[0068] As used herein, a “polynucleotide” refers to a molecule having a nucleic acid sequence encoding SEQ ID NO:Y or a fragment or variant thereof (e.g., the polypeptide delinated in columns fourteen and fifteen of Table 1A); a nucleic acid sequence contained in SEQ ID NO:X (as described in column 5 of Table 1A and/or column 3 of Table 1B) or the complement thereof; a cDNA sequence contained in Clone ID: (as described in column 2 of Table 1A and/or Table 1B and contained within a library deposited with the ATCC); a nucleotide sequence encoding the polypeptide encoded by a nucleotide sequence in SEQ ID NO:B as defined in column 6 (EXON From-To) of Table 1C or a fragment or variant thereof; or a nucleotide coding sequence in SEQ ID NO:B as defined in column 6 of Table 1C or the complement thereof. For example, the polynucleotide can contain the nucleotide sequence of the full length cDNA sequence, including the 5′ and 3′ untranslated sequences, the coding region, as well as fragments, epitopes, domains, and variants of the nucleic acid sequence. Moreover, as used herein, a “polypeptide” refers to a molecule having an amino acid sequence encoded by a polynucleotide of the invention as broadly defined (obviously excluding poly-Phenylalanine or poly-Lysine peptide sequences which result from translation of a polyA tail of a sequence corresponding to a cDNA).

[0069] In the present invention, “SEQ ID NO:X” was often generated by overlapping sequences contained in multiple clones (contig analysis). A representative clone containing all or most of the sequence for SEQ ID NO:X is deposited at Human Genome Sciences, Inc. (HGS) in a catalogued and archived library. As shown, for example, in column 2 of Table 1B, each clone is identified by a cDNA Clone ID (identifier generally referred to herein as Clone ID:). Each Clone ID is unique to an individual clone and the Clone ID is all the information needed to retrieve a given clone from the HGS library. Table 7 provides a list of the deposited cDNA libraries. One can use the Clone ID: to determine the library source by reference to Tables 6 and 7. Table 7 lists the deposited cDNA libraries by name and links each library to an ATCC Deposit. Library names contain four characters, for example, “HTWE.” The name of a cDNA clone (Clone ID) isolated from that library begins with the same four characters, for example “HTWEP07”. As mentioned below, Table 1A and/or Table 1B correlates the Clone ID names with SEQ ID NO:X. Thus, starting with an SEQ ID NO:X, one can use Tables 1A, 1B, 6, 7, and 9 to determine the corresponding Clone ID, which library it came from and which ATCC deposit the library is contained in. Furthermore, it is possible to retrieve a given cDNA clone from the source library by techniques known in the art and described elsewhere herein. The ATCC is located at 10801 University Boulevard, Manassas, Va. 20110-2209, USA. The ATCC deposits were made pursuant to the terms of the Budapest Treaty on the international recognition of the deposit of microorganisms for the purposes of patent procedure.

[0070] In specific embodiments, the polynucleotides of the invention are at least 15, at least 30, at least 50, at least 100, at least 125, at least 500, or at least 1000 continuous nucleotides but are less than or equal to 300 kb, 200 kb, 100 kb, 50 kb, 15 kb, 10 kb, 7.5 kb, 5 kb, 2.5 kb, 2.0 kb, or 1 kb, in length. In a further embodiment, polynucleotides of the invention comprise a portion of the coding sequences, as disclosed herein, but do not comprise all or a portion of any intron. In another embodiment, the polynucleotides comprising coding sequences do not contain coding sequences of a genomic flanking gene (i.e., 5′ or 3′ to the gene of interest in the genome). In other embodiments, the polynucleotides of the invention do not contain the coding sequence of more than 1000, 500, 250, 100, 50, 25, 20, 15, 10, 5, 4, 3, 2, or 1 genomic flanking gene(s).

[0071] A “polynucleotide” of the present invention also includes those polynucleotides capable of hybridizing, under stringent hybridization conditions, to sequences contained in SEQ ID NO:X, or the complement thereof (e.g., the complement of any one, two, three, four, or more of the polynucleotide fragments described herein), the polynucleotide sequence delineated in columns 7 and 8 of Table 1A or the complement thereof, the polynucleotide sequence delineated in columns 8 and 9 of Table 2 or the complement thereof, and/or cDNA sequences contained in Clone ID: (e.g., the complement of any one, two, three, four, or more of the polynucleotide fragments, or the cDNA clone within the pool of cDNA clones deposited with the ATCC, described herein), and/or the polynucleotide sequence delineated in column 6 of Table 1C or the complement thereof. “Stringent hybridization conditions” refers to an overnight incubation at 42 degree C. in a solution comprising 50% formamide, 5×SSC (750 mM NaCl, 75 mM trisodium citrate), 50 mM sodium phosphate (pH 7.6), 5× Denhardt's solution, 10% dextran sulfate, and 20 μg/ml denatured, sheared salmon sperm DNA, followed by washing the filters in 0.1×SSC at about 65 degree C.

[0072] Also contemplated are nucleic acid molecules that hybridize to the polynucleotides of the present invention at lower stringency hybridization conditions. Changes in the stringency of hybridization and signal detection are primarily accomplished through the manipulation of formamide concentration (lower percentages of formamide result in lowered stringency); salt conditions, or temperature. For example, lower stringency conditions include an overnight incubation at 37 degree C. in a solution comprising 6×SSPE (20×SSPE=3M NaCl; 0.2M NaH₂PO₄; 0.02M EDTA, pH 7.4), 0.5% SDS, 30% formamide, 100 ug/ml salmon sperm blocking DNA; followed by washes at 50 degree C. with 1×SSPE, 0.1% SDS. In addition, to achieve even lower stringency, washes performed following stringent hybridization can be done at higher salt concentrations (e.g. 5×SSC).

[0073] Note that variations in the above conditions may be accomplished through the inclusion and/or substitution of alternate blocking reagents used to suppress background in hybridization experiments. Typical blocking reagents include Denhardt's reagent, BLOTTO, heparin, denatured salmon sperm DNA, and commercially available proprietary formulations. The inclusion of specific blocking reagents may require modification of the hybridization conditions described above, due to problems with compatibility.

[0074] Of course, a polynucleotide which hybridizes only to polyA+ sequences (such as any 3′ terminal polyA+ tract of a cDNA shown in the sequence listing), or to a complementary stretch of T (or U) residues, would not be included in the definition of “polynucleotide,” since such a polynucleotide would hybridize to any nucleic acid molecule containing a poly (A) stretch or the complement thereof (e.g., practically any double-stranded cDNA clone generated using oligo dT as a primer).

[0075] The polynucleotide of the present invention can be composed of any polyribonucleotide or polydeoxribonucleotide, which may be unmodified RNA or DNA or modified RNA or DNA. For example, polynucleotides can be composed of single- and double-stranded DNA, DNA that is a mixture of single- and double-stranded regions, single- and double-stranded RNA, and RNA that is mixture of single- and double-stranded regions, hybrid molecules comprising DNA and RNA that may be single-stranded or, more typically, double-stranded or a mixture of single- and double-stranded regions. In addition, the polynucleotide can be composed of triple-stranded regions comprising RNA or DNA or both RNA and DNA. A polynucleotide may also contain one or more modified bases or DNA or RNA backbones modified for stability or for other reasons. “Modified” bases include, for example, tritylated bases and unusual bases such as inosine. A variety of modifications can be made to DNA and RNA; thus, “polynucleotide” embraces chemically, enzymatically, or metabolically modified forms.

[0076] In specific embodiments, the polynucleotides of the invention are at least 15, at least 30, at least 50, at least 100, at least 125, at least 500, or at least 1000 continuous nucleotides but are less than or equal to 300 kb, 200 kb, 100 kb, 50 kb, 15 kb, 10 kb, 7.5 kb, 5 kb, 2.5 kb, 2.0 kb, or 1 kb, in length. In a further embodiment, polynucleotides of the invention comprise a portion of the coding sequences, as disclosed herein, but do not comprise all or a portion of any intron. In another embodiment, the polynucleotides comprising coding sequences do not contain coding sequences of a genomic flanking gene (i.e., 5′ or 3′ to the gene of interest in the genome). In other embodiments, the polynucleotides of the invention do not contain the coding sequence of more than 1000, 500, 250, 100, 50, 25, 20, 15, 10, 5, 4, 3, 2, or 1 genomic flanking gene(s).

[0077] “SEQ ID NO:X” refers to a polynucleotide sequence described in column 5 of Table 1A, while “SEQ ID NO:Y” refers to a polypeptide sequence described in column 10 of Table 1A. SEQ ID NO:X is identified by an integer specified in column 6 of Table 1A. The polypeptide sequence SEQ ID NO:Y is a translated open reading frame (ORF) encoded by polynucleotide SEQ ID NO:X. The polynucleotide sequences are shown in the sequence listing immediately followed by all of the polypeptide sequences. Thus, a polypeptide sequence corresponding to polynucleotide sequence SEQ ID NO:2 is the first polypeptide sequence shown in the sequence listing. The second polypeptide sequence corresponds to the polynucleotide sequence shown as SEQ ID NO:3, and so on.

[0078] The polypeptide of the present invention can be composed of amino acids joined to each other by peptide bonds or modified peptide bonds, i.e., peptide isosteres, and may contain amino acids other than the 20 gene-encoded amino acids. The polypeptides may be modified by either natural processes, such as posttranslational processing, or by chemical modification techniques which are well known in the art. Such modifications are well described in basic texts and in more detailed monographs, as well as in a voluminous research literature. Modifications can occur anywhere in a polypeptide, including the peptide backbone, the amino acid side-chains and the amino or carboxyl termini. It will be appreciated that the same type of modification may be present in the same or varying degrees at several sites in a given polypeptide. Also, a given polypeptide may contain many types of modifications. Polypeptides may be branched, for example, as a result of ubiquitination, and they may be cyclic, with or without branching. Cyclic, branched, and branched cyclic polypeptides may result from posttranslation natural processes or may be made by synthetic methods. Modifications include acetylation, acylation, ADP-ribosylation, amidation, covalent attachment of flavin, covalent attachment of a heme moiety, covalent attachment of a nucleotide or nucleotide derivative, covalent attachment of a lipid or lipid derivative, covalent attachment of phosphotidylinositol, cross-linking, cyclization, disulfide bond formation, demethylation, formation of covalent cross-links, formation of cysteine, formation of pyroglutamate, formylation, gamma-carboxylation, glycosylation, GPI anchor formation, hydroxylation, iodination, methylation, myristoylation, oxidation, pegylation, proteolytic processing, phosphorylation, prenylation, racemization, selenoylation, sulfation, transfer-RNA mediated addition of amino acids to proteins such as arginylation, and ubiquitination. (See, for instance, PROTEINS—STRUCTURE AND MOLECULAR PROPERTIES, 2nd Ed., T. E. Creighton, W. H. Freeman and Company, New York (1993); POSTTRANSLATIONAL COVALENT MODIFICATION OF PROTEINS, B. C. Johnson, Ed., Academic Press, New York, pgs. 1-12 (1983); Seifter et al., Meth. Enzymol. 182:626-646 (1990); Rattan et al., Ann. N.Y. Acad. Sci. 663:48-62 (1992)).

[0079] “SEQ ID NO:X” refers to a polynucleotide sequence described, for example, in Tables 1A, Table 1B, or Table 2, while “SEQ ID NO:Y” refers to a polypeptide sequence described in column 11 of Table 1A and or column 6 of Table 1B.1. SEQ ID NO:X is identified by an integer specified in column 4 of Table 1B. The polypeptide sequence SEQ ID NO:Y is a translated open reading frame (ORF) encoded by polynucleotide SEQ ID NO:X. “Clone ID:” refers to a cDNA clone described in column 2 of Table 1A and/or 1B.

[0080] “A polypeptide having functional activity” refers to a polypeptide capable of displaying one or more known functional activities associated with a full-length (complete) protein. Such functional activities include, but are not limited to, biological activity (e.g. activity useful in treating, preventing and/or ameliorating cancer and other hyperproliferative disorders), antigenicity (ability to bind [or compete with a polypeptide for binding] to an anti-polypeptide antibody), immunogenicity (ability to generate antibody which binds to a specific polypeptide of the invention), ability to form multimers with polypeptides of the invention, and ability to bind to a receptor or ligand for a polypeptide.

[0081] The polypeptides of the invention can be assayed for functional activity (e.g. biological activity) using or routinely modifying assays known in the art, as well as assays described herein. Specifically, one of skill in the art may routinely assay secreted polypeptides (including fragments and variants) of the invention for activity using assays as described in the examples section below.

[0082] “A polypeptide having biological activity” refers to a polypeptide exhibiting activity similar to, but not necessarily identical to, an activity of a polypeptide of the present invention, including mature forms, as measured in a particular biological assay, with or without dose dependency. In the case where dose dependency does exist, it need not be identical to that of the polypeptide, but rather substantially similar to the dose-dependence in a given activity as compared to the polypeptide of the present invention (i.e., the candidate polypeptide will exhibit greater activity or not more than about 25-fold less and, preferably, not more than about tenfold less activity, and most preferably, not more than about three-fold less activity relative to the polypeptide of the present invention).

Tables:

[0083] Table 1A

[0084] Table 1A summarizes information concerning certain polypnucleotides and polypeptides of the invention. The first column provides the gene number in the application for each clone identifier. The second column provides a unique clone identifier, “Clone ID:”, for a cDNA clone related to each contig sequence disclosed in Table 1A. Third column, the cDNA Clones identified in the second column were deposited as indicated in the third column (i.e. by ATCC Deposit No:Z and deposit date). Some of the deposits contain multiple different clones corresponding to the same gene. In the fourth column, “Sector” refers to the type of vector contained in the corresponding cDNA Clone identified in the second column. In the fifth column, the nucleotide sequence identified as “NT SEQ ID NO:X” was assembled from partially homologous (“overlapping”) sequences obtained from the corresponding cDNA clone identified in the second column and, in some cases, from additional related cDNA clones. The overlapping sequences were assembled into a single contiguous sequence of high redundancy (usually three to five overlapping sequences at each nucleotide position), resulting in a final sequence identified as SEQ ID NO:X. In the sixth column, “Total NT Seq.” refers to the total number of nucleotides in the contig sequence identified as SEQ ID NO:X.” The deposited clone may contain all or most of these sequences, reflected by the nucleotide position indicated as “5′ NT of Clone Seq.” (seventh column) and the “3′ NT of Clone Seq.” (eighth column) of SEQ ID NO:X. In the ninth column, the nucleotide position of SEQ ID NO:X of the putative start codon (methionine) is identified as “5′ NT of Start Codon.” Similarly, in column ten, the nucleotide position of SEQ ID NO:X of the predicted signal sequence is identified as “5′ NT of First AA of Signal Pep.” In the eleventh column, the translated amino acid sequence, beginning with the methionine, is identified as “AA SEQ ID NO:Y,” although other reading frames can also be routinely translated using known molecular biology techniques. The polypeptides produced by these alternative open reading frames are specifically contemplated by the present invention.

[0085] In the twelfth and thirteenth columns of Table 1A, the first and last amino acid position of SEQ ID NO:Y of the predicted signal peptide is identified as “First AA of Sig Pep” and “Last AA of Sig Pep.” In the fourteenth column, the predicted first amino acid position of SEQ ID NO:Y of the secreted portion is identified as “Predicted First AA of Secreted Portion”. The amino acid position of SEQ ID NO:Y of the last amino acid encoded by the open reading frame is identified in the fifteenth column as “Last AA of ORF”.

[0086] SEQ ID NO:X (where X may be any of the polynucleotide sequences disclosed in the sequence listing) and the translated SEQ ID NO:Y (where Y may be any of the polypeptide sequences disclosed in the sequence listing) are sufficiently accurate and otherwise suitable for a variety of uses well known in the art and described further below. For instance, SEQ ID NO:X is useful for designing nucleic acid hybridization probes that will detect nucleic acid sequences contained in SEQ ID NO:X or the cDNA contained in the deposited clone. These probes will also hybridize to nucleic acid molecules in biological samples, thereby enabling a variety of forensic and diagnostic methods of the invention. Similarly, polypeptides identified from SEQ ID NO:Y may be used, for example, to generate antibodies which bind specifically to proteins containing the polypeptides and the secreted proteins encoded by the cDNA clones identified in Table 1A and/or elsewhere herein

[0087] Nevertheless, DNA sequences generated by sequencing reactions can contain sequencing errors. The errors exist as misidentified nucleotides, or as insertions or deletions of nucleotides in the generated DNA sequence. The erroneously inserted or deleted nucleotides cause frame shifts in the reading frames of the predicted amino acid sequence. In these cases, the predicted amino acid sequence diverges from the actual amino acid sequence, even though the generated DNA sequence may be greater than 99.9% identical to the actual DNA sequence (for example, one base insertion or deletion in an open reading frame of over 1000 bases).

[0088] Accordingly, for those applications requiring precision in the nucleotide sequence or the amino acid sequence, the present invention provides not only the generated nucleotide sequence identified as SEQ ID NO:X, and the predicted translated amino acid sequence identified as SEQ ID NO:Y, but also a sample of plasmid DNA containing a human cDNA of the invention deposited with the ATCC, as set forth in Table 1A. The nucleotide sequence of each deposited plasmid can readily be determined by sequencing the deposited plasmid in accordance with known methods

[0089] The predicted amino acid sequence can then be verified from such deposits. Moreover, the amino acid sequence of the protein encoded by a particular plasmid can also be directly determined by peptide sequencing or by expressing the protein in a suitable host cell containing the deposited human cDNA, collecting the protein, and determining its sequence.

[0090] Also provided in Table 1A is the name of the vector which contains the cDNA plasmid. Each vector is routinely used in the art. The following additional information is provided for convenience.

[0091] Vectors Lambda Zap (U.S. Pat. Nos. 5,128,256 and 5,286,636), Uni-Zap XR (U.S. Pat. Nos. 5,128,256 and 5,286,636), Zap Express (U.S. Pat. Nos. 5,128,256 and 5,286,636), pBluescript (pBS) (Short, J. M. et al., Nucleic Acids Res. 16:7583-7600 (1988); Alting-Mees, M. A. and Short, J. M., Nucleic Acids Res. 17:9494 (1989)) and pBK (Alting-Mees, M. A. et al., Strategies 5:58-61 (1992)) are commercially available from Stratagene Cloning Systems, Inc., 11011 N. Torrey Pines Road, La Jolla, Calif., 92037. pBS contains an ampicillin resistance gene and pBK contains a neomycin resistance gene. Phagemid pBS may be excised from the Lambda Zap and Uni-Zap XR vectors, and phagemid pBK may be excised from the Zap Express vector. Both phagemids may be transformed into E. coli strain XL-1 Blue, also available from Stratagene

[0092] Vectors pSport1, pCMVSport 1.0, pCMVSport 2.0 and pCMVSport 3.0, were obtained from Life Technologies, Inc., P.O. Box 6009, Gaithersburg, Md. 20897. All Sport vectors contain an ampicillin resistance gene and may be transformed into E. coli strain DH10B, also available from Life Technologies. See, for instance, Gruber, C. E., et al., Focus 15:59 (1993). Vector lafmid BA (Bento Soares, Columbia University, New York, N.Y.) contains an ampicillin resistance gene and can be transformed into E. coli strain XL-1 Blue. Vector pCR®2.1, which is available from Invitrogen, 1600 Faraday Avenue, Carlsbad, Calif. 92008, contains an ampicillin resistance gene and may be transformed into E. coli strain DH10B, available from Life Technologies. See, for instance, Clark, J. M., Nuc. Acids Res. 16:9677-9686 (1988) and Mead, D. et al., Bio/Technology 9: (1991).

[0093] The present invention also relates to the genes corresponding to SEQ ID NO:X, SEQ ID NO:Y, and/or a deposited cDNA (cDNA Clone ID). The corresponding gene can be isolated in accordance with known methods using the sequence information disclosed herein. Such methods include, but are not limited to, preparing probes or primers from the disclosed sequence and identifying or amplifying the corresponding gene from appropriate sources of genomic material.

[0094] Also provided in the present invention are allelic variants, orthologs, and/or species homologs. Procedures known in the art can be used to obtain full-length genes, allelic variants, splice variants, full-length coding portions, orthologs, and/or species homologs of genes corresponding to SEQ ID NO:X and SEQ ID NO:Y using information from the sequences disclosed herein or the clones deposited with the ATCC. For example, allelic variants and/or species homologs may be isolated and identified by making suitable probes or primers from the sequences provided herein and screening a suitable nucleic acid source for allelic variants and/or the desired homologue.

[0095] The present invention provides a polynucleotide comprising, or alternatively consisting of, the nucleic acid sequence of SEQ ID NO:X and/or a cDNA contained in ATCC Deposit No.Z. The present invention also provides a polypeptide comprising, or alternatively, consisting of, the polypeptide sequence of SEQ ID NO:Y, a polypeptide encoded by SEQ ID NO:X, and/or a polypeptide encoded by a cDNA contained in ATCC deposit No.Z. Polynucleotides encoding a polypeptide comprising, or alternatively consisting of the polypeptide sequence of SEQ ID NO:Y, a polypeptide encoded by SEQ ID NO:X and/or a polypeptide encoded by the cDNA contained in ATCC Deposit No.Z, are also encompassed by the invention. The present invention further encompasses a polynucleotide comprising, or alternatively consisting of the complement of the nucleic acid sequence of SEQ ID NO:X, and/or the complement of the coding strand of the cDNA contained in ATCC Deposit No.Z.

TABLE 1A

| | | | | | | | | | | | | | | |
|---|---|---|---|---|---|---|---|---|---|---|---|---|---|---|
| | | | | | | | | | 5′ NT | | | | | |
| | | | | NT | | | | | of | AA | First | Last | | |
| | | ATCC | | SEQ | | 5′ NT | 3′ NT | 5′ NT | First | SEQ | AA | AA | First AA | Last |
| | | Deposit | | ID | Total | of | of | of | AA of | ID | of | of | of | AA |
| Gene | cDNA | No:Z and | | NO: | NT | Clone | Clone | Start | Signal | NO: | Sig | Sig | Secreted | of |
| No. | Clone ID | Date | Vector | X | Seq. | Seq. | Seq. | Codon | Pep | Y | Pep | Pep | Portion | ORF |

| | | | | | | | | | | | | | | |
|---|---|---|---|---|---|---|---|---|---|---|---|---|---|---|
| 1 | H6BSF56 | 203917 | Uni-ZAP XR | 11 | 605 | 44 | 605 | | 83 | 428 | 1 | 6 | 7 | 141 |
| | | Apr. 08, 1999 | | | | | | | | | | | | |
| 2 | H6EEC72 | PTA-793 | Uni-ZAP XR | 12 | 1493 | 1 | 1493 | | 263 | 429 | 1 | 13 | 14 | 18 |
| | | Sep. 27, 1999 | | | | | | | | | | | | |
| 3 | HACAB68 | 203917 | Uni-ZAP XR | 13 | 1300 | 1 | 1300 | 135 | 135 | 430 | 1 | 26 | 27 | 78 |
| | | Apr. 08, 1999 | | | | | | | | | | | | |
| 4 | HACBS22 | 203979 | Uni-ZAP XR | 14 | 3239 | 1 | 3239 | 217 | 217 | 431 | 1 | 23 | 24 | 41 |
| | | Apr. 29, 1999 | | | | | | | | | | | | |
| 5 | HADDE71 | 203917 | pSport1 | 15 | 667 | 1 | 667 | 250 | 250 | 432 | 1 | 28 | 29 | 139 |
| | | Apr. 08, 1999 | | | | | | | | | | | | |
| 6 | HADDJ13 | 203917 | pSport1 | 16 | 2318 | 1 | 2318 | 347 | 347 | 433 | 1 | 20 | 21 | 30 |
| | | Apr. 08, 1999 | | | | | | | | | | | | |
| 7 | HADMA77 | 203917 | pBluescript | 17 | 1913 | 763 | 1913 | | 992 | 434 | 1 | 14 | 15 | 23 |
| | | Apr. 08, 1999 | | | | | | | | | | | | |
| 8 | HADMB15 | 203979 | pBluescript | 18 | 330 | 1 | 330 | | 238 | 435 | 1 | 11 | 12 | 20 |
| | | Apr. 29, 1999 | | | | | | | | | | | | |
| 9 | HAGBQ12 | 203917 | Uni-ZAP XR | 19 | 743 | 1 | 743 | 171 | 171 | 436 | 1 | 19 | 20 | 21 |
| | | Apr. 08, 1999 | | | | | | | | | | | | |
| 10 | HAGEG10 | 203917 | Uni-ZAP XR | 20 | 5684 | 100 | 2890 | 146 | 146 | 437 | 1 | 29 | 30 | 55 |
| | | Apr. 08, 1999 | | | | | | | | | | | | |
| 11 | HAGEQ79 | 203917 | Uni-ZAP XR | 21 | 785 | 1 | 785 | 515 | 515 | 438 | 1 | | | 11 |
| | | Apr. 08, 1999 | | | | | | | | | | | | |
| 12 | HAGFJ67 | PTA-181 | Uni-ZAP XR | 22 | 2122 | 1 | 2122 | 208 | 208 | 439 | 1 | 26 | 27 | 92 |
| | | Jun. 07, 1999 | | | | | | | | | | | | |
| 13 | HAGFS57 | 203979 | Uni-ZAP XR | 23 | 874 | 1 | 874 | 241 | 241 | 440 | 1 | 26 | 27 | 54 |
| | | Apr. 29, 1999 | | | | | | | | | | | | |
| 14 | HAGHN57 | 203917 | Uni-ZAP XR | 24 | 2440 | 843 | 2440 | 900 | 900 | 441 | 1 | | | 10 |
| | | Apr. 08, 1999 | | | | | | | | | | | | |
| 15 | HAJAA47 | 203917 | pCMVSport | 25 | 1237 | 1 | 1237 | | 192 | 442 | 1 | 15 | 16 | 38 |
| | | Apr. 08, 1999 | 3.0 | | | | | | | | | | | |
| 16 | HAJAY92 | 203959 | pCMVSport | 26 | 2345 | 1 | 2345 | 12 | 12 | 443 | 1 | 20 | 21 | 94 |
| | | Apr. 26, 1999 | 3.0 | | | | | | | | | | | |
| 17 | HAJCH70 | 203917 | pCMvSport | 27 | 2182 | 1 | 2182 | 284 | 284 | 444 | 1 | 32 | 33 | 38 |
| | | Apr. 08, 1999 | 3.0 | | | | | | | | | | | |
| 18 | HAOAG15 | 203979 | pSport1 | 28 | 5143 | 7 | 4802 | | 8 | 445 | 1 | 22 | 23 | 1167 |
| | | Apr. 29, 1999 | | | | | | | | | | | | |
| 19 | HAQAI92 | 203917 | Uni-ZAP XR | 29 | 607 | 1 | 602 | 250 | 250 | 446 | 1 | 15 | 16 | 23 |
| | | Apr. 08, 1999 | | | | | | | | | | | | |
| 20 | HARAE26 | 203917 | pBluescript | 30 | 1245 | 1 | 1245 | 225 | 225 | 447 | 1 | 30 | 31 | 97 |
| | | Apr. 08, 1999 | SK- | | | | | | | | | | | |
| 21 | HATBI94 | 203917 | Uni-ZAP XR | 31 | 1380 | 1 | 1380 | 18 | 18 | 448 | 1 | 20 | 21 | 68 |
| | | Apr. 08, 1999 | | | | | | | | | | | | |
| 22 | HATCB45 | 203917 | Uni-ZAP XR | 32 | 903 | 1 | 903 | 268 | 268 | 449 | 1 | 16 | 17 | 42 |
| | | Apr. 08, 1999 | | | | | | | | | | | | |
| 23 | HATCI03 | 203917 | Uni-ZAP XR | 33 | 934 | 1 | 934 | 271 | 271 | 450 | 1 | | | 17 |
| | | Apr. 08, 1999 | | | | | | | | | | | | |
| 24 | HATEH20 | 203917 | Uni-ZAP XR | 34 | 850 | 1 | 850 | 93 | 93 | 451 | 1 | 19 | 20 | 42 |
| | | Apr. 08, 1999 | | | | | | | | | | | | |
| 25 | HBAGD86 | 203917 | pSport1 | 35 | 1713 | 293 | 1596 | 521 | 521 | 452 | 1 | 18 | 19 | 19 |
| | | Apr. 08, 1999 | | | | | | | | | | | | |
| 26 | HBCJL35 | PTA-794 | pSport1 | 36 | 720 | 1 | 720 | 17 | 17 | 453 | 1 | 27 | 28 | 124 |
| | | Sep. 27, 1999 | | | | | | | | | | | | |
| 26 | HBCJL35 | PTA-794 | pSport1 | 402 | 2878 | 1027 | 1747 | 1033 | 1033 | 819 | 1 | 27 | 28 | 124 |
| | | Sep. 27, 1999 | | | | | | | | | | | | |
| 27 | HBGBG29 | 203917 | Uni-ZAP XR | 37 | 1856 | 764 | 1829 | | 1016 | 454 | 1 | | | 2 |
| | | Apr. 08, 1999 | | | | | | | | | | | | |
| 28 | HBGNC72 | PTA-793 | Uni-ZAP XR | 38 | 802 | 1 | 802 | | 550 | 455 | 1 | 8 | 9 | 76 |
| | | Sep. 27, 1999 | | | | | | | | | | | | |
| 29 | HBHAA81 | 203959 | Uni-ZAP XR | 39 | 1647 | 1 | 1647 | 28 | 28 | 456 | 1 | 24 | 25 | 203 |
| | | Apr. 26, 1999 | | | | | | | | | | | | |
| 30 | HBIAA59 | 203917 | Uni-ZAP XR | 40 | 2392 | 1612 | 2392 | 1877 | 1877 | 457 | 1 | 15 | 16 | 136 |
| | | Apr. 08, 1999 | | | | | | | | | | | | |
| 31 | HBIAC29 | 203917 | Uni-ZAP XR | 41 | 1782 | 808 | 1545 | 1036 | 1036 | 458 | 1 | 24 | 25 | 29 |
| | | Apr. 08, 1999 | | | | | | | | | | | | |
| 32 | HBICW51 | 203917 | Uni-ZAP XR | 42 | 619 | 1 | 619 | | 289 | 459 | 1 | 16 | 17 | 42 |
| | | Apr. 08, 1999 | | | | | | | | | | | | |
| 33 | HBJAB02 | 203917 | Uni-ZAP XR | 43 | 1693 | 1 | 1665 | 84 | 84 | 460 | 1 | 27 | 28 | 34 |
| | | Apr. 08, 1999 | | | | | | | | | | | | |
| 34 | HBJAC65 | 203917 | Uni-ZAP XR | 44 | 1685 | 1 | 892 | 137 | 137 | 461 | 1 | 13 | 14 | 23 |
| | | Apr. 08, 1999 | | | | | | | | | | | | |
| 35 | HBJBM12 | 203917 | Uni-ZAP XR | 45 | 1135 | 1 | 1135 | 47 | 47 | 462 | 1 | | | 31 |
| | | Apr. 08, 1999 | | | | | | | | | | | | |
| 36 | HBJDS79 | 203917 | Uni-ZAP XR | 46 | 2325 | 896 | 2325 | 1032 | 1032 | 463 | 1 | 37 | 38 | 107 |
| | | Apr. 08, 1999 | | | | | | | | | | | | |
| 37 | HBJFK45 | 203917 | Uni-ZAP XR | 47 | 543 | 1 | 543 | | 430 | 464 | 1 | | | 8 |
| | | Apr. 08, 1999 | | | | | | | | | | | | |
| 38 | HBJIG20 | PTA-181 | Uni-ZAP XR | 48 | 637 | 1 | 637 | | 321 | 465 | 1 | 16 | 17 | 77 |
| | | Jun. 07, 1999 | | | | | | | | | | | | |
| 39 | HBJKD16 | 203979 | Uni-ZAP XR | 49 | 1629 | 1 | 1629 | 78 | 78 | 466 | 1 | 18 | 19 | 31 |
| | | Apr. 29, 1999 | | | | | | | | | | | | |
| 40 | HBMBM96 | 203917 | pBluescript | 50 | 1076 | 1 | 1076 | | 170 | 467 | 1 | | | 4 |
| | | Apr. 08, 1999 | | | | | | | | | | | | |
| 41 | HBMBX01 | 203917 | pBluescript | 51 | 1652 | 179 | 1458 | 363 | 363 | 468 | 1 | 18 | 19 | 28 |
| | | Apr. 08, 1999 | | | | | | | | | | | | |
| 42 | HBMTM11 | 203917 | Uni-ZAP XR | 52 | 1639 | 1 | 1639 | 125 | 125 | 469 | 1 | 19 | 20 | 31 |
| | | Apr. 08, 1999 | | | | | | | | | | | | |
| 43 | HBMTX26 | 203917 | Uni-ZAP XR | 53 | 1308 | 1 | 1308 | 107 | 107 | 470 | 1 | 46 | 47 | 89 |
| | | Apr. 08, 1999 | | | | | | | | | | | | |
| 44 | HBMTY48 | 203917 | Uni-ZAP XR | 54 | 1891 | 1 | 1891 | 660 | 660 | 471 | 1 | 36 | 37 | 94 |
| | | Apr. 08, 1999 | | | | | | | | | | | | |
| 45 | HBMUH74 | PTA-181 | Uni-ZAP XR | 55 | 726 | 1 | 726 | 344 | 344 | 472 | 1 | 13 | 14 | 28 |
| | | Jun. 07, 1999 | | | | | | | | | | | | |
| 46 | HBMWE61 | 203917 | Uni-ZAP XR | 56 | 1118 | 1 | 1118 | 238 | 238 | 473 | 1 | | | 9 |
| | | Apr. 08, 1999 | | | | | | | | | | | | |
| 47 | HBNBJ76 | 203917 | Uni-ZAP XR | 57 | 1974 | 1469 | 1974 | | 1603 | 474 | 1 | 29 | 30 | 68 |
| | | Apr. 08, 1999 | | | | | | | | | | | | |
| 48 | HBQAC57 | 203917 | Lambda ZAP | 58 | 2111 | 1 | 2111 | 146 | 146 | 475 | 1 | | | 29 |
| | | Apr. 08, 1999 | II | | | | | | | | | | | |
| 49 | HBSAK32 | PTA-181 | Uni-ZAP XR | 59 | 592 | 129 | 592 | 447 | 447 | 476 | 1 | 27 | 28 | 48 |
| | | Jun. 07, 1999 | | | | | | | | | | | | |
| 50 | HBXCM66 | 203917 | ZAP Express | 60 | 1010 | 41 | 1010 | 119 | 119 | 477 | 1 | | | 16 |
| | | Apr. 08, 1999 | | | | | | | | | | | | |
| 51 | HBXCX15 | 203917 | ZAP Express | 61 | 1219 | 1 | 1219 | | 1148 | 478 | 1 | | | 1 |
| | | Apr. 08, 1999 | | | | | | | | | | | | |
| 52 | HCDCY76 | 203917 | Uni-ZAP XR | 62 | 1392 | 628 | 1392 | | 860 | 479 | 1 | 17 | 18 | 35 |
| | | Apr. 08, 1999 | | | | | | | | | | | | |
| 53 | HCDDL48 | 203917 | Uni-ZAP XR | 63 | 813 | 1 | 813 | 333 | 333 | 480 | 1 | 12 | 13 | 40 |
| | | Apr. 08, 1999 | | | | | | | | | | | | |
| 54 | HCE1G78 | 203917 | Uni-ZAP XR | 64 | 1896 | 1 | 1896 | 77 | 77 | 481 | 1 | 17 | 18 | 254 |
| | | Apr. 08, 1999 | | | | | | | | | | | | |
| 55 | HCE2H52 | 203979 | Uni-ZAP XR | 65 | 1276 | 1 | 1276 | | 29 | 482 | 1 | 15 | 16 | 23 |
| | | Apr. 29, 1999 | | | | | | | | | | | | |
| 56 | HCE3B04 | 203917 | Uni-ZAP XR | 66 | 1807 | 1347 | 1806 | | 1588 | 483 | 1 | 13 | 14 | 32 |
| | | Apr. 08, 1999 | | | | | | | | | | | | |
| 57 | HCE5F78 | 203917 | Uni-ZAP XR | 67 | 1732 | 282 | 1732 | | 566 | 484 | 1 | 8 | 9 | 32 |
| | | Apr. 08, 1999 | | | | | | | | | | | | |
| 58 | HCEEE79 | 203917 | Uni-ZAP XR | 68 | 1052 | 1 | 1052 | 131 | 131 | 485 | 1 | 15 | 16 | 55 |
| | | Apr. 08, 1999 | | | | | | | | | | | | |
| 59 | HCEEQ25 | 203917 | Uni-ZAP XR | 69 | 992 | 1 | 992 | | 111 | 486 | 1 | 15 | 16 | 23 |
| | | Apr. 08, 1999 | | | | | | | | | | | | |
| 60 | HCEEU18 | 203917 | Uni-ZAP XR | 70 | 1229 | 1 | 1229 | 209 | 209 | 487 | 1 | 30 | 31 | 43 |
| | | Apr. 08, 1999 | | | | | | | | | | | | |
| 61 | HCEFG93 | 203917 | Uni-ZAP XR | 71 | 2280 | 1 | 2280 | | 166 | 488 | 1 | | | 13 |
| | | Apr. 08, 1999 | | | | | | | | | | | | |
| 62 | HCEFZ82 | 203917 | Uni-ZAP XR | 72 | 1811 | 44 | 1781 | 215 | 215 | 489 | 1 | 16 | 17 | 265 |
| | | Apr. 08, 1999 | | | | | | | | | | | | |
| 63 | HCEGG08 | 203979 | Uni-ZAP XR | 73 | 2534 | 979 | 2025 | 1114 | 1114 | 490 | 1 | 15 | 16 | 27 |
| | | Apr. 29, 1999 | | | | | | | | | | | | |
| 64 | HCEGX05 | 203917 | Uni-ZAP XR | 74 | 1305 | 1 | 1305 | 237 | 237 | 491 | 1 | | | 15 |
| | | Apr. 08, 1999 | | | | | | | | | | | | |
| 65 | HCFLN88 | 203917 | pSport1 | 75 | 1434 | 1 | 1434 | 101 | 101 | 492 | 1 | 16 | 17 | 25 |
| | | Apr. 08, 1999 | | | | | | | | | | | | |
| 66 | HGFLT90 | 203917 | pSport1 | 76 | 910 | 1 | 735 | | 384 | 493 | 1 | | | 1 |
| | | Apr. 08, 1999 | | | | | | | | | | | | |
| 67 | HCLBK61 | 203979 | Lambda ZAP | 77 | 1588 | 574 | 1563 | | 1050 | 494 | 1 | 18 | 19 | 29 |
| | | Apr. 29, 1999 | II | | | | | | | | | | | |
| 68 | HCQCC96 | 203979 | Lambda ZAP | 78 | 2166 | 632 | 1455 | 782 | 782 | 495 | 1 | 20 | 21 | 45 |
| | | Apr. 29, 1999 | II | | | | | | | | | | | |
| 69 | HCQCJ56 | 203917 | Lambda ZAP | 79 | 1287 | 1 | 1287 | | 728 | 496 | 1 | | | 1 |
| | | Apr. 08, 1999 | II | | | | | | | | | | | |
| 70 | HCRAY10 | 203917 | Uni-ZAP XR | 80 | 788 | 1 | 788 | | 141 | 497 | 1 | 36 | 37 | 145 |
| | | Apr. 08, 1999 | | | | | | | | | | | | |
| 71 | HCRBF72 | 203917 | Uni-ZAP XR | 81 | 1264 | 101 | 1142 | 191 | 191 | 498 | 1 | 1 | 2 | 211 |
| | | Apr. 08, 1999 | | | | | | | | | | | | |
| 72 | HCRNF78 | 203917 | pSport1 | 82 | 892 | 1 | 892 | 363 | 363 | 499 | 1 | 22 | 23 | 46 |
| | | Apr. 08, 1999 | | | | | | | | | | | | |
| 73 | HCUAF85 | 203917 | ZAP Express | 83 | 597 | 1 | 597 | 230 | 230 | 500 | 1 | 23 | 24 | 122 |
| | | Apr. 08, 1999 | | | | | | | | | | | | |
| 74 | HCUCF89 | 203917 | ZAP Express | 84 | 530 | 1 | 530 | 189 | 189 | 501 | 1 | 18 | 19 | 29 |
| | | Apr. 08, 1999 | | | | | | | | | | | | |
| 75 | HCUCK44 | 203957 | ZAP Express | 85 | 1143 | 578 | 1136 | 598 | 598 | 502 | 1 | 30 | 31 | 60 |
| | | Apr. 26, 1999 | | | | | | | | | | | | |
| 76 | HCUDD64 | 203917 | ZAP Express | 86 | 402 | 150 | 389 | 256 | 256 | 503 | 1 | 35 | 36 | 49 |
| | | Apr. 08, 1999 | | | | | | | | | | | | |
| 77 | HCWAE64 | 203917 | ZAP Express | 87 | 471 | 1 | 471 | | 410 | 504 | 1 | | | 5 |
| | | Apr. 08, 1999 | | | | | | | | | | | | |
| 78 | HCWFU39 | 203917 | ZAP Express | 88 | 467 | 1 | 467 | 282 | 282 | 505 | 1 | 9 | 10 | 22 |
| | | Apr. 08, 1999 | | | | | | | | | | | | |
| 79 | HDHAA42 | 203917 | pCMVSport | 89 | 943 | 1 | 943 | 48 | 48 | 506 | 1 | 25 | 26 | 26 |
| | | Apr. 08, 1999 | 2.0 | | | | | | | | | | | |
| 80 | HDHEB76 | 203917 | pCMVSport | 90 | 497 | 1 | 497 | | 416 | 507 | 1 | 11 | 12 | 12 |
| | | Apr. 08, 1999 | 2.0 | | | | | | | | | | | |
| 81 | HDPCW16 | 203960 | pCMVSport | 91 | 1536 | 1 | 1536 | 172 | 172 | 508 | 1 | 38 | 39 | 55 |
| | | Apr. 26, 1999 | 3.0 | | | | | | | | | | | |
| 82 | HDPDI72 | PTA-794 | pCMVSport | 92 | 1550 | 1 | 1550 | 23 | 23 | 509 | 1 | 17 | 18 | 120 |
| | | Sep. 27, 1999 | 3.0 | | | | | | | | | | | |
| 83 | HDPDJ58 | 203960 | pCMVSport | 93 | 1997 | 1 | 1997 | 279 | 279 | 510 | 1 | | | 20 |
| | | Apr. 26, 1999 | 3.0 | | | | | | | | | | | |
| 84 | HDPFU43 | 203960 | pCMVSport | 94 | 1904 | 1 | 1889 | 220 | 220 | 511 | 1 | 28 | 29 | 52 |
| | | Apr. 26, 1999 | 3.0 | | | | | | | | | | | |
| 85 | HDPFY18 | 203918 | pCMVSport | 95 | 2187 | 1 | 2187 | 161 | 161 | 512 | 1 | | | 7 |
| | | Apr. 08, 1999 | 3.0 | | | | | | | | | | | |
| 86 | HDPIE44 | PTA-794 | pCMVSport | 96 | 4115 | 1 | 4115 | 169 | 169 | 513 | 1 | 35 | 36 | 60 |
| | | Sep. 27, 1999 | 3.0 | | | | | | | | | | | |
| 87 | HDPIU94 | 203960 | pCMVSport | 97 | 2196 | 21 | 2196 | 208 | 208 | 514 | 1 | 21 | 22 | 23 |
| | | Apr. 26, 1999 | 3.0 | | | | | | | | | | | |
| 88 | HDPOL37 | 203960 | pCMVSport | 98 | 1489 | 1 | 1489 | 189 | 189 | 515 | 1 | 32 | 33 | 62 |
| | | Apr. 26, 1999 | 3.0 | | | | | | | | | | | |
| 89 | HDP0076 | 203960 | pCMVSport | 99 | 645 | 1 | 645 | | 109 | 516 | 1 | 15 | 16 | 16 |
| | | Apr. 26, 1999 | 3.0 | | | | | | | | | | | |
| 90 | HDPPD93 | 203960 | pCMVSport | 100 | 701 | 1 | 701 | 28 | 28 | 517 | 1 | | | 12 |
| | | Apr. 26, 1999 | 3.0 | | | | | | | | | | | |
| 91 | HDPPW82 | 203959 | pCMVSport | 101 | 552 | 1 | 552 | 395 | 395 | 518 | 1 | | | 29 |
| | | Apr. 26, 1999 | 3.0 | | | | | | | | | | | |
| 92 | HDPXN20 | 203960 | pCMVSport | 102 | 1756 | 1 | 1756 | 61 | 61 | 519 | 1 | 20 | 21 | 41 |
| | | Apr. 26, 1999 | 3.0 | | | | | | | | | | | |
| 93 | HDTAU35 | 203960 | pCMVSport | 103 | 377 | 1 | 377 | 260 | 260 | 520 | 1 | 12 | 13 | 17 |
| | | Apr. 26, 1999 | 2.0 | | | | | | | | | | | |
| 94 | HDTAV54 | 203960 | pCMVSport | 104 | 660 | 1 | 660 | 191 | 191 | 521 | 1 | 22 | 23 | 33 |
| | | Apr. 26, 1999 | 2.0 | | | | | | | | | | | |
| 95 | HDTFX18 | 203960 | pCMVSport | 105 | 678 | 1 | 678 | 164 | 164 | 522 | 1 | 16 | 17 | 20 |
| | | Apr. 26, 1999 | 2.0 | | | | | | | | | | | |
| 96 | HDTGW48 | 203960 | pCMVSport | 106 | 2261 | 1 | 2261 | | 375 | 523 | 1 | 17 | 18 | 29 |
| | | Apr. 26, 1999 | 2.0 | | | | | | | | | | | |
| 97 | HE2CH58 | 203960 | Uni-ZAP XR | 107 | 809 | 1 | 809 | 321 | 321 | 524 | 1 | 8 | 9 | 52 |
| | | Apr. 26, 1999 | | | | | | | | | | | | |
| 98 | HE2HC60 | 203960 | Uni-ZAP XR | 108 | 1569 | 236 | 1569 | 273 | 273 | 525 | 1 | 16 | 17 | 39 |
| | | Apr. 26, 1999 | | | | | | | | | | | | |
| 99 | HE2PO93 | 203960 | Uni-ZAP XR | 109 | 1323 | 638 | 1323 | 770 | 770 | 526 | 1 | 27 | 28 | 42 |
| | | Apr. 26, 1999 | | | | | | | | | | | | |
| 100 | HE6AU52 | 203960 | Uni-ZAP XR | 110 | 845 | 1 | 845 | 41 | 41 | 527 | 1 | 18 | 19 | 41 |
| | | Apr. 26, 1999 | | | | | | | | | | | | |
| 101 | HE6CS65 | 203960 | Uni-ZAP XR | 111 | 1526 | 1 | 1526 | | 295 | 528 | 1 | 10 | 11 | 62 |
| | | Apr. 26, 1999 | | | | | | | | | | | | |
| 102 | HE6EY13 | 203979 | Uni-ZAP XR | 112 | 867 | 1 | 867 | 171 | 171 | 529 | 1 | 14 | 15 | 46 |
| | | Apr. 29, 1999 | | | | | | | | | | | | |
| 103 | HE6FV29 | 203960 | Uni-ZAP XR | 113 | 1526 | 1 | 1526 | 210 | 210 | 530 | 1 | 18 | 19 | 33 |
| | | Apr. 26, 1999 | | | | | | | | | | | | |
| 104 | HE8BQ49 | 203960 | Uui-ZAP XR | 114 | 1875 | 12 | 1875 | 133 | 133 | 531 | 1 | | | 11 |
| | | Apr. 26, 1999 | | | | | | | | | | | | |
| 105 | HE8SG96 | PTA-181 | Uni-ZAP XR | 115 | 2036 | 1 | 2036 | 118 | 118 | 532 | 1 | 17 | 18 | 24 |
| | | Jun. 07, 1999 | | | | | | | | | | | | |
| 106 | HE8TY46 | PTA- | Uni-ZAP XR | 116 | 2204 | 1400 | 2204 | 1413 | 1413 | 533 | 1 | 18 | 19 | 187 |
| | | 1838 | | | | | | | | | | | | |
| | | May 09, 2000 | | | | | | | | | | | | |
| 107 | HE9GG20 | 203960 | Uni-ZAP XR | 117 | 676 | 1 | 676 | 319 | 319 | 534 | 1 | | | 9 |
| | | Apr. 26, 1999 | | | | | | | | | | | | |
| 108 | HEBCI18 | 203960 | Uni-ZAP XR | 118 | 1121 | 713 | 1050 | 855 | 855 | 535 | 1 | 43 | 44 | 69 |
| | | Apr. 26, 1999 | | | | | | | | | | | | |
| 109 | HEBDF77 | 203960 | Uni-ZAP XR | 119 | 1820 | 1 | 1820 | 681 | 681 | 536 | 1 | 29 | 30 | 36 |
| | | Apr. 26, 1999 | | | | | | | | | | | | |
| 110 | HEBDQ91 | 203960 | Uni-ZAP XR | 120 | 1573 | 1007 | 1573 | | 1211 | 537 | 1 | 29 | 30 | 41 |
| | | Apr. 26, 1999 | | | | | | | | | | | | |
| 111 | HEBFR46 | 203979 | Uni-ZAP XR | 121 | 1304 | 1 | 1304 | 200 | 200 | 538 | 1 | 26 | 27 | 29 |
| | | Apr. 29, 1999 | | | | | | | | | | | | |
| 112 | HEBGE07 | 203960 | UNI-ZAP XR | 122 | 1867 | 1 | 1867 | 106 | 106 | 539 | 1 | 25 | 26 | 42 |
| | | Apr. 26, 1999 | | | | | | | | | | | | |
| 113 | HEBGE23 | 203960 | Uni-ZAP XR | 123 | 419 | 1 | 419 | 153 | 153 | 540 | 1 | 31 | 32 | 81 |
| | | Apr. 26, 1999 | | | | | | | | | | | | |
| 114 | HELAT35 | 203960 | Uni-ZAP XR | 124 | 2168 | 1 | 2168 | 215 | 215 | 541 | 1 | | | 20 |
| | | Apr. 26, 1999 | | | | | | | | | | | | |
| 115 | HELBU54 | 203960 | Uni-ZAP XR | 125 | 1260 | 1 | 1260 | 82 | 82 | 542 | 1 | | | 17 |
| | | Apr. 26, 1999 | | | | | | | | | | | | |
| 116 | HEMEY47 | 203979 | Uni-ZAP XR | 126 | 1614 | 204 | 1614 | 440 | 440 | 543 | 1 | | | 10 |
| | | Apr. 29, 1999 | | | | | | | | | | | | |
| 117 | HEOMC46 | PTA-181 | pSport1 | 127 | 939 | 1 | 939 | | 154 | 544 | 1 | 40 | 41 | 51 |
| | | Jun. 07, 1999 | | | | | | | | | | | | |
| 118 | HEPBA14 | PTA-181 | Uni-ZAP XR | 128 | 746 | 1 | 746 | | 664 | 545 | 1 | 13 | 14 | 15 |
| | | Jun. 07, 1999 | | | | | | | | | | | | |
| 119 | HEQAH80 | 203960 | pCMVSport | 129 | 1647 | 1 | 1647 | 150 | 150 | 546 | 1 | 26 | 27 | 32 |
| | | Apr. 26, 1999 | 3.0 | | | | | | | | | | | |
| 120 | HEQBF89 | 203960 | pCMVSport | 130 | 859 | 1 | 859 | 306 | 306 | 547 | 1 | 18 | 19 | 50 |
| | | Apr. 26, 1999 | 3.0 | | | | | | | | | | | |
| 121 | HETCI16 | 203979 | Uni-ZAP XR | 131 | 2285 | 73 | 2285 | 237 | 237 | 548 | 1 | 27 | 28 | 40 |
| | | Apr. 29, 1999 | | | | | | | | | | | | |
| 122 | HETDW58 | 203979 | Uni-ZAP XR | 132 | 1533 | 328 | 1533 | 541 | 541 | 549 | 1 | 16 | 17 | 22 |
| | | Apr. 29, 1999 | | | | | | | | | | | | |
| 123 | HETEY67 | 203960 | Uni-ZAP XR | 133 | 1778 | 1 | 1778 | | 292 | 550 | 1 | 13 | 14 | 66 |
| | | Apr. 26, 1999 | | | | | | | | | | | | |
| 124 | HFCDW95 | 203979 | Uni-ZAP XR | 134 | 871 | 1 | 871 | | 151 | 551 | 1 | | | 2 |
| | | Apr. 29, 1999 | | | | | | | | | | | | |
| 125 | HFCFD04 | 203960 | Uni-ZAP XR | 135 | 1437 | 1 | 1437 | 170 | 170 | 552 | 1 | | | 15 |
| | | Apr. 26, 1999 | | | | | | | | | | | | |
| 126 | HFCFE20 | 203960 | Uni-ZAP XR | 136 | 1205 | 1 | 1205 | 216 | 216 | 553 | 1 | | | 18 |
| | | Apr. 26, 1999 | | | | | | | | | | | | |
| 127 | HFEAY59 | 203960 | Uni-ZAP XR | 137 | 1153 | 1 | 1153 | 154 | 154 | 554 | 1 | 24 | 25 | 40 |
| | | Apr. 26, 1999 | | | | | | | | | | | | |
| 128 | HFEBO17 | PTA-181 | Uni-ZAP XR | 138 | 990 | 1 | 990 | 136 | 136 | 555 | 1 | 17 | 18 | 27 |
| | | Jun. 07, 1999 | | | | | | | | | | | | |
| 129 | HFIJA29 | 203960 | pSport1 | 139 | 1275 | 110 | 1275 | 175 | 175 | 556 | 1 | 27 | 28 | 82 |
| | | Apr. 26, 1999 | | | | | | | | | | | | |
| 130 | HFIJA68 | 203979 | pSport1 | 140 | 1157 | 1 | 1157 | 283 | 283 | 557 | 1 | 22 | 23 | 43 |
| | | Apr. 29, 1999 | | | | | | | | | | | | |
| 131 | HEKES05 | 203960 | Uni-ZAP XR | 141 | 1885 | 1 | 1885 | 243 | 243 | 558 | 1 | 17 | 18 | 42 |
| | | Apr. 26, 1999 | | | | | | | | | | | | |
| 132 | HFKEU12 | 203960 | Uni-ZAP XR | 142 | 1031 | 1 | 1031 | 6 | 6 | 559 | 1 | 16 | 17 | 55 |
| | | Apr. 26, 1999 | | | | | | | | | | | | |
| 133 | HFKFX64 | 203960 | Uni-ZAP XR | 143 | 779 | 1 | 779 | 127 | 127 | 560 | 1 | | | 14 |
| | | Apr. 26, 1999 | | | | | | | | | | | | |
| 134 | HFPDR62 | 203960 | Uni-ZAP XR | 144 | 2644 | 1 | 2644 | 414 | 414 | 561 | 1 | 28 | 29 | 35 |
| | | Apr. 26, 1999 | | | | | | | | | | | | |
| 135 | HFPDS07 | 203960 | Uni-ZAP XR | 145 | 3115 | 2302 | 3114 | 2546 | 2546 | 562 | 1 | 23 | 24 | 25 |
| | | Apr. 26, 1999 | | | | | | | | | | | | |
| 136 | HFTAS49 | 203979 | Uni-ZAP XR | 146 | 518 | 1 | 518 | 249 | 249 | 563 | 1 | 19 | 20 | 23 |
| | | Apr. 29, 1999 | | | | | | | | | | | | |
| 137 | HFTBM38 | 203960 | Uni-ZAP XR | 147 | 1941 | 322 | 1941 | 577 | 577 | 564 | 1 | 18 | 19 | 30 |
| | | Apr. 26, 1999 | | | | | | | | | | | | |
| 138 | HFTDH56 | PTA-181 | Uni-ZAP XR | 148 | 820 | 1 | 820 | 67 | 67 | 565 | 1 | | | 10 |
| | | Jun. 07, 1999 | | | | | | | | | | | | |
| 139 | HFVGK35 | 203960 | pBluescript | 149 | 1236 | 1 | 1236 | | 14 | 566 | 1 | | | 5 |
| | | Apr. 26, 1999 | | | | | | | | | | | | |
| 140 | HFXAV37 | 203960 | Lambda ZAP | 150 | 1520 | 40 | 1520 | | 163 | 567 | 1 | 13 | 14 | 36 |
| | | Apr. 26, 1999 | II | | | | | | | | | | | |
| 141 | HFXBT66 | 203960 | Lambda ZAP | 151 | 1001 | 1 | 1001 | 172 | 172 | 568 | 1 | 15 | 16 | 26 |
| | | Apr. 26, 1999 | II | | | | | | | | | | | |
| 142 | HGBER72 | 203960 | Uni-ZAP XR | 152 | 1316 | 1 | 1316 | 43 | 43 | 569 | 1 | 16 | 17 | 19 |
| | | Apr. 26, 1999 | | | | | | | | | | | | |
| 143 | HGBEY14 | 203960 | Uni-ZAP XR | 153 | 1738 | 1 | 1738 | 233 | 233 | 570 | 1 | 18 | 19 | 39 |
| | | Apr. 26, 1999 | | | | | | | | | | | | |
| 144 | HHEGS55 | PTA-181 | pCMVSport | 154 | 594 | 2 | 594 | 159 | 159 | 571 | 1 | 16 | 17 | 36 |
| | | Jun. 07, 1999 | 3.0 | | | | | | | | | | | |
| 145 | HHEOW19 | PTA-793 | pCMVSport | 155 | 1589 | 1 | 1589 | 183 | 183 | 572 | 1 | 18 | 19 | 64 |
| | | Sep. 27, 1999 | 3.0 | | | | | | | | | | | |
| 146 | HHFEB79 | PTA-181 | Uni-ZAP XR | 156 | 3168 | 1 | 3168 | 120 | 120 | 573 | 1 | 18 | 19 | 756 |
| | | Jun. 07, 1999 | | | | | | | | | | | | |
| 146 | HHFEB79 | PTA-181 | Uni-ZAP XR | 403 | 2443 | 1 | 2443 | 715 | 715 | 820 | 1 | 18 | 19 | 571 |
| | | Jun. 07, 1999 | | | | | | | | | | | | |
| 147 | HHFFF87 | 203960 | Uni-ZAP XR | 157 | 1547 | 1 | 1547 | 229 | 229 | 574 | 1 | | | 41 |
| | | Apr. 26, 1999 | | | | | | | | | | | | |
| 148 | HHFFL34 | 203960 | Uni-ZAP XR | 158 | 2632 | 1 | 2632 | 42 | 42 | 575 | 1 | 21 | 22 | 223 |
| | | Apr. 26, 1999 | | | | | | | | | | | | |
| 149 | HHFFS40 | 203960 | Uni-ZAP XR | 159 | 1816 | 1 | 1816 | 37 | 37 | 576 | 1 | 18 | 19 | 47 |
| | | Apr. 26, 1999 | | | | | | | | | | | | |
| 150 | HHGCS78 | 203960 | Lambda ZAP | 160 | 575 | 46 | 575 | 290 | 290 | 577 | 1 | 17 | 18 | 24 |
| | | Apr. 26, 1999 | II | | | | | | | | | | | |
| 151 | HHGDT26 | 203960 | Lambda ZAP | 161 | 1584 | 1 | 1584 | 181 | 181 | 578 | 1 | | | 8 |
| | | Apr. 26, 1999 | II | | | | | | | | | | | |
| 152 | HHPFP26 | 203960 | Uni-ZAP XR | 162 | 2352 | 1 | 2352 | | 24 | 579 | 1 | 27 | 28 | 80 |
| | | Apr. 26, 1999 | | | | | | | | | | | | |
| 153 | HHPFU28 | 203960 | Uni-ZAP XR | 163 | 1838 | 1 | 1838 | | 156 | 580 | 1 | 18 | 19 | 27 |
| | | Apr. 26, 1999 | | | | | | | | | | | | |
| 154 | HHPSA85 | 203960 | pBluescript | 164 | 1147 | 1 | 1147 | 157 | 157 | 581 | 1 | 28 | 29 | 38 |
| | | Apr. 26, 1999 | | | | | | | | | | | | |
| 155 | HHSBI65 | 203917 | Uni-ZAP XR | 165 | 1444 | 1 | 1431 | 62 | 62 | 582 | 1 | 17 | 18 | 55 |
| | | Apr. 08, 1999 | | | | | | | | | | | | |
| 156 | HHSDI53 | PTA-181 | Uni-ZAP XR | 166 | 1277 | 1 | 1277 | 221 | 221 | 583 | 1 | 14 | 15 | 24 |
| | | Jun. 07, 1999 | | | | | | | | | | | | |
| 157 | HHSFC09 | 203960 | Uni-ZAP XR | 167 | 531 | 1 | 531 | | 380 | 584 | 1 | 10 | 11 | 32 |
| | | Apr. 26, 1999 | | | | | | | | | | | | |
| 158 | HJMAA03 | 203957 | pCMVSport | 168 | 665 | 1 | 665 | | 527 | 585 | 1 | | | 9 |
| | | Apr. 26, 1999 | 3.0 | | | | | | | | | | | |
| 159 | HJMAV41 | PTA-181 | pCMVSport | 169 | 1017 | 1 | 1017 | 207 | 207 | 586 | 1 | | | 27 |
| | | Jun. 07, 1999 | 3.0 | | | | | | | | | | | |
| 160 | HJMAY90 | 203959 | pCMVSport | 170 | 2886 | 2233 | 2886 | | 2492 | 587 | 1 | 22 | 23 | 34 |
| | | Apr. 26, 1999 | 3.0 | | | | | | | | | | | |
| 161 | HJPBE39 | 203957 | Uni-ZAP XR | 171 | 1298 | 69 | 1298 | | 170 | 588 | 1 | | | 18 |
| | | Apr. 26, 1999 | | | | | | | | | | | | |
| 162 | HJPBK28 | 203957 | Uni-ZAP XR | 172 | 989 | 1 | 989 | | 256 | 589 | 1 | 21 | 22 | 43 |
| | | Apr. 26, 1999 | | | | | | | | | | | | |
| 163 | HJPCH08 | 203959 | Uni-ZAP XR | 173 | 879 | 1 | 879 | | 374 | 590 | 1 | 10 | 11 | 117 |
| | | Apr. 26, 1999 | | | | | | | | | | | | |
| 164 | HKABU43 | 203959 | pCMVSport | 174 | 1919 | 581 | 1919 | 755 | 755 | 591 | 1 | 20 | 21 | 281 |
| | | Apr. 26, 1999 | 2.0 | | | | | | | | | | | |
| 165 | HKACI79 | PTA-181 | pCMVSport | 175 | 1181 | 1 | 1181 | 207 | 207 | 592 | 1 | 14 | 15 | 50 |
| | | Jun. 07, 1999 | 2.0 | | | | | | | | | | | |
| 166 | HXAFF50 | 203957 | pCMVSport | 176 | 1801 | 1 | 1801 | 343 | 343 | 593 | 1 | 13 | 14 | 50 |
| | | Apr. 26, 1999 | 2.0 | | | | | | | | | | | |
| 167 | HKGBF25 | 203957 | pSport1 | 177 | 2007 | 1 | 2007 | 261 | 261 | 594 | 1 | 18 | 19 | 36 |
| | | Apr. 26, 1999 | | | | | | | | | | | | |
| 168 | HKMLM95 | 203957 | pBluescript | 178 | 1098 | 1 | 1098 | | 390 | 595 | 1 | | | 4 |
| | | Apr. 26, 1999 | | | | | | | | | | | | |
| 169 | HLDBG17 | PTA-181 | pCMVSport | 179 | 652 | 1 | 652 | 184 | 184 | 596 | 1 | 23 | 24 | 41 |
| | | Jun. 07, 1999 | 3.0 | | | | | | | | | | | |
| 170 | HLDQU79 | 203959 | pCMVSport | 180 | 1488 | 1 | 1488 | 99 | 99 | 597 | 1 | 23 | 24 | 348 |
| | | Apr. 26, 1999 | 3.0 | | | | | | | | | | | |
| 170 | HLDQU79 | 203959 | pCMVSport | 404 | 3179 | 163 | 1474 | 75 | 75 | 821 | 1 | 29 | 30 | 348 |
| | | Apr. 26, 1999 | 3.0 | | | | | | | | | | | |
| 171 | HLDRT09 | 203957 | pCMVSport | 181 | 721 | 254 | 665 | 522 | 522 | 598 | 1 | 20 | 21 | 66 |
| | | Apr. 26, 1999 | 3.0 | | | | | | | | | | | |
| 172 | HLHBS54 | 203957 | Uni-ZAP XR | 182 | 4038 | 2309 | 4023 | 73 | 73 | 599 | 1 | 1 | 2 | 343 |
| | | Apr. 26, 1999 | | | | | | | | | | | | |
| 173 | HLHCS23 | 203957 | Uni-ZAP XR | 183 | 1427 | 1 | 1427 | 25 | 25 | 600 | 1 | 24 | 25 | 34 |
| | | Apr. 26, 1999 | | | | | | | | | | | | |
| 174 | HLIBO72 | PTA-792 | pCMVSport 1 | 184 | 1768 | 1 | 1768 | 167 | 167 | 601 | 1 | 46 | 47 | 127 |
| | | Sep. 27, 1999 | | | | | | | | | | | | |
| 175 | HLICE88 | 203957 | pCMVSport 1 | 185 | 840 | 401 | 824 | | 708 | 602 | 1 | | | 2 |
| | | Apr. 26, 1999 | | | | | | | | | | | | |
| 176 | HLICO10 | 203957 | pCMVSport 1 | 186 | 903 | 1 | 903 | 441 | 441 | 603 | 1 | 23 | 24 | 72 |
| | | Apr. 26, 1999 | | | | | | | | | | | | |
| 177 | HLJBS28 | 203957 | pCMVSport 1 | 187 | 976 | 1 | 976 | 359 | 359 | 604 | 1 | | | 17 |
| | | Apr. 26, 1999 | | | | | | | | | | | | |
| 178 | HLMJB64 | 203957 | Lambda ZAP | 188 | 804 | 1 | 804 | 12 | 12 | 605 | 1 | 29 | 30 | 49 |
| | | Apr. 26, 1999 | II | | | | | | | | | | | |
| 179 | HLMMX62 | 203957 | Lambda ZAP | 189 | 268 | 1 | 268 | 185 | 185 | 606 | 1 | 17 | 18 | 28 |
| | | Apr. 26, 1999 | II | | | | | | | | | | | |
| 180 | HLQAS12 | PTA-793 | Lambda ZAP | 190 | 2450 | 1 | 2450 | 305 | 305 | 607 | 1 | 11 | 12 | 12 |
| | | Sep. 27, 1999 | II | | | | | | | | | | | |
| 181 | HLQCX36 | 203957 | Lambda ZAP | 191 | 1243 | 1 | 1243 | 89 | 89 | 608 | 1 | 16 | 17 | 52 |
| | | Apr. 26, 1999 | II | | | | | | | | | | | |
| 182 | HLWAF06 | 203957 | pCMVSport | 192 | 2564 | 1 | 2564 | 192 | 192 | 609 | 1 | 18 | 19 | 30 |
| | | Apr. 26, 1999 | 3.0 | | | | | | | | | | | |
| 183 | HLWAV47 | PTA-795 | pCMvSport | 193 | 2062 | 1 | 2062 | 200 | 200 | 610 | 1 | 29 | 30 | 32 |
| | | Sep. 27, 1999 | 3.0 | | | | | | | | | | | |
| 184 | HLWBB73 | 203957 | pCMVSport | 194 | 1716 | 1 | 1716 | 122 | 122 | 611 | 1 | 32 | 33 | 50 |
| | | Apr. 26, 1999 | 3.0 | | | | | | | | | | | |
| 185 | HLWCN37 | 203957 | pCMVSport | 195 | 788 | 1 | 788 | 81 | 81 | 612 | 1 | 40 | 41 | 43 |
| | | Apr. 26, 1999 | 3.0 | | | | | | | | | | | |
| 186 | HLWDB73 | 203957 | pCMVSport | 196 | 1611 | 1 | 1611 | 95 | 95 | 613 | 1 | 27 | 28 | 35 |
| | | Apr. 26, 1999 | 3.0 | | | | | | | | | | | |
| 187 | HLYAR30 | 203957 | pSport1 | 197 | 854 | 1 | 854 | 562 | 562 | 614 | 1 | 1 | 2 | 97 |
| | | Apr. 26, 1999 | | | | | | | | | | | | |
| 188 | HLYDO73 | 203957 | pSport1 | 198 | 858 | 1 | 858 | 233 | 233 | 615 | 1 | | | 12 |
| | | Apr. 26, 1999 | | | | | | | | | | | | |
| 189 | HLYEU59 | 203957 | pSport1 | 199 | 1146 | 1 | 1146 | 258 | 258 | 616 | 1 | 24 | 25 | 43 |
| | | Apr. 26, 1999 | | | | | | | | | | | | |
| 190 | HLYGB19 | 203959 | pSport1 | 200 | 2967 | 1527 | 2966 | 1863 | 1863 | 617 | 1 | | | 14 |
| | | Apr. 26, 1999 | | | | | | | | | | | | |
| 191 | HLYGE16 | 203957 | pSport1 | 201 | 752 | 1 | 752 | 406 | 406 | 618 | 1 | 17 | 18 | 73 |
| | | Apr. 26, 1999 | | | | | | | | | | | | |
| 192 | HMCFH60 | 203957 | Uni-ZAP XR | 202 | 443 | 1 | 443 | 211 | 211 | 619 | 1 | 17 | 18 | 48 |
| | | Apr. 26, 1999 | | | | | | | | | | | | |
| 193 | HMDAB29 | 203957 | Uni-ZAP XR | 203 | 1190 | 1 | 1190 | 97 | 97 | 620 | 1 | 17 | 18 | 26 |
| | | Apr. 26, 1999 | | | | | | | | | | | | |
| 194 | HMDAD44 | 203957 | Uni-ZAP XR | 204 | 1204 | 1 | 1204 | 135 | 135 | 621 | 1 | | | 8 |
| | | Apr. 26, 1999 | | | | | | | | | | | | |
| 195 | HMEDE24 | 203957 | Lambda ZAP | 205 | 2836 | 884 | 2806 | 900 | 900 | 622 | 1 | 16 | 17 | 33 |
| | | Apr. 26, 1999 | II | | | | | | | | | | | |
| 196 | HMIAK10 | 203957 | Uni-ZAP XR | 206 | 1064 | 1 | 1064 | 195 | 195 | 623 | 1 | 22 | 23 | 31 |
| | | Apr. 26, 1999 | | | | | | | | | | | | |
| 197 | HMICI80 | 203957 | Uni-ZAP XR | 207 | 1772 | 1 | 1772 | | 1149 | 624 | 1 | 10 | 11 | 32 |
| | | Apr. 26, 1999 | | | | | | | | | | | | |
| 198 | HMICP65 | 203979 | Uni-ZAP XR | 208 | 2048 | 1 | 2048 | 249 | 249 | 625 | 1 | 16 | 17 | 30 |
| | | Apr. 29, 1999 | | | | | | | | | | | | |
| 199 | HMJAK70 | 203957 | pSport1 | 209 | 799 | 1 | 799 | 273 | 273 | 626 | 1 | | | 10 |
| | | Apr. 26, 1999 | | | | | | | | | | | | |
| 200 | HMQAI38 | 203957 | Uni-ZAP XR | 210 | 1777 | 1 | 1777 | 24 | 24 | 627 | 1 | | | 20 |
| | | Apr. 26, 1999 | | | | | | | | | | | | |
| 201 | HMSBE04 | 203957 | Uni-ZAP XR | 211 | 1396 | 1 | 1396 | 295 | 295 | 628 | 1 | | | 27 |
| | | Apr. 26, 1999 | | | | | | | | | | | | |
| 202 | HMSCL38 | 203957 | Uni-ZAP XR | 212 | 2945 | 1 | 2945 | 120 | 120 | 629 | 1 | 25 | 26 | 35 |
| | | Apr. 26, 1999 | | | | | | | | | | | | |
| 203 | HMSHC86 | 203957 | Uni-ZAP XR | 213 | 1724 | 1 | 1724 | 37 | 37 | 630 | 1 | 20 | 21 | 93 |
| | | Apr. 26, 1999 | | | | | | | | | | | | |
| 204 | HMSHU20 | 203979 | Uni-ZAP XR | 214 | 2249 | 1 | 2249 | 50 | 50 | 631 | 1 | 24 | 25 | 113 |
| | | Apr. 29, 1999 | | | | | | | | | | | | |
| 205 | HMSHY25 | PTA-793 | Uni-ZAP XR | 215 | 2205 | 1 | 2205 | | 656 | 632 | 1 | 11 | 12 | 35 |
| | | Sep. 27, 1999 | | | | | | | | | | | | |
| 206 | HMTAB77 | 203979 | pCMVSport | 216 | 3839 | 1 | 3839 | 769 | 769 | 633 | 1 | 24 | 25 | 48 |
| | | Apr. 29, 1999 | 3.0 | | | | | | | | | | | |
| 207 | HMUAE26 | 203957 | pCMVSport | 217 | 2000 | 660 | 2000 | 710 | 710 | 634 | 1 | 20 | 21 | 30 |
| | | Apr. 26, 1999 | 3.0 | | | | | | | | | | | |
| 208 | HMVDU15 | 203979 | pSport1 | 218 | 1351 | 1 | 1351 | 274 | 274 | 635 | 1 | 21 | 22 | 25 |
| | | Apr. 29, 1999 | | | | | | | | | | | | |
| 209 | HMWCG28 | 203979 | Uni-ZAP XR | 219 | 893 | 1 | 893 | 78 | 78 | 636 | 1 | 30 | 31 | 40 |
| | | Apr. 29, 1999 | | | | | | | | | | | | |
| 210 | HNECL22 | 203957 | Uni-ZAP XR | 220 | 2710 | 225 | 2710 | 472 | 472 | 637 | 1 | 23 | 24 | 34 |
| | | Apr. 26, 1999 | | | | | | | | | | | | |
| 211 | HNBCW49 | 203957 | Uni-ZAP XR | 221 | 489 | 1 | 463 | 316 | 316 | 638 | 1 | 20 | 21 | 58 |
| | | Apr. 26, 1999 | | | | | | | | | | | | |
| 212 | HNEDH88 | 203957 | Uni-ZAP XR | 222 | 2073 | 1 | 2073 | 70 | 70 | 639 | 1 | 19 | 20 | 33 |
| | | Apr. 26, 1999 | | | | | | | | | | | | |
| 213 | HNFAC50 | 203957 | Uni-ZAP XR | 223 | 1442 | 428 | 1442 | 676 | 676 | 640 | 1 | 22 | 23 | 32 |
| | | Apr. 26, 1999 | | | | | | | | | | | | |
| 214 | HNFCY57 | PTA-791 | Uni-ZAP XR | 224 | 2847 | 1 | 2847 | 317 | 317 | 641 | 1 | 10 | 11 | 629 |
| | | Sep. 27, 1999 | | | | | | | | | | | | |
| 215 | HNGAM58 | 203957 | Uni-ZAP XR | 225 | 1156 | 1 | 1156 | | 68 | 642 | 1 | 27 | 28 | 114 |
| | | Apr. 26, 1999 | | | | | | | | | | | | |
| 216 | HNGBH53 | 203957 | Uni-ZAP XR | 226 | 636 | 1 | 636 | | 47 | 643 | 1 | 17 | 18 | 46 |
| | | Apr. 26, 1999 | | | | | | | | | | | | |
| 217 | HNGDX18 | PTA-181 | Uni-ZAP XR | 227 | 1425 | 1 | 1425 | 237 | 237 | 644 | 1 | 30 | 31 | 243 |
| | | Jun. 07, 1999 | | | | | | | | | | | | |
| 217 | HNGDX18 | PTA-181 | Uni-ZAP XR | 405 | 1411 | 1 | 1411 | 231 | 231 | 822 | 1 | 18 | 19 | 132 |
| | | Jun. 07, 1999 | | | | | | | | | | | | |
| 218 | HNGDY34 | 203957 | Uni-ZAP XR | 228 | 1002 | 1 | 1002 | | 73 | 645 | 1 | | | 17 |
| | | Apr. 26, 1999 | | | | | | | | | | | | |
| 219 | HNGEQ75 | 203957 | Uni-ZAP XR | 229 | 1029 | 1 | 1029 | | 30 | 646 | 1 | 21 | 22 | 22 |
| | | Apr. 26, 1999 | | | | | | | | | | | | |
| 220 | HNGFR54 | 203957 | UnI-ZAP XR | 230 | 495 | 1 | 495 | | 73 | 647 | 1 | 36 | 37 | 52 |
| | | Apr. 26, 1999 | | | | | | | | | | | | |
| 221 | HNGGA68 | 203957 | Uni-ZAP XR | 231 | 585 | 1 | 585 | 184 | 184 | 648 | 1 | | | 32 |
| | | Apr. 26, 1999 | | | | | | | | | | | | |
| 222 | HNGGP65 | 203957 | Uni-ZAP XR | 232 | 541 | 1 | 541 | 181 | 181 | 649 | 1 | 15 | 16 | 68 |
| | | Apr. 26, 1999 | | | | | | | | | | | | |
| 223 | HNGHK37 | 203957 | Uni-ZAP XR | 233 | 1543 | 1 | 1543 | 234 | 234 | 650 | 1 | | | 12 |
| | | Apr. 26, 1999 | | | | | | | | | | | | |
| 224 | HNGHZ69 | PTA-795 | Uni-ZAP XR | 234 | 1195 | 1 | 1195 | | 25 | 651 | 1 | | | 9 |
| | | Sep. 27, 1999 | | | | | | | | | | | | |
| 225 | HNGIV64 | 203957 | Uni-ZAP XR | 235 | 1047 | 1 | 1047 | | 221 | 652 | 1 | | | 8 |
| | | Apr. 26, 1999 | | | | | | | | | | | | |
| 226 | HNGJB41 | PTA-181 | Uui-ZAP XR | 236 | 1246 | 1 | 1246 | 252 | 252 | 653 | 1 | 46 | 47 | 73 |
| | | Jun. 07, 1999 | | | | | | | | | | | | |
| 227 | HNGKT41 | 203959 | Uni-ZAP XR | 237 | 1048 | 1 | 1048 | 415 | 415 | 654 | 1 | 17 | 18 | 45 |
| | | Apr. 26, 1999 | | | | | | | | | | | | |
| 228 | HNGNX44 | 203959 | Uni-ZAP XR | 238 | 1178 | 302 | 1178 | 611 | 611 | 655 | 1 | 18 | 19 | 74 |
| | | Apr. 26, 1999 | | | | | | | | | | | | |
| 229 | HNGNO53 | 203959 | Uni-ZAP XR | 239 | 825 | 1 | 825 | 467 | 467 | 656 | 1 | 15 | 16 | 34 |
| | | Apr. 26, 1999 | | | | | | | | | | | | |
| 230 | HNGPJ25 | 203959 | Uni-ZAP XR | 240 | 853 | 129 | 853 | 544 | 544 | 657 | 1 | 20 | 21 | 25 |
| | | Apr. 26, 1999 | | | | | | | | | | | | |
| 231 | HNHEN82 | 203918 | Uni-ZAP XR | 241 | 573 | 1 | 573 | | 78 | 658 | 1 | 13 | 14 | 17 |
| | | Apr. 08, 1999 | | | | | | | | | | | | |
| 232 | HNHFE71 | 203959 | Uni-ZAP XR | 242 | 903 | 1 | 903 | 598 | 598 | 659 | 1 | | | 21 |
| | | Apr. 26, 1999 | | | | | | | | | | | | |
| 233 | HNHGK22 | 203918 | Uni-ZAP XR | 243 | 909 | 1 | 909 | 239 | 239 | 660 | 1 | 26 | 27 | 64 |
| | | Apr. 08, 1999 | | | | | | | | | | | | |
| 234 | HNBHB10 | 203959 | Uni-ZAP XR | 244 | 901 | 1 | 901 | 215 | 215 | 661 | 1 | 28 | 29 | 59 |
| | | Apr. 26, 1999 | | | | | | | | | | | | |
| 235 | HNHKS19 | 203959 | Uni-ZAP XR | 245 | 790 | 1 | 790 | 192 | 192 | 662 | 1 | 26 | 27 | 41 |
| | | Apr. 26, 1999 | | | | | | | | | | | | |
| 236 | HNTMH79 | 203959 | pSport1 | 246 | 922 | 1 | 922 | 48 | 48 | 663 | 1 | 35 | 36 | 38 |
| | | Apr. 26, 1999 | | | | | | | | | | | | |
| 237 | HODAG07 | 203918 | Uni-ZAP XR | 247 | 900 | 1 | 900 | 43 | 43 | 664 | 1 | 35 | 36 | 43 |
| | | Apr. 08, 1999 | | | | | | | | | | | | |
| 238 | HODBB70 | 203918 | Uni-ZAP XR | 248 | 604 | 1 | 604 | | 173 | 665 | 1 | 7 | 8 | 27 |
| | | Apr. 08, 1999 | | | | | | | | | | | | |
| 239 | HODCZ32 | 203959 | Uni-ZAP XR | 249 | 927 | 1 | 927 | | 248 | 666 | 1 | | | 10 |
| | | Apr. 26, 1999 | | | | | | | | | | | | |
| 240 | HOFAA78 | 203959 | pSport1 | 250 | 1356 | 1 | 1356 | | 48 | 667 | 1 | 25 | 26 | 71 |
| | | Apr. 26, 1999 | | | | | | | | | | | | |
| 241 | HOFMO16 | 203918 | pCMVSport | 251 | 1142 | 1 | 1142 | 149 | 149 | 668 | 1 | 40 | 41 | 152 |
| | | Apr. 08, 1999 | 2.0 | | | | | | | | | | | |
| 242 | HOFNU55 | PTA-795 | pCMVSport | 252 | 1365 | 1 | 1349 | 230 | 230 | 669 | 1 | 28 | 29 | 51 |
| | | Sep. 27, 1999 | 2.0 | | | | | | | | | | | |
| 243 | HOGBF01 | 203918 | pcMvSport | 253 | 1478 | 1 | 1478 | 309 | 309 | 670 | 1 | 10 | 11 | 20 |
| | | Apr. 08, 1999 | 2.0 | | | | | | | | | | | |
| 244 | HOHBO66 | PTA-181 | pCMVSport | 254 | 1790 | 1 | 1790 | 338 | 338 | 671 | 1 | | | 21 |
| | | Jun. 07, 1999 | 2.0 | | | | | | | | | | | |
| 245 | HORBS82 | 203959 | Uni-ZAP XR | 255 | 1125 | 1 | 1125 | | 21 | 672 | 1 | 19 | 20 | 39 |
| | | Apr. 26, 1999 | | | | | | | | | | | | |
| 246 | HORBV76 | 203959 | Uni-ZAP XR | 256 | 1157 | 1 | 1157 | 183 | 183 | 673 | 1 | 25 | 26 | 198 |
| | | Apr. 26, 1999 | | | | | | | | | | | | |
| 247 | HOSEC25 | 203959 | Uni-ZAP XR | 257 | 1552 | 1 | 1552 | 17 | 17 | 674 | 1 | 18 | 19 | 24 |
| | | Apr. 26, 1999 | | | | | | | | | | | | |
| 248 | HQSEI81 | 203918 | Uni-ZAP XR | 258 | 897 | 1 | 897 | 203 | 203 | 675 | 1 | 22 | 23 | 83 |
| | | Apr. 08, 1999 | | | | | | | | | | | | |
| 249 | HOSEI94 | 203979 | Uni-ZAP XR | 259 | 1767 | 622 | 1750 | 848 | 848 | 676 | 1 | 21 | 22 | 28 |
| | | Apr. 29, 1999 | | | | | | | | | | | | |
| 250 | HOUCA21 | 203918 | Uni-ZAP XR | 260 | 1129 | 1 | 1129 | 200 | 200 | 677 | 1 | 27 | 28 | 33 |
| | | Apr. 08, 1999 | | | | | | | | | | | | |
| 251 | HOUDE92 | 203918 | Uni-ZAP XR | 261 | 1284 | 1 | 1282 | | 70 | 678 | 1 | 6 | 7 | 88 |
| | | Apr. 08, 1999 | | | | | | | | | | | | |
| 252 | HOUDR07 | 203959 | Uni-ZAP XR | 262 | 1911 | 1 | 1911 | 170 | 170 | 679 | 1 | 27 | 28 | 65 |
| | | Apr. 26, 1999 | | | | | | | | | | | | |
| 253 | HOUBD72 | PTA-181 | Uni-ZAP XR | 263 | 833 | 76 | 799 | | 144 | 680 | 1 | | | 11 |
| | | Jun. 07, 1999 | | | | | | | | | | | | |
| 254 | HOUFS04 | 203959 | Uni-ZAP XR | 264 | 2927 | 457 | 2882 | 520 | 520 | 681 | 1 | 42 | 43 | 72 |
| | | Apr. 26, 1999 | | | | | | | | | | | | |
| 255 | HOUHI25 | PTA-793 | Uni-ZAP XR | 265 | 1249 | 45 | 1102 | 188 | 188 | 682 | 1 | | | 20 |
| | | Sep. 27, 1999 | | | | | | | | | | | | |
| 256 | HOVBD85 | 203918 | pSport1 | 266 | 1129 | 1 | 1129 | 252 | 252 | 683 | 1 | 19 | 20 | 26 |
| | | Apr. 08, 1999 | | | | | | | | | | | | |
| 257 | HPCAB41 | 203918 | Uni-ZAP XR | 267 | 2587 | 1 | 2587 | 184 | 184 | 684 | 1 | | | 25 |
| | | Apr. 08, 1999 | | | | | | | | | | | | |
| 258 | HPCAL26 | 203917 | Uni-ZAP XR | 268 | 3097 | 803 | 3097 | 1021 | 1021 | 685 | 1 | 23 | 24 | 30 |
| | | Apr. 08, 1999 | | | | | | | | | | | | |
| 259 | HPFBA54 | 203959 | Uni-ZAP XR | 269 | 835 | 1 | 835 | 258 | 258 | 686 | 1 | 39 | 40 | 45 |
| | | Apr. 26, 1999 | | | | | | | | | | | | |
| 260 | HPFCI36 | PTA-181 | Uni-ZAP XR | 270 | 879 | 1 | 879 | 94 | 94 | 687 | 1 | 17 | 18 | 19 |
| | | Jun. 07, 1999 | | | | | | | | | | | | |
| 261 | HPIAA80 | 203959 | Uni-ZAP XR | 271 | 919 | 312 | 919 | | 314 | 688 | 1 | 13 | 14 | 37 |
| | | Apr. 26, 1999 | | | | | | | | | | | | |
| 262 | HPJBU43 | PTA-181 | Uni-ZAP XR | 272 | 575 | 1 | 575 | | 242 | 689 | 1 | | | 17 |
| | | Jun. 07, 1999 | | | | | | | | | | | | |
| 263 | HPMBX22 | 203959 | Uni-ZAP XR | 273 | 454 | 1 | 454 | | 211 | 690 | 1 | | | 19 |
| | | Apr. 26, 1999 | | | | | | | | | | | | |
| 264 | HPMCJ84 | 203918 | Uni-ZAP XR | 274 | 788 | 1 | 788 | 83 | 83 | 691 | 1 | 22 | 23 | 38 |
| | | Apr. 08, 1999 | | | | | | | | | | | | |
| 265 | HPMCV30 | 203918 | Uni-ZAP XR | 275 | 908 | 1 | 908 | 52 | 52 | 692 | 1 | 27 | 28 | 47 |
| | | Apr. 08, 1999 | | | | | | | | | | | | |
| 266 | HPMEH77 | 203918 | Uni-ZAP XR | 276 | 1891 | 1 | 1891 | | 251 | 693 | 1 | 11 | 12 | 35 |
| | | Apr. 08, 1999 | | | | | | | | | | | | |
| 267 | HPQCB83 | 203918 | Lambda ZAP | 277 | 2267 | 1 | 2267 | 85 | 85 | 694 | 1 | 30 | 31 | 34 |
| | | Apr. 08, 1999 | II | | | | | | | | | | | |
| 268 | HPRCA64 | 203959 | Uni-ZAP XR | 278 | 2805 | 1701 | 2757 | 1810 | 1810 | 695 | 1 | 22 | 23 | 39 |
| | | Apr. 26, 1999 | | | | | | | | | | | | |
| 269 | HPRCM72 | 203959 | Uni-ZAP XR | 279 | 2455 | 26 | 1572 | | 281 | 696 | 1 | 24 | 25 | 108 |
| | | Apr. 26, 1999 | | | | | | | | | | | | |
| 270 | HPTRE80 | PTA-792 | pBluescript | 280 | 1173 | 1 | 1173 | | 102 | 697 | 1 | 21 | 22 | 187 |
| | | Sep. 27, 1999 | | | | | | | | | | | | |
| 271 | HPTRI42 | 203959 | pBluescript | 281 | 1098 | 1 | 1098 | | 266 | 698 | 1 | 18 | 19 | 71 |
| | | Apr. 26, 1999 | | | | | | | | | | | | |
| 272 | HPTRM2 | 203959 | pBluescript | 282 | 1760 | 658 | 1680 | 885 | 885 | 699 | 1 | 16 | 17 | 80 |
| | | Apr. 26, 1999 | | | | | | | | | | | | |
| 273 | HPTRQ52 | 203959 | pBluescript | 283 | 658 | 1 | 658 | 224 | 224 | 700 | 1 | 13 | 14 | 33 |
| | | Apr. 26, 1999 | | | | | | | | | | | | |
| 274 | HPTVI96 | 203959 | pBluescript | 284 | 520 | 1 | 520 | 271 | 271 | 701 | 1 | | | 6 |
| | | Apr. 26, 1999 | | | | | | | | | | | | |
| 275 | HPWBA29 | 203918 | Uni-ZAP XR | 285 | 325 | 1 | 325 | 194 | 194 | 702 | 1 | | | 13 |
| | | Apr. 08,1999 | | | | | | | | | | | | |
| 276 | HPWDK06 | 203959 | Uni-ZAP XR | 286 | 878 | 240 | 854 | 405 | 405 | 703 | 1 | | | 26 |
| | | Apr. 26, 1999 | | | | | | | | | | | | |
| 277 | HRAAD30 | PTA-181 | pCMVSport | 287 | 1496 | 1 | 1496 | | 220 | 704 | 1 | 19 | 20 | 25 |
| | | Jun. 07, 1999 | 3.0 | | | | | | | | | | | |
| 278 | HRADA42 | 203959 | pCMVSport | 288 | 1135 | 1 | 1135 | | 122 | 705 | 1 | 24 | 25 | 44 |
| | | Apr. 26, 1999 | 3.0 | | | | | | | | | | | |
| 279 | HRADF49 | PTA-181 | pCMVSport | 289 | 2704 | 1 | 2684 | 169 | 169 | 706 | 1 | 39 | 40 | 253 |
| | | Jun. 07, 1999 | 3.0 | | | | | | | | | | | |
| 280 | HRADN25 | 203959 | pCMVSport | 290 | 1225 | 17 | 1206 | 198 | 198 | 707 | 1 | 17 | 18 | 65 |
| | | Apr. 26, 1999 | 3.0 | | | | | | | | | | | |
| 281 | HRADT25 | 203959 | pCMVSport | 291 | 1324 | 1 | 1324 | 233 | 233 | 708 | 1 | 28 | 29 | 63 |
| | | Apr. 26, 1999 | 3.0 | | | | | | | | | | | |
| 282 | HRDAI17 | 203918 | Uni-ZAP XR | 292 | 1500 | 547 | 1500 | 578 | 578 | 709 | 1 | 27 | 28 | 31 |
| | | Apr. 08, 1999 | | | | | | | | | | | | |
| 283 | HRDDQ39 | 203959 | Uni-ZAP XR | 293 | 776 | 1 | 773 | | 215 | 710 | 1 | 17 | 18 | 46 |
| | | Apr. 26, 1999 | | | | | | | | | | | | |
| 284 | HRDER22 | 203959 | Uni-ZAP XR | 294 | 543 | 1 | 543 | | 32 | 711 | 1 | | | 9 |
| | | Apr. 26, 1999 | | | | | | | | | | | | |
| 285 | HRDFK37 | 203959 | Uni-ZAP XR | 295 | 728 | 1 | 726 | 120 | 120 | 712 | 1 | | | 10 |
| | | Apr. 26, 1999 | | | | | | | | | | | | |
| 286 | HRGBD54 | 203959 | Uni-ZAP XR | 296 | 2301 | 1687 | 2271 | | 1958 | 713 | 1 | | | 10 |
| | | Apr. 26, 1999 | | | | | | | | | | | | |
| 287 | HROEA08 | PTA-181 | Uni-ZAP XR | 297 | 281 | 1 | 281 | 50 | 50 | 714 | 1 | 25 | 26 | 33 |
| | | Jun. 07, 1999 | | | | | | | | | | | | |
| 288 | HSAVA08 | 203918 | Uni-ZAP XR | 298 | 1061 | 1 | 1061 | | 66 | 715 | 1 | 17 | 18 | 26 |
| | | Apr. 08, 1999 | | | | | | | | | | | | |
| 289 | HSAWN53 | 203959 | Uni-ZAP XR | 299 | 349 | 1 | 349 | | 159 | 716 | 1 | 29 | 30 | 63 |
| | | Apr. 26, 1999 | | | | | | | | | | | | |
| 290 | HSAWZ40 | 203959 | Uni-ZAP XR | 300 | 1019 | 1 | 1019 | 124 | 124 | 717 | 1 | | | 37 |
| | | Apr. 26, 1999 | | | | | | | | | | | | |
| 291 | HSDBI90 | PTA-181 | Uni-ZAP XR | 301 | 1057 | 1 | 1057 | 218 | 218 | 718 | 1 | | | 14 |
| | | Jun. 07, 1999 | | | | | | | | | | | | |
| 292 | HSDZM54 | 203959 | pBluescript | 302 | 554 | 1 | 554 | 445 | 445 | 719 | 1 | 15 | 16 | 36 |
| | | Apr. 26, 1999 | | | | | | | | | | | | |
| 293 | HSHBF76 | 203959 | Uni-ZAP XR | 303 | 1273 | 1 | 1213 | | 129 | 720 | 1 | 7 | 8 | 10 |
| | | Apr. 26, 1999 | | | | | | | | | | | | |
| 294 | HSIFG47 | 203959 | Uni-ZAP XR | 304 | 882 | 1 | 882 | 304 | 304 | 721 | 1 | | | 13 |
| | | Apr. 26, 1999 | | | | | | | | | | | | |
| 295 | HSJBY32 | 203918 | Uni-ZAP XR | 305 | 1648 | 1 | 1648 | 257 | 257 | 722 | 1 | 19 | 20 | 91 |
| | | Apr. 08, 1999 | | | | | | | | | | | | |
| 296 | HSKDR27 | 203918 | Uni-ZAP XR | 306 | 762 | 1 | 762 | | 473 | 723 | 1 | 11 | 12 | 27 |
| | | Apr. 08, 1999 | | | | | | | | | | | | |
| 297 | HSLHG78 | 203979 | Uni-ZAP XR | 307 | 1474 | 452 | 1474 | 647 | 647 | 724 | 1 | 20 | 21 | 70 |
| | | Apr. 29, 1999 | | | | | | | | | | | | |
| 298 | HSNAP85 | 203959 | Uni-ZAP XR | 308 | 1286 | 735 | 1286 | | 941 | 725 | 1 | | | 4 |
| | | Apr. 26, 1999 | | | | | | | | | | | | |
| 299 | HSOAH16 | 203959 | Uni-ZAP XR | 309 | 721 | 1 | 721 | | 206 | 726 | 4 | 11 | 12 | 42 |
| | | Apr. 26, 1999 | | | | | | | | | | | | |
| 300 | HSQDO85 | PTA-181 | Uni-ZAP XR | 310 | 1210 | 1 | 1210 | 133 | 133 | 727 | 1 | | | 11 |
| | | Jun. 07, 1999 | | | | | | | | | | | | |
| 301 | HSQES57 | 203959 | Uni-ZAP XR | 311 | 1445 | 1012 | 1428 | 195 | 195 | 728 | 1 | 14 | 15 | 265 |
| | | Apr. 26, 1999 | | | | | | | | | | | | |
| 302 | HSRBE06 | PTA-791 | Uni-ZAP XR | 312 | 1633 | 13 | 1633 | | 128 | 729 | 1 | | | 21 |
| | | Sep. 27, 1999 | | | | | | | | | | | | |
| 303 | HSSDI26 | 203918 | Uni-ZAP XR | 313 | 1406 | 1 | 1406 | 253 | 253 | 730 | 1 | | | 21 |
| | | Apr. 08, 1999 | | | | | | | | | | | | |
| 304 | HSSEA64 | PTA-181 | Uni-ZAP XR | 314 | 1282 | 1 | 1274 | 58 | 58 | 731 | 1 | 16 | 17 | 62 |
| | | Jun. 07, 1999 | | | | | | | | | | | | |
| 305 | HSSEF77 | 203959 | Uni-ZAP XR | 315 | 1053 | 1 | 1053 | | 184 | 732 | 1 | 25 | 26 | 60 |
| | | Apr. 26, 1999 | | | | | | | | | | | | |
| 306 | HSSFE38 | 203959 | Uni-ZAP XR | 316 | 1238 | 85 | 1133 | | 264 | 733 | 1 | 19 | 20 | 125 |
| | | Apr. 26, 1999 | | | | | | | | | | | | |
| 307 | HSSGJ58 | 203918 | Uni-ZAP XR | 317 | 1954 | 1 | 1954 | 245 | 245 | 734 | 1 | 17 | 18 | 38 |
| | | Apr. 08, 1999 | | | | | | | | | | | | |
| 308 | HSVBD37 | 203959 | Uni-ZAP XR | 318 | 464 | 1 | 464 | 146 | 146 | 735 | 1 | | | 6 |
| | | Apr. 26, 1999 | | | | | | | | | | | | |
| 309 | HSXCP38 | PTA-795 | Uni-ZAP XR | 319 | 2206 | 1 | 2206 | | 211 | 736 | 1 | | | 14 |
| | | Sep. 27, 1999 | | | | | | | | | | | | |
| 310 | HSYBI06 | 203918 | pCMVSport | 320 | 956 | 1 | 956 | 232 | 232 | 737 | 1 | 21 | 22 | 33 |
| | | Apr. 08, 1999 | 3.0 | | | | | | | | | | | |
| 311 | HT1SC27 | 203959 | Uni-ZAP XR | 321 | 1198 | 1 | 1198 | 366 | 366 | 738 | 1 | 19 | 20 | 27 |
| | | Apr. 26, 1999 | | | | | | | | | | | | |
| 312 | H3BF49 | 203959 | Uni-ZAP XR | 322 | 2174 | 1 | 2174 | | 306 | 739 | 1 | | | 4 |
| | | Apr. 26, 1999 | | | | | | | | | | | | |
| 313 | HT5FX79 | 203959 | Uni-ZAP XR | 323 | 682 | 59 | 682 | | 228 | 740 | 1 | 17 | 18 | 50 |
| | | Apr. 26, 1999 | | | | | | | | | | | | |
| 314 | HT5GR59 | 203959 | Uni-ZAP XR | 324 | 1743 | 1 | 1743 | 135 | 135 | 741 | 1 | 23 | 24 | 31 |
| | | Apr. 26, 1999 | | | | | | | | | | | | |
| 315 | HTDAA78 | 203918 | pSport1 | 325 | 825 | 1 | 825 | 151 | 151 | 742 | 1 | | | 20 |
| | | Apr. 08, 1999 | | | | | | | | | | | | |
| 316 | HTEAG62 | 203959 | Uni-ZAP XR | 326 | 2221 | 57 | 2221 | 1017 | 1017 | 743 | 1 | 20 | 21 | 22 |
| | | Apr. 26, 1999 | | | | | | | | | | | | |
| 317 | HTECB02 | 203959 | Uni-ZAP XR | 327 | 1662 | 106 | 1662 | 196 | 196 | 744 | 1 | 22 | 23 | 56 |
| | | Apr. 26, 1999 | | | | | | | | | | | | |
| 318 | HTECC15 | PTA-181 | Uni-ZAP XR | 328 | 2055 | 1 | 2055 | 211 | 211 | 745 | 1 | 19 | 20 | 23 |
| | | Jun. 07, 1999 | | | | | | | | | | | | |
| 319 | HTEDJ28 | 203959 | Uni-ZAP XR | 329 | 1247 | 1 | 1247 | | 287 | 746 | 1 | 18 | 19 | 45 |
| | | Apr. 26, 1999 | | | | | | | | | | | | |
| 320 | HTEDS12 | 203918 | Uni-ZAP XR | 330 | 1587 | 1 | 1587 | 260 | 260 | 747 | 1 | 24 | 25 | 36 |
| | | Apr. 08, 1999 | | | | | | | | | | | | |
| 321 | HTREW69 | 203959 | Uni-ZAP XR | 331 | 1282 | 110 | 1263 | 182 | 182 | 748 | 1 | 30 | 31 | 323 |
| | | Apr. 26, 1999 | | | | | | | | | | | | |
| 322 | HTEGS07 | 203959 | Uni-ZAP XR | 332 | 806 | 1 | 806 | | 493 | 749 | 1 | 20 | 21 | 37 |
| | | Apr. 26, 1999 | | | | | | | | | | | | |
| 323 | HTEGS11 | PTA-181 | Uni-ZAP XR | 333 | 981 | 1 | 981 | | 173 | 750 | 1 | | | 7 |
| | | Jun. 07, 1999 | | | | | | | | | | | | |
| 324 | HTEHA56 | 203959 | Uni-ZAP XR | 334 | 1402 | 529 | 1400 | | 280 | 751 | 1 | 5 | 6 | 88 |
| | | Apr. 26, 1999 | | | | | | | | | | | | |
| 325 | HTEHU59 | 203959 | Uni-ZAP XR | 335 | 1523 | 1 | 1504 | 170 | 170 | 752 | 1 | 19 | 20 | 34 |
| | | Apr. 26, 1999 | | | | | | | | | | | | |
| 326 | HTEKM46 | PTA-181 | Uni-ZAP XR | 336 | 2116 | 1 | 2116 | 171 | 171 | 753 | 1 | 24 | 25 | 38 |
| | | Jun. 07, 1999 | | | | | | | | | | | | |
| 327 | HTEMQ17 | 203959 | Uni-ZAP XR | 337 | 1768 | 1 | 1768 | 446 | 446 | 754 | 1 | | | 12 |
| | | Apr. 26, 1999 | | | | | | | | | | | | |
| 328 | HTLAP64 | 203918 | Uni-ZAP XR | 338 | 1092 | 1 | 1092 | 173 | 173 | 755 | 1 | 19 | 20 | 20 |
| | | Apr. 08, 1999 | | | | | | | | | | | | |
| 329 | HTLBT80 | 203959 | Uni-ZAP XR | 339 | 2101 | 817 | 1881 | 912 | 912 | 756 | 1 | 27 | 28 | 129 |
| | | Apr. 26, 1999 | | | | | | | | | | | | |
| 330 | RTLCX82 | 203979 | Uni-ZAP XR | 340 | 920 | 1 | 920 | | 46 | 757 | 1 | 15 | 16 | 75 |
| | | Apr. 29, 1999 | | | | | | | | | | | | |
| 331 | HTLDA84 | 203918 | Uni-ZAP XR | 341 | 1444 | 1 | 1444 | | 225 | 758 | 1 | | | 13 |
| | | Apr. 08, 1999 | | | | | | | | | | | | |
| 332 | HTLDU78 | 203918 | Uni-ZAP XR | 342 | 1318 | 1 | 1318 | 219 | 219 | 759 | 1 | | | 8 |
| | | Apr. 08, 1999 | | | | | | | | | | | | |
| 333 | HTLEC82 | 203959 | Uni-ZAP XR | 343 | 1260 | 217 | 1119 | 530 | 530 | 760 | 1 | 34 | 35 | 36 |
| | | Apr. 26, 1999 | | | | | | | | | | | | |
| 334 | HTLEM16 | 203959 | Uni-ZAP XR | 344 | 1915 | 1158 | 1755 | 1220 | 1220 | 761 | 1 | 27 | 28 | 69 |
| | | Apr. 26, 1999 | | | | | | | | | | | | |
| 335 | HTLEV48 | 203918 | Uni-ZAP XR | 345 | 1070 | 1 | 1070 | 205 | 205 | 762 | 1 | 30 | 31 | 207 |
| | | Apr. 08, 1999 | | | | | | | | | | | | |
| 335 | HTLEV48 | 203918 | Uni-ZAP XR | 406 | 1065 | 1 | 1065 | 91 | 91 | 823 | 1 | | | 9 |
| | | Apr. 08, 1999 | | | | | | | | | | | | |
| 336 | HTLFI73 | 203979 | Uni-ZAP XR | 346 | 1159 | 1 | 1159 | 340 | 340 | 763 | 1 | | | 23 |
| | | Apr. 29, 1999 | | | | | | | | | | | | |
| 337 | HTLIF11 | 203959 | Uni-ZAP XR | 347 | 1968 | 860 | 1968 | 933 | 933 | 764 | 1 | 33 | 34 | 38 |
| | | Apr. 26, 1999 | | | | | | | | | | | | |
| 338 | HTNAM63 | 203918 | pBluescript | 348 | 1006 | 1 | 1006 | | 193 | 765 | 1 | 15 | 16 | 30 |
| | | Apr. 08, 1999 | SK- | | | | | | | | | | | |
| 339 | HTNBK13 | 203959 | pBluescript | 349 | 1160 | 295 | 1148 | 534 | 534 | 766 | 1 | 16 | 17 | 21 |
| | | Apr. 26, 1999 | SK- | | | | | | | | | | | |
| 340 | HTOAI50 | 203959 | Uni-ZAP XR | 350 | 1258 | 1 | 1258 | 61 | 61 | 767 | 1 | 17 | 18 | 27 |
| | | Apr. 26, 1999 | | | | | | | | | | | | |
| 341 | HTOAM11 | 203918 | Uni-ZAP XR | 351 | 1200 | 1 | 1200 | 89 | 89 | 768 | 1 | 24 | 25 | 34 |
| | | Apr. 08, 1999 | | | | | | | | | | | | |
| 342 | HTODH57 | 203918 | Uni-ZAP XR | 352 | 1652 | 1 | 1652 | | 228 | 769 | 1 | 18 | 19 | 71 |
| | | Apr. 08, 1999 | | | | | | | | | | | | |
| 343 | HTODH83 | 203918 | Uni-ZAP XR | 353 | 1981 | 1 | 1981 | 103 | 103 | 770 | 1 | 21 | 22 | 32 |
| | | Apr. 08, 1999 | | | | | | | | | | | | |
| 344 | HTOEV16 | PTA-181 | Uni-ZAP XR | 354 | 1640 | 1 | 1640 | 201 | 201 | 771 | 1 | 39 | 40 | 118 |
| | | Jun. 07, 1999 | | | | | | | | | | | | |
| 345 | HTOGR38 | 203959 | Uni-ZAP XR | 355 | 776 | 138 | 776 | | 314 | 772 | 1 | 23 | 24 | 42 |
| | | Apr. 26, 1999 | | | | | | | | | | | | |
| 346 | HTOHO21 | 203918 | Uni-ZAP XR | 356 | 727 | 1 | 727 | | 439 | 773 | 1 | 5 | 6 | 63 |
| | | Apr. 08, 1999 | | | | | | | | | | | | |
| 347 | HTPDU17 | 203959 | Uni-ZAP XR | 357 | 2078 | 1 | 2078 | | 52 | 774 | 1 | 17 | 18 | 33 |
| | | Apr. 26, 1999 | | | | | | | | | | | | |
| 348 | HTSFJ32 | 203918 | pBluescript | 358 | 1257 | 517 | 1257 | 93 | 93 | 775 | 1 | | | 18 |
| | | Apr. 08, 1999 | | | | | | | | | | | | |
| 349 | HTTEZ02 | 203918 | Uni-ZAP XR | 359 | 1880 | 1 | 1880 | 250 | 250 | 776 | 1 | 21 | 22 | 28 |
| | | Apr. 08, 1999 | | | | | | | | | | | | |
| 350 | HTXBD09 | 203959 | Uni-ZAP XR | 360 | 1921 | 22 | 1900 | | 350 | 777 | 1 | | | 12 |
| | | Apr. 26, 1999 | | | | | | | | | | | | |
| 351 | HTXDB22 | PTA-181 | Uni-ZAP XR | 361 | 1211 | 1 | 1135 | | 229 | 778 | 1 | 10 | 11 | 22 |
| | | Jun. 07, 1999 | | | | | | | | | | | | |
| 352 | HTXDC38 | 203959 | Uni-ZAP XR | 362 | 820 | 106 | 806 | 359 | 359 | 779 | 1 | | | 18 |
| | | Apr. 26, 1999 | | | | | | | | | | | | |
| 353 | HTXDC77 | 203979 | Uni-ZAP XR | 363 | 1441 | 159 | 1400 | 65 | 65 | 780 | 1 | 18 | 19 | 151 |
| | | Apr. 29, 1999 | | | | | | | | | | | | |
| 354 | HTXDG92 | 203959 | Uni-ZAP XR | 364 | 1162 | 1 | 1162 | | 216 | 781 | 1 | 24 | 25 | 66 |
| | | Apr. 26, 1999 | | | | | | | | | | | | |
| 355 | HTXET11 | 203918 | Uni-ZAP XR | 365 | 989 | 1 | 989 | 178 | 178 | 782 | 1 | 22 | 23 | 29 |
| | | Apr. 08, 1999 | | | | | | | | | | | | |
| 356 | HTXIY08 | 203959 | Uni-ZAP XR | 366 | 1187 | 12 | 1187 | 108 | 108 | 783 | 1 | | | 16 |
| | | Apr. 26, 1999 | | | | | | | | | | | | |
| 357 | HTXKF95 | 203959 | Uni-ZAP XR | 367 | 884 | 79 | 875 | 330 | 330 | 784 | 1 | 28 | 29 | 78 |
| | | Apr. 26, 1999 | | | | | | | | | | | | |
| 358 | HTXLT36 | 203959 | Uni-ZAP XR | 368 | 1040 | 1 | 1038 | 189 | 189 | 785 | 1 | | | 13 |
| | | Apr. 26, 1999 | | | | | | | | | | | | |
| 359 | HTXMZ07 | 203959 | Uni-ZAP XR | 369 | 1652 | 189 | 1640 | 319 | 319 | 786 | 1 | 22 | 23 | 37 |
| | | Apr. 26, 1999 | | | | | | | | | | | | |
| 360 | HUFCL31 | 203959 | pSport1 | 370 | 1460 | 1 | 1460 | | 287 | 787 | 1 | | | 26 |
| | | Apr. 26, 1999 | | | | | | | | | | | | |
| 361 | HUKBT67 | 203959 | Lambda ZAP | 371 | 2069 | 74 | 2052 | | 273 | 788 | 1 | 21 | 22 | 39 |
| | | Apr. 26, 1999 | II | | | | | | | | | | | |
| 362 | HUKDF20 | 203918 | Lambda ZAP | 372 | 1105 | 1 | 1105 | 214 | 214 | 789 | 1 | 20 | 21 | 33 |
| | | Apr. 08, 1999 | II | | | | | | | | | | | |
| 363 | HUKDY82 | 203918 | Lambda ZAP | 373 | 1435 | 1 | 1435 | 187 | 187 | 790 | 1 | 17 | 18 | 32 |
| | | Apr. 08, 1999 | II | | | | | | | | | | | |
| 364 | BUSCJ14 | PTA- | Lambda ZAP | 374 | 3342 | 1 | 3342 | 74 | 74 | 791 | 1 | 30 | 31 | 196 |
| | | 1838 | II | | | | | | | | | | | |
| | | May 09, 2000 | | | | | | | | | | | | |
| 365 | HUSGL67 | 203918 | pSport1 | 375 | 1008 | 65 | 1008 | 350 | 350 | 792 | 1 | 21 | 22 | 47 |
| | | Apr. 08, 1999 | | | | | | | | | | | | |
| 366 | HUSGU40 | 203959 | pSport1 | 376 | 1054 | 1 | 1054 | | 500 | 793 | 1 | 20 | 21 | 46 |
| | | Apr. 26, 1999 | | | | | | | | | | | | |
| 367 | HUSIR18 | 203959 | pSport1 | 377 | 876 | 1 | 876 | 83 | 83 | 794 | 1 | 16 | 17 | 22 |
| | | Apr. 26, 1999 | | | | | | | | | | | | |
| 368 | HUVDJ48 | 203918 | Uni-ZAP XR | 378 | 1827 | 1 | 1827 | 196 | 196 | 795 | 1 | | | 5 |
| | | Apr. 08, 1999 | | | | | | | | | | | | |
| 369 | HWAAI12 | 203959 | pCMVSport | 379 | 3303 | 1 | 1838 | 223 | 223 | 796 | 1 | | | 29 |
| | | Apr. 26, 1999 | 3.0 | | | | | | | | | | | |
| 370 | HWBBQ70 | 203959 | pCMVSport | 380 | 1948 | 1 | 1948 | 222 | 222 | 797 | 1 | 21 | 22 | 43 |
| | | Apr. 26, 1999 | 3.0 | | | | | | | | | | | |
| 371 | HWBBU75 | 203979 | pCMVSport | 381 | 2731 | 623 | 2731 | 783 | 783 | 798 | 1 | 22 | 23 | 51 |
| | | Apr. 29, 1999 | 3.0 | | | | | | | | | | | |
| 372 | HWBCN36 | 203959 | pCMVSport | 382 | 1008 | 1 | 1008 | 378 | 378 | 799 | 1 | 23 | 24 | 90 |
| | | Apr. 26, 1999 | 3.0 | | | | | | | | | | | |
| 373 | HWBDJ08 | 203959 | pCMVSport | 383 | 2085 | 1 | 2085 | 253 | 253 | 800 | 1 | 29 | 30 | 50 |
| | | Apr. 26, 1999 | 3.0 | | | | | | | | | | | |
| 374 | HWBFX16 | 203959 | pCMVSport | 384 | 1497 | 1 | 1497 | | 267 | 801 | 1 | | | 3 |
| | | Apr. 26, 1999 | 3.0 | | | | | | | | | | | |
| 375 | HWDAC26 | 203959 | pCMVSport | 385 | 1958 | 1 | 1958 | 242 | 242 | 802 | 1 | 25 | 26 | 35 |
| | | Apr. 26, 1999 | 3.0 | | | | | | | | | | | |
| 376 | HWDAG96 | 203959 | pCMVSport | 386 | 1147 | 300 | 1147 | 866 | 866 | 803 | 1 | 18 | 19 | 32 |
| | | Apr. 26, 1999 | 3.0 | | | | | | | | | | | |
| 377 | HWDAJ01 | 203959 | pCMVSport | 387 | 781 | 1 | 781 | 288 | 288 | 804 | 1 | | | 24 |
| | | Apr. 26, 1999 | 3.0 | | | | | | | | | | | |
| 378 | HWHPB78 | 203959 | pCMVSport | 388 | 1346 | 1 | 1346 | 200 | 200 | 805 | 1 | 23 | 24 | 66 |
| | | Apr. 26, 1999 | 3.0 | | | | | | | | | | | |
| 379 | HELGG84 | 203960 | Uni-ZAP XR | 389 | 1109 | 12 | 1109 | 147 | 147 | 806 | 1 | 16 | 17 | 22 |
| | | Apr. 26, 1999 | | | | | | | | | | | | |
| 379 | HELGG84 | 203960 | Uni-ZAP XR | 407 | 1109 | 12 | 1109 | 147 | 147 | 824 | 1 | 16 | 17 | 22 |
| | | Apr. 26, 1999 | | | | | | | | | | | | |
| 380 | HILCA24 | 203960 | pBluescript | 390 | 1982 | 153 | 1982 | 191 | 191 | 807 | 1 | 29 | 30 | 327 |
| | | Apr. 26, 1999 | SK- | | | | | | | | | | | |
| 380 | HILCA24 | 203960 | pBluescript | 408 | 1980 | 151 | 1976 | 189 | 189 | 825 | 1 | 29 | 30 | 327 |
| | | Apr. 26, 1999 | SK- | | | | | | | | | | | |
| 381 | HB2CA60 | 203960 | Uni-ZAP XR | 391 | 3034 | 1679 | 3034 | 1731 | 1731 | 808 | 1 | | | 7 |
| | | Apr. 26, 1999 | | | | | | | | | | | | |
| 381 | HE2CA60 | 203960 | Uni-ZAIP XR | 409 | 1663 | 308 | 1663 | 360 | 360 | 826 | 1 | | | 7 |
| | | Apr. 26, 1999 | | | | | | | | | | | | |
| 382 | HLWAU42 | 203957 | pCMVSport | 392 | 947 | 1 | 947 | 220 | 220 | 809 | 1 | 17 | 18 | 57 |
| | | Apr. 26, 1999 | 3.0 | | | | | | | | | | | |
| 382 | HLWAU42 | 203957 | pCMVSport | 410 | 2495 | 1542 | 2488 | 1751 | 1751 | 827 | 1 | 17 | 18 | 57 |
| | | Apr. 26, 1999 | 3.0 | | | | | | | | | | | |
| 383 | HGCAC19 | 203960 | pSport1 | 393 | 5061 | 23 | 1475 | | 317 | 810 | 1 | | | 9 |
| | | Apr. 26, 1999 | | | | | | | | | | | | |
| 383 | HGCAC19 | 203960 | pSport1 | 411 | 1771 | 21 | 1473 | | 315 | 828 | 1 | | | 9 |
| | | Apr. 26, 1999 | | | | | | | | | | | | |
| 383 | HGCAC19 | 203960 | pSport1 | 412 | 1534 | 23 | 1534 | | 317 | 829 | 1 | | | 9 |
| | | Apr. 26, 1999 | | | | | | | | | | | | |
| 384 | HPQAX38 | 203979 | Lambda ZAP | 394 | 1158 | 41 | 1158 | | 295 | 811 | 1 | 10 | 11 | 16 |
| | | Apr. 29, 1999 | II | | | | | | | | | | | |
| 384 | HPQAX38 | 203979 | Lamda ZAP | 413 | 1157 | 41 | 1157 | | 295 | 830 | 1 | 10 | 11 | 16 |
| | | Apr. 29, 1999 | II | | | | | | | | | | | |
| 385 | HTOJL95 | 203959 | Uni-ZAP XR | 395 | 1947 | 1 | 1947 | 221 | 221 | 812 | 1 | 26 | 27 | 58 |
| | | Apr. 26, 1999 | | | | | | | | | | | | |
| 385 | HTOJL95 | 203959 | Uni-ZAP XR | 414 | 1854 | 1 | 1818 | 134 | 134 | 831 | 1 | 26 | 27 | 58 |
| | | Apr. 26, 1999 | | | | | | | | | | | | |
| 386 | HTLIF12 | 203959 | Uni-ZAP XR | 396 | 1081 | 142 | 1033 | 644 | 644 | 813 | 1 | 19 | 20 | 75 |
| | | Apr. 26, 1999 | | | | | | | | | | | | |
| 386 | HTLIF12 | 203959 | Uni-ZAP XR | 415 | 1081 | 142 | 1033 | 644 | 644 | 832 | 1 | 19 | 20 | 75 |
| | | Apr. 26, 1999 | | | | | | | | | | | | |
| 386 | HTLIF12 | 203959 | Uni-ZAP XR | 416 | 1081 | 142 | 1033 | 644 | 644 | 833 | 1 | 19 | 20 | 75 |
| | | Apr. 26, 1999 | | | | | | | | | | | | |
| 386 | HTLIF12 | 203959 | Uni-ZAP XR | 417 | 1044 | 142 | 1033 | 644 | 644 | 834 | 1 | 19 | 20 | 75 |
| | | Apr. 26, 1999 | | | | | | | | | | | | |
| 386 | HTLIF12 | 203959 | Uni-ZAP XR | 418 | 1081 | 142 | 1033 | 644 | 644 | 835 | 1 | 19 | 20 | 75 |
| | | Apr. 26, 1999 | | | | | | | | | | | | |
| 386 | HTLIF12 | 203959 | Uni-ZAP XR | 419 | 1100 | 140 | 1100 | 642 | 642 | 836 | 1 | 19 | 20 | 75 |
| | | Apr. 26, 1999 | | | | | | | | | | | | |
| 387 | HTEED26 | 203959 | Uni-ZAP XR | 397 | 2179 | 1 | 2179 | 261 | 261 | 814 | 1 | 19 | 20 | 32 |
| | | Apr. 26, 1999 | | | | | | | | | | | | |
| 387 | HTEED26 | 203959 | Uni-ZAP XR | 420 | 2167 | 1 | 2159 | 259 | 259 | 837 | 1 | 19 | 20 | 32 |
| | | Apr. 26, 1999 | | | | | | | | | | | | |
| 388 | HPJBJ51 | 203959 | Uni-ZAP XR | 398 | 2795 | 523 | 2422 | 716 | 716 | 815 | 1 | 14 | 15 | 69 |
| | | Apr. 26, 1999 | | | | | | | | | | | | |
| 388 | HPJBJ51 | 203959 | Uni-ZAP XR | 421 | 2793 | 522 | 2421 | 715 | 715 | 838 | 1 | 14 | 15 | 69 |
| | | Apr. 26, 1999 | | | | | | | | | | | | |
| 389 | HOABP31 | 203959 | Uni-ZAP XR | 399 | 929 | 1 | 892 | | 148 | 816 | 1 | 19 | 20 | 124 |
| | | Apr. 26, 1999 | | | | | | | | | | | | |
| 389 | HOABP31 | 203959 | Uni-ZAP XR | 422 | 927 | 1 | 890 | | 148 | 839 | 1 | 19 | 20 | 123 |
| | | Apr. 26, 1999 | | | | | | | | | | | | |
| 390 | HMCAZ04 | 203917 | Uni-ZAP XR | 400 | 1301 | 1 | 1301 | 97 | 97 | 817 | 1 | 20 | 21 | 35 |
| | | Apr. 08, 1999 | | | | | | | | | | | | |
| 390 | HMCAZ04 | 203917 | Uni-ZAP XR | 423 | 1735 | 407 | 1671 | 498 | 498 | 840 | 1 | 20 | 21 | 35 |
| | | Apr. 08, 1999 | | | | | | | | | | | | |
| 390 | HMCAZ04 | 203917 | Uni-ZAP XR | 424 | 1733 | 406 | 1670 | 106 | 106 | 841 | 1 | 25 | 26 | 450 |
| | | Apr. 08, 1999 | | | | | | | | | | | | |
| 390 | HMCAZ04 | 203917 | Uni-ZAP XR | 425 | 1733 | 405 | 1670 | 497 | 497 | 842 | 1 | 20 | 21 | 35 |
| | | Apr. 08, 1999 | | | | | | | | | | | | |
| 390 | HMCAZ04 | 203917 | Uni-ZAP XR | 426 | 1733 | 405 | 1670 | 106 | 106 | 843 | 1 | 25 | 26 | 450 |
| | | Apr. 08, 1999 | | | | | | | | | | | | |
| 391 | HB8FC45 | 203979 | Uni-ZAP XR | 401 | 1887 | 1 | 1887 | 155 | 155 | 818 | 1 | 33 | 34 | 47 |
| | | Apr. 29, 1999 | | | | | | | | | | | | |
| 391 | HE8FC45 | 203979 | Uni-ZAP XR | 427 | 1887 | 1 | 1887 | 155 | 155 | 844 | 1 | 33 | 34 | 47 |
| | | Apr. 29, 1999 | | | | | | | | | | | | |

Table 1B (Comprised of Tables 1B.1 and 1B.2)

[0096] The first column in Table 1B.1 and Table 1B.2 provides the gene number in the application corresponding to the clone identifier. The second column in Table 1B.1 and Table 1B.2 provides a unique “Clone ID:” for the cDNA clone related to each contig sequence disclosed in Table 1B.1 and Table 1B.2. This clone ID references the cDNA clone which contains at least the 5′ most sequence of the assembled contig and at least a portion of SEQ ID NO:X as determined by directly sequencing the referenced clone. The referenced clone may have more sequence than described in the sequence listing or the clone may have less. In the vast majority of cases, however, the clone is believed to encode a full-length polypeptide. In the case where a clone is not full-length, a full-length cDNA can be obtained by methods described elsewhere herein. The third column in Table 1B.1 and Table 1B.2 provides a unique “Contig ID” identification for each contig sequence. The fourth column in Table 1B.1 and Table 1B.2 provides the “SEQ ID NO:” identifier for each of the contig polynucleotide sequences disclosed in Table 1B.

[0097] Table 1B.1

[0098] The fifth column in Table 1B.1, “ORF (From-To)”, provides the location (i.e., nucleotide position numbers) within the polynucleotide sequence “SEQ ID NO:X” that delineate the preferred open reading frame (ORF) shown in the sequence listing and referenced in Table 1B.1, column 6, as SEQ ID NO:Y. Where the nucleotide position number “To” is lower than the nucleotide position number “From”, the preferred ORF is the reverse complement of the referenced polynucleotide sequence. The sixth column in Table 1B.1 provides the corresponding SEQ ID NO:Y for the polypeptide sequence encoded by the preferred ORF delineated in column 5. In one embodiment, the invention provides an amino acid sequence comprising, or alternatively consisting of, a polypeptide encoded by the portion of SEQ ID NO:X delineated by “ORF (From-To)”. Also provided are polynucleotides encoding such amino acid sequences and the complementary strand thereto. Column 7 in Table 1B.1 lists residues comprising epitopes contained in the polypeptides encoded by the preferred ORF (SEQ ID NO:Y), as predicted using the algorithm of Jameson and Wolf, (1988) Comp. Appl. Biosci. 4:181-186. The Jameson-Wolf antigenic analysis was performed using the computer program PROTEAN (Version 3.11 for the Power MacIntosh, DNASTAR, Inc., 1228 South Park Street Madison, Wis.). In specific embodiments, polypeptides of the invention comprise, or alternatively consist of, at least one, two, three, four, five or more of the predicted epitopes as described in Table 1B. It will be appreciated that depending on the analytical criteria used to predict antigenic determinants, the exact address of the determinant may vary slightly.

[0099] Column 8 in Table 1B.1 provides a chromosomal map location for certain polynucleotides of the invention. Chromosomal location was determined by finding exact matches to EST and cDNA sequences contained in the NCBI (National Center for Biotechnology Information) UniGene database. Each sequence in the UniGene database is assigned to a “cluster”; all of the ESTs, cDNAs, and STSs in a cluster are believed to be derived from a single gene. Chromosomal mapping data is often available for one or more sequence(s) in a UniGene cluster; this data (if consistent) is then applied to the cluster as a whole. Thus, it is possible to infer the chromosomal location of a new polynucleotide sequence by determining its identity with a mapped UniGene cluster.

[0100] A modified version of the computer program BLASTN (Altshul, et al., J. Mol. Biol. 215:403-410 (1990), and Gish, and States, Nat. Genet. 3:266-272) (1993) was used to search the UniGene database for EST or cDNA sequences that contain exact or near-exact matches to a polynucleotide sequence of the invention (the ‘Query’). A sequence from the UniGene database (the ‘Subject’) was said to be an exact match if it contained a segment of 50 nucleotides in length such that 48 of those nucleotides were in the same order as found in the Query sequence. If all of the matches that met this criteria were in the same UniGene cluster, and mapping data was available for this cluster, it is indicated in Table 1B under the heading “Cytologic Band”. Where a cluster had been further localized to a distinct cytologic band, that band is disclosed; where no banding information was available, but the gene had been localized to a single chromosome, the chromosome is disclosed.

[0101] Once a presumptive chromosomal location was determined for a polynucleotide of the invention, an associated disease locus was identified by comparison with a database of diseases which have been experimentally associated with genetic loci. The database used was the Morbid Map, derived from OMEN and National Center for Biotechnology Information, National Library of Medicine (Bethesda, Md.) 2000. If the putative chromosomal location of a polynucleotide of the invention (Query sequence) was associated with a disease in the Morbid Map database, an OMIM reference identification number was noted in column 9, Table 1B.1, labelled “OMIM Disease Reference(s). Table 5 is a key to the OMIM reference identification numbers (column 1), and provides a description of the associated disease in Column 2.

[0102] Table 1B.2

[0103] Column 5, in Table 1B.2, provides an expression profile and library code:count for each of the contig sequences (SEQ ID NO:X) disclosed in Table 1B, which can routinely be combined with the information provided in Table 4 and used to determine the tissues, cells, and/or cell line libraries which predominantly express the polynucleotides of the invention. The first number in Table 1B.2, column 5 (preceding the colon), represents the tissue/cell source identifier code corresponding to the code and description provided in Table 4. The second number in column 5 (following the colon) represents the number of times a sequence corresponding to the reference polynucleotide sequence was identified in the corresponding tissue/cell source. Those tissue/cell source identifier codes in which the first two letters are “AR” designate information generated using DNA array technology. Utilizing this technology, cDNAs were amplified by PCR and then transferred, in duplicate, onto the array. Gene expression was assayed through hybridization of first strand cDNA probes to the DNA array. cDNA probes were generated from total RNA extracted from a variety of different tissues and cell lines. Probe synthesis was performed in the presence of ³³P dCTP, using oligo (dT) to prime reverse transcription. After hybridization, high stringency washing conditions were employed to remove non-specific hybrids from the array. The remaining signal, emanating from each gene target, was measured using a Phosphorimager. Gene expression was reported as Phosphor Stimulating Luminescence (PSL) which reflects the level of phosphor signal generated from the probe hybridized to each of the gene targets represented on the array. A local background signal subtraction was performed before the total signal generated from each array was used to normalize gene expression between the different hybridizations. The value presented after “[array code]:” represents the mean of the duplicate values, following background subtraction and probe normalization. One of skill in the art could routinely use this information to identify normal and/or diseased tissue(s) which show a predominant expression pattern of the corresponding polynucleotide of the invention or to identify polynucleotides which show predominant and/or specific tissue and/or cell expression.

TABLE 1B.1

| | | | | | | | | |
|---|---|---|---|---|---|---|---|---|
| | | | | | AA | | | |
| | cDNA | | SEQ | | SEQ | | | OMIM |
| Gene | Clone | Contig | ID | ORF | ID | | Cytologic | Disease |
| No: | ID | ID: | NO:X | (From-To) | NO:Y | Predicted Epitopes | Band | Reference(s): |

| | | | | | | | | |
|---|---|---|---|---|---|---|---|---|
| 1 | H6BSF56 | 762968 | 11 | 83-508 | 428 | Asn-131 to Met-140. | | |
| 2 | H6EEC72 | 889401 | 12 | 263-319 | 429 | | 19q13.4 | 134790, 191044, 600040, 600138 |
| 3 | HACAB68 | 584773 | 13 | 135-371 | 430 | Leu-6 to Ser-12. | | |
| 4 | HACBS22 | 847113 | 14 | 217-342 | 431 | Cys-2 to Leu-8. | | |
| 5 | HADDE71 | 839187 | 15 | 250-666 | 432 | Pro-9 to Thr-14, | | |
| | | | | | | Ser-37 to Trp-44, | | |
| | | | | | | Gly-79 to Thr-85, | | |
| | | | | | | Arg-88 to Lys-139. | | |
| 6 | HADDJ13 | 827273 | 16 | 347-439 | 433 | | | |
| 7 | HADMA77 | 783049 | 17 | 992-1063 | 434 | | | |
| 8 | HADMB15 | 847116 | 18 | 238-300 | 435 | | | |
| 9 | HAGBQ12 | 722205 | 19 | 171-236 | 436 | | | |
| 10 | HAGEG10 | 823543 | 20 | 146-313 | 437 | | | |
| 11 | HAGEQ79 | 828055 | 21 | 515-550 | 438 | | | |
| 12 | HAGFJ67 | 861680 | 22 | 208-486 | 439 | Cys-26 to Asp-31. | | |
| 13 | HAGFS57 | 847120 | 23 | 241-405 | 440 | Met-1 to Lys-6. | 15g15.3 | 114240, 224120, 600839, 602099 |
| 14 | HAGHN57 | 773286 | 24 | 900-932 | 441 | | 7q22-q32 | 126650, 126650, 154276, 173360, |
| | | | | | | | | 173360, 180105, 190900, 222800, |
| | | | | | | | | 246900, 602136, 602136, 602136, |
| | | | | | | | | 602447 |
| 15 | HAJAA47 | 534670 | 25 | 192-308 | 442 | Leu-33 to Asp-38. | | |
| 16 | HAJAY92 | 845601 | 26 | 12-296 | 443 | Lys-89 to Glu-94. | | |
| 17 | HAJCH70 | 827275 | 27 | 284-400 | 444 | | | |
| 18 | HAOAG15 | 852204 | 28 | 8-3511 | 445 | Asp-26 to Leu-32, | 1q21 | 104770, 107670, 110700, 135940, |
| | | | | | | Trp-62 to Asp-72, | | 145001, 146790, 152445, 152445, |
| | | | | | | Gln-95 to His-101, | | 159001, 174000, 179755, 182860, |
| | | | | | | Thr-158 to Thr-164, | | 182860, 182860, 191315, 230800, |
| | | | | | | Phe-222 to Glu-227, | | 230800, 266200, 600897, 601105, |
| | | | | | | | | 601412, 601652, 602491 |
| | | | | | | Asn-234 to Thr-245, | | |
| | | | | | | Gly-256 to Glu-266, | | |
| | | | | | | Gly-277 to Glu-283, | | |
| | | | | | | Arg-310 to Ser-317, | | |
| | | | | | | Ser-327 to Phe-333, | | |
| | | | | | | Ser-360 to Ser-366. | | |
| 19 | HAQAI92 | 688037 | 29 | 250-321 | 446 | | 20p13 | 192340, 234200 |
| 20 | HARAE26 | 560598 | 30 | 225-518 | 447 | Pro-52 to Cys-57. | | |
| 21 | HATBI94 | 839468 | 31 | 18-224 | 448 | Lys-42 to Asp-54. | | |
| 22 | HATCB45 | 631172 | 32 | 268-396 | 449 | | | |
| 23 | HATCI03 | 580805 | 33 | 271-324 | 450 | Lys-8 to Trp-13. | | |
| 24 | HATEH20 | 836056 | 34 | 93-221 | 451 | Val-23 to Glu-28. | | |
| 25 | HBAGD86 | 838799 | 35 | 521-580 | 452 | | | |
| 26 | HBGJL35 | 1300785 | 36 | 17-391 | 453 | Pro-46 to Ala-57, | 1q21.2 | 104770, 107670, 110700, 145001, |
| | | | | | | Ser-74 to Glu-94, | | 146760, 146790, 191315, 601412, |
| | | | | | | Gly-104 to Ser-110. | | 601652, 601863, 602491 |
| | HBCJL35 | 897937 | 402 | 1033-1407 | 819 | Pro-46 to Ala-57, | | |
| | | | | | | Ser-74 to Glu-94, | | |
| | | | | | | Gly-104 to Ser-110. | | |
| 27 | HBGBC29 | 691473 | 37 | 1016-1024 | 454 | | 3q13.3 | 126451, 600882 |
| 28 | HBGNC72 | 892131 | 38 | 550-780 | 455 | His-49 to His-57. | 19p13.3 | 108725, 120700, 133171, 136836, |
| | | | | | | | | 145981, 147141, 164953, 188070, |
| | | | | | | | | 600957, 601238, 601846, 602216, |
| | | | | | | | | 602477 |
| 29 | HBHAA81 | 846465 | 39 | 28-639 | 456 | | 3p21.32 | 116806, 168468, 182280, 600163 |
| 30 | HBIAA59 | 806303 | 40 | 1877-2287 | 457 | Arg-34 to Ser-39, | | |
| | | | | | | Pro-45 to Ile-55. | | |
| 31 | HBIAC29 | 831751 | 41 | 1036-1125 | 458 | | 1p35.3-p33 | 118210, 120260, 120550, 120570, |
| | | | | | | | | 120575, 121800, 130500, 133200, |
| | | | | | | | | 138140, 171760, 171760, 178300, |
| | | | | | | | | 185470, 230350, 246450, 255800, |
| | | | | | | | | 602771 |
| 32 | HBICW51 | 553630 | 42 | 289-417 | 459 | | | |
| 33 | HBJAB02 | 837309 | 43 | 84-188 | 460 | Arg-24 to Asp-31. | 17q23 | 106180, 138700, 139250, 150200, |
| | | | | | | | | 154275, 176960, 249000, 253250 |
| 34 | HBJAC65 | 679337 | 44 | 137-208 | 461 | | 1q21.2- | 104770, 107670, 110700, 145001, |
| | | | | | | | q21.3 | 146760, 146790, 191315, 601412, |
| | | | | | | | | 601652, 601863, 602491 |
| 35 | HBJBM12 | 560606 | 45 | 47-142 | 462 | | | |
| 36 | HBJDS79 | 813588 | 46 | 1032-1355 | 463 | Met-1 to Gly-7. | | |
| 37 | HBJFK45 | 531919 | 47 | 430-456 | 464 | | | |
| 38 | HBJIG20 | 866159 | 48 | 321-554 | 465 | | | |
| 39 | HBJKD16 | 853358 | 49 | 78-173 | 466 | | 2p14 | 203800 |
| 40 | HBMBM96 | 561935 | 50 | 170-184 | 467 | | | |
| 41 | HBMBX01 | 705047 | 51 | 363-449 | 468 | | | |
| 42 | HBMTM11 | 589515 | 52 | 125-220 | 469 | | | |
| 43 | HBMTX26 | 695704 | 53 | 107-376 | 470 | | | |
| 44 | HBMTY48 | 637521 | 54 | 660-944 | 471 | Glu-35 to Pro-50. | | |
| 45 | HBMUH74 | 866160 | 55 | 344-430 | 472 | | 12p11.22 | 112410, 135700, 168470, 200990 |
| 46 | HBMWE61 | 778066 | 56 | 238-267 | 473 | | Xp11.22- | 300008, 300008, 300008, 300008, |
| | | | | | | | p11.21 | 300047, 301000, 301000, 301300, |
| | | | | | | | | 301830, 305400, 308300, 309470, |
| | | | | | | | | 309500, 309610, 311050 |
| 47 | HBNBJ76 | 810332 | 57 | 1603-1809 | 474 | Arg-59 to Ser-64. | 7p13-p12 | 138079, 138079, 165240, 165240, |
| | | | | | | | | 165240, 180104, 203740, 219800, |
| | | | | | | | | 261670, 601649 |
| 48 | HBQAC57 | 793814 | 58 | 146-235 | 475 | | | |
| 49 | HBSAK32 | 856387 | 59 | 447-590 | 476 | | 20p13 | 192340, 234200 |
| 50 | HBXCM66 | 639039 | 60 | 119-169 | 477 | | | |
| 51 | HBXCX15 | 637542 | 61 | 72-77 | 478 | | | |
| 52 | HCDCY76 | 837972 | 62 | 860-967 | 479 | Pro-20 to Phe-25. | 11q14-q21 | 133780, 203100, 203100, 245000 |
| 53 | HCDDL48 | 839743 | 63 | 333-455 | 480 | Thr-26 to Tyr-38. | | |
| 54 | HCE1G78 | 761204 | 64 | 77-841 | 481 | Asp-20 to Thr-26, | 22q11.2- | 123620, 138720, 145410, 188826, |
| | | | | | | Leu-30 to Gly-38, | q13.2 | 231950, 239500, 275350, 600850 |
| | | | | | | Asp-63 to Phe-72, | | |
| | | | | | | Gly-160 to Trp-175, | | |
| | | | | | | Gly-189 to Ser-197, | | |
| | | | | | | Thr-214 to Val-221. | | |
| 55 | HCE2H52 | 847007 | 65 | 29-100 | 482 | | | |
| 56 | HCE3B04 | 831151 | 66 | 1588-1686 | 483 | | 1q32.2 | 145260, 600759, 601975 |
| 57 | HCE5F78 | 838101 | 67 | 566-664 | 484 | Tyr-21 to Lys-30. | | |
| 58 | HCEEE79 | 560609 | 68 | 131-298 | 485 | Gly-35 to Pro-41. | | |
| 59 | HCEEQ25 | 531784 | 69 | 111-182 | 486 | Met-14 to Asn-19. | | |
| 60 | HCEEU18 | 688041 | 70 | 209-340 | 487 | | | |
| 61 | HCEFG93 | 745400 | 71 | 166-207 | 488 | | | |
| 62 | HCEFZ82 | 831745 | 72 | 215-1012 | 489 | Tyr-30 to Gln-35, | 3p23-cen | |
| | | | | | | Asn-114 to Lys-119, | | |
| | | | | | | Ser-161 to Ala-171, | | |
| | | | | | | Arg-183 to Gly-189, | | |
| | | | | | | Pro-205 to Ala-211, | | |
| | | | | | | Lys-231 to Trp-237, | | |
| | | | | | | Gly-246 to Lys-265. | | |
| 63 | HCEGG08 | 844506 | 73 | 1114-1197 | 490 | | | |
| 64 | HCEGX05 | 827060 | 74 | 237-284 | 491 | Pro-4 to Phe-11. | 20q13 | 600281, 600281 |
| 65 | HGFLN88 | 610000 | 75 | 101-178 | 492 | | 7q11.23 | 116860, 129900, 233700, 600079 |
| 66 | HCFLT90 | 788578 | 76 | 527-532 | 493 | | | |
| 67 | HCLBK61 | 845659 | 77 | 1050-1139 | 494 | | 19p13.12 | 143890, 151440, 600276, 601843 |
| 68 | HCQCC96 | 845066 | 78 | 782-919 | 495 | | | |
| 69 | HCQCJ56 | 832157 | 79 | 728-733 | 496 | | | |
| 70 | HCRAY10 | 695709 | 80 | 141-578 | 497 | | | |
| 71 | HCRBF72 | 828945 | 81 | 191-823 | 498 | Gln-43 to Asn-49, | 1p36 | 118210, 120550, 120570, 120575, |
| | | | | | | Glu-59 to Gln-65, | | 121800, 130500, 133200, 155600, |
| | | | | | | Lys-90 to Val-95, | | 171760, 171760, 185470, 211420, |
| | | | | | | Glu-205 to Ser-211. | | 230350, 255800, 601990, 602023, |
| | | | | | | | | 602771 |
| 72 | HCRNF78 | 793774 | 82 | 363-503 | 499 | | | |
| 73 | HCUAF85 | 589520 | 83 | 230-595 | 500 | | | |
| 74 | HCUCF89 | 637986 | 84 | 189-278 | 501 | Gly-14 to Asp-21. | | |
| 75 | HCUCK44 | 790277 | 85 | 598-780 | 502 | | 19q13.1 | 164731, 172400, 172400, 180901, |
| | | | | | | | | 180901, 221770, 248600, 600918, |
| | | | | | | | | 602716 |
| 76 | HCUDD64 | 835082 | 86 | 256-402 | 503 | Met-1 to Ser-6, | 19p13.3 | 108725, 120700, 133171, 136836, |
| | | | | | | Gln-32 to Asn-39. | | 145981, 147141, 164953, 188070, |
| | | | | | | | | 600957, 601238, 601846, 602216, |
| | | | | | | | | 602477 |
| 77 | HCWAE64 | 535893 | 87 | 410-427 | 504 | | | |
| 78 | HCWFU39 | 651316 | 88 | 282-350 | 505 | | 8q23.2 | |
| 79 | HDHAA42 | 695710 | 89 | 48-128 | 506 | | 11p13 | 102772, 106210, 106210, 106210, |
| | | | | | | | | 106210, 107271, 114550, 115500, |
| | | | | | | | | 136530, 151390, 179615, 179615, |
| | | | | | | | | 179616, 180385, 194070, 194070, |
| | | | | | | | | 194070, 245349 |
| 80 | HDHEB76 | 553622 | 90 | 416-454 | 507 | | | |
| 81 | HDPCW16 | 840358 | 91 | 172-339 | 508 | Met-1 to Ser-7. | 11q12- | 106100, 133780, 147050, 259700, |
| | | | | | | | q13.1 | 259770, 600045, 601650, 601884 |
| 82 | HDPDI72 | 897277 | 92 | 23-385 | 509 | Arg-63 to Phe-72, | | |
| | | | | | | Ile-114 to Phe-120. | | |
| 83 | HDPDJ58 | 587265 | 93 | 279-341 | 510 | | | |
| 84 | HDPFU43 | 790189 | 94 | 220-378 | 511 | | 22q12.1 | 123620, 188826, 600850, 601669 |
| 85 | HDPFY18 | 779450 | 95 | 161-184 | 512 | | | |
| 86 | HDPIE44 | 899328 | 96 | 169-351 | 513 | | | |
| 87 | HDPIU94 | 813352 | 97 | 208-279 | 514 | | 8p21.1 | 138300, 240400, 602629 |
| 88 | HDPOL37 | 745377 | 98 | 189-377 | 515 | Met-1 to Arg-8, | | |
| | | | | | | Gly-29 to Glu-36. | | |
| 89 | HDPOO76 | 838594 | 99 | 109-159 | 516 | | | |
| 90 | HDPPD93 | 637588 | 100 | 28-66 | 517 | | | |
| 91 | EDPPW82 | 778405 | 101 | 395-484 | 518 | | | |
| 92 | HDPXN20 | 801896 | 102 | 61-186 | 519 | Glu-21 to Leu-26, | | |
| | | | | | | Pro-34 to Ser-41. | | |
| 93 | HDTAU35 | 838139 | 103 | 260-313 | 520 | | | |
| 94 | HDTAV54 | 801898 | 104 | 191-292 | 521 | Thr-20 to Gly-26. | 7q35 | 118425, 118425, 118425, 152427, |
| | | | | | | | | 180105, 276000, 276000, 600510 |
| 95 | HDTFX18 | 801957 | 105 | 164-226 | 522 | | | |
| 96 | HDTGW48 | 827285 | 106 | 375-464 | 523 | | | |
| 97 | HE2CH58 | 838140 | 107 | 321-479 | 524 | | | |
| 98 | HE2HC60 | 753265 | 108 | 273-392 | 525 | Thr-26 to Gln-31. | 1q42.2 | |
| | | | | | | | | 106150, 106150, 214500, 600996, |
| | | | | | | | | 601975, 602759 |
| 99 | HE2PO93 | 771655 | 109 | 770-898 | 526 | | 3p21.3 | 116806, 120120, 120120, 120120, |
| | | | | | | | | 120436, 120436, 120436, 138320, |
| | | | | | | | | 168468, 182280, 600163 |
| 100 | HE6AU52 | 562782 | 110 | 41-166 | 527 | Gln-17 to Arg-24. | | |
| 101 | HE6CS65 | 762960 | 111 | 295-483 | 528 | Trp-50 to Leu-55. | 1q23.2 | 107300, 131210, 136132, 145001, |
| | | | | | | | | 173610, 249270, 601652 |
| 102 | HE6EY13 | 847058 | 112 | 171-311 | 529 | Thr-32 to Leu-37. | 17p13 | 138190, 254210, 271900, 600179, |
| | | | | | | | | 600977, 601202, 601777 |
| 103 | HB6FV29 | 588454 | 113 | 210-311 | 530 | | | |
| 104 | HE8BQ49 | 589443 | 114 | 133-168 | 531 | | | |
| 105 | HE8SG96 | 862016 | 115 | 118-192 | 532 | Tyr-16 to Gln-23. | | |
| 106 | HB8TY46 | 899528 | 116 | 1413-1976 | 533 | | 11p11.2- | 133701, 168500, 171650, 176930, |
| | | | | | | | p11.12 | 176930, 600623, 600811, 600958 |
| 107 | HE9GG20 | 633719 | 117 | 319-348 | 534 | | | |
| 108 | HEBCI18 | 831464 | 118 | 855-1064 | 535 | Val-40 to Cys-45, | 2q14.2 | 165320 |
| | | | | | | Lys-58 to Thr-64. | | |
| 109 | HEBDP77 | 692347 | 119 | 681-791 | 536 | | | |
| 110 | HEBDQ91 | 840288 | 120 | 1211-1336 | 537 | | | |
| 111 | HEBFR46 | 847064 | 121 | 200-289 | 538 | Met-1 to Thr-6. | | |
| 112 | HEBGE07 | 798096 | 122 | 106-234 | 539 | | | |
| 113 | HEBGE23 | 836129 | 123 | 153-398 | 540 | | 19q13.2 | 107741, 113900, 122720, 122720, |
| | | | | | | | | 126340, 126391, 160900, 164731, |
| | | | | | | | | 173850, 207750, 248600, 258501 |
| 114 | HELAT35 | 693175 | 124 | 215-277 | 541 | | | |
| 115 | BELBU54 | 637624 | 125 | 82-135 | 542 | | | |
| 116 | HEMEY47 | 834491 | 126 | 440-472 | 543 | | | |
| 117 | HEOMC46 | 866171 | 127 | 154-309 | 544 | Ser-5 to Thr-10, | | |
| | | | | | | Cys-36 to Glu-51. | | |
| 118 | HEPBA14 | 855935 | 128 | 664-711 | 545 | | | |
| 119 | HEQAH80 | 701984 | 129 | 150-248 | 546 | | | |
| 120 | HBQBF89 | 786205 | 130 | 306-458 | 547 | Glu-17 to Gly-22, | | |
| | | | | | | Arg-29 to Phe-36. | | |
| 121 | HETCI16 | 844543 | 131 | 237-359 | 548 | Met-1 to Trp-9. | | |
| 122 | HETDW58 | 790557 | 132 | 541-609 | 549 | | 4.p11 | |
| 123 | HETEY67 | 704077 | 133 | 292-492 | 550 | | 9q22.31 | 278700, 602088 |
| 124 | HFCDW95 | 847383 | 134 | 151-159 | 551 | | 7q11.23 | 116860, 129900, 233700, 600079 |
| 125 | HFCFD04 | 824057 | 135 | 170-217 | 552 | Phe-2 to Trp-7. | 3p23 | 182280, 227646, 261510, 600163, |
| | | | | | | | | 601154 |
| 126 | HFCFB20 | 701985 | 136 | 216-272 | 553 | | 10q26 | 176943, 176943, 176943, 176943, |
| | | | | | | | | 176943, 258870, 263700, 601969, |
| | | | | | | | | 601969, 602084 |
| 127 | HFEAY59 | 658685 | 137 | 154-276 | 554 | Arg-2 to Lys-8, | | |
| | | | | | | Arg-22 to Lys-31. | | |
| 128 | HFEBO17 | 852218 | 138 | 136-219 | 555 | | | |
| 129 | HFIJA29 | 839206 | 139 | 175-423 | 556 | Ser-36 to Ser-42, | | |
| | | | | | | Lys-54 to Ser-69. | | |
| 130 | HFIJA68 | 847074 | 140 | 283-414 | 557 | | | |
| 131 | HFKES05 | 827572 | 141 | 243-371 | 558 | Ile-26 to Ala-42. | | |
| 132 | HFKRU12 | 634006 | 142 | 6-173 | 559 | Pro-18 to Thr-55. | | |
| 133 | HFKFX64 | 566835 | 143 | 127-171 | 560 | | 18q11 | 114400, 257220, 257220 |
| 134 | HFPDR62 | 839400 | 144 | 414-521 | 561 | | | |
| 135 | BFPDS07 | 821646 | 145 | 2546-2623 | 562 | | 2q32-q34 | 100690, 100730, 118800, 123660, |
| | | | | | | | | 135600, 142989, 156232, 157655, |
| | | | | | | | | 178600, 186860, 201460, 205100, |
| | | | | | | | | 262000, 278250, 600258, 601277, |
| | | | | | | | | 601318 |
| 136 | HFTAS49 | 847386 | 146 | 249-320 | 563 | | 6p21.2 | 150270, 248611, 601690 |
| 137 | HFTBM38 | 638338 | 147 | 577-669 | 564 | | | |
| 138 | HFTDH56 | 862021 | 148 | 67-99 | 565 | | 4q11 | 103600, 103600, 103600, 104150, |
| | | | | | | | | 104150, 104500, 170650 |
| 139 | HFVGK35 | 731868 | 149 | 14-31 | 566 | | | |
| 140 | HFXAV37 | 626595 | 150 | 163-273 | 567 | | | |
| 141 | HFXBT66 | 580831 | 151 | 172-252 | 568 | | | |
| 142 | HGBER72 | 826710 | 152 | 43-102 | 569 | | | |
| 143 | HGBEY14 | 658691 | 153 | 233-352 | 570 | | | |
| 144 | HHEGS55 | 858372 | 154 | 159-269 | 571 | | | |
| 145 | HHEOW19 | 886174 | 155 | 183-377 | 572 | Ala-41 to Pro-57. | 1q42 | 106150, 106150, 145260, 173870, |
| | | | | | | | | 173870, 600759, 600996, 601744, |
| | | | | | | | | 601975 |
| 146 | HHFEB79 | 1300768 | 156 | 120-2390 | 573 | Ala-31 to Val-38, | | |
| | | | | | | Pro-63 to Gly-68, | | |
| | | | | | | Gly-74 to Cys-87, | | |
| | | | | | | Pro-93 to Asp-104, | | |
| | | | | | | Arg-109 to Ser-121, | | |
| | | | | | | Gln-128 to Thr-133, | | |
| | | | | | | Thr-148 to Ser-163, | | |
| | | | | | | Pro-170 to Leu-179, | | |
| | | | | | | Val-183 to Ser-195, | | |
| | | | | | | Pro-202 to Asp-219, | | |
| | | | | | | Thr-243 to Lys-287, | | |
| | | | | | | Leu-290 to Thr-307, | | |
| | | | | | | Pro-309 to Ala-323, | | |
| | | | | | | Pro-325 to Glu-331, | | |
| | | | | | | Ser-333 to Lys-341, | | |
| | | | | | | Lys-347 to Lys-354, | | |
| | | | | | | Pro-364 to Ser-376, | | |
| | | | | | | Ser-386 to Thr-399, | | |
| | | | | | | Leu-402 to Pro-407, | | |
| | | | | | | Pro-415 to Asp-438, | | |
| | | | | | | Lys-444 to Ser-451, | | |
| | | | | | | Lys-467 to Ser-479, | | |
| | | | | | | Ser-500 to Thr-518, | | |
| | | | | | | Pro-524 to Asn-529, | | |
| | | | | | | Gly-538 to Gly-545, | | |
| | | | | | | Ser-552 to Phe-558, | | |
| | | | | | | Val-569 to Asp-575, | | |
| | | | | | | Val-583 to Asp-590, | | |
| | | | | | | Arg-618 to Trp-628, | | |
| | | | | | | Glu-630 to Pro-635, | | |
| | | | | | | Pro-642 to Ala-652, | | |
| | | | | | | Ser-654 to Thr-660, | | |
| | | | | | | Glu-708 to Pro-713, | | |
| | | | | | | Ala-715 to Trp-732, | | |
| | | | | | | Thr-738 to His-751. | | |
| | HHFBB79 | 863749 | 403 | 715-2430 | 820 | Ala-31 to Val-38, | | |
| | | | | | | Pro-63 to Gly-68, | | |
| | | | | | | Gly-74 to Cys-87, | | |
| | | | | | | Pro-93 to Asp-104, | | |
| | | | | | | Arg-109 to Ser-121, | | |
| | | | | | | Gln-128 to Thr-133, | | |
| | | | | | | Thr-148 to Ser-163, | | |
| | | | | | | Pro-170 to Leu-179, | | |
| | | | | | | Val-183 to Glu-188. | | |
| 147 | HHFFF87 | 778071 | 157 | 229-354 | 574 | Ser-5 to Gly-11, | 12q13.2- | 120140, 120140, 120140, 120140, |
| | | | | | | Pro-25 to Tyr-31. | q13.3 | 120140, 120140, 120140, 126337, |
| | | | | | | | | 181430, 232800, 600808, 601284, |
| | | | | | | | | 601769, 601769, 602116 |
| 148 | HHFFL34 | 753230 | 158 | 42-713 | 575 | Asn-146 to Arg-157, | | |
| | | | | | | Leu-168 to Asn-183, | | |
| | | | | | | Gln-189 to Asn-199, | | |
| | | | | | | Gln-206 to Ser-217. | | |
| 149 | HHFFS40 | 824059 | 159 | 37-180 | 576 | | 5p14.1 | 123000 |
| 150 | HHGCS78 | 634605 | 160 | 290-364 | 577 | | 17q11.1 | 182138, 600881, 601954 |
| 151 | HHGDT26 | 658692 | 161 | 181-207 | 578 | | | |
| 152 | HHPFP26 | 753269 | 162 | 24-266 | 579 | Trp-46 to Pro-52, | 14q23.1 | 107970, 182600, 182870, 182870, |
| | | | | | | Val-67 to Gly-72. | | 182870 |
| 153 | HHPFU28 | 824573 | 163 | 156-239 | 580 | Ser-12 to Tyr-17. | 4q12 | 103600, 103600, 103600, 104150, |
| | | | | | | | | 104150, 104500, 164920, 164920, |
| | | | | | | | | 164920, 170650, 600900 |
| 154 | HRPSA85 | 658695 | 164 | 157-273 | 581 | | | |
| 155 | HHSBI65 | 801910 | 165 | 62-229 | 582 | Ala-16 to Val-35. | 8q24.3 | 188450, 188450, 188450 |
| 156 | HHSDI53 | 862028 | 166 | 221-295 | 583 | | | |
| 157 | HHSFC09 | 801911 | 167 | 380-478 | 584 | | 2q36.1 | 120070, 120131, 120131, 138030, |
| | | | | | | | | 259900 |
| 158 | HJMAA03 | 824062 | 168 | 527-556 | 585 | | | |
| 159 | HJMAV41 | 862029 | 169 | 207-290 | 586 | | 19p12 | 601843 |
| 160 | HJMAY90 | 793678 | 170 | 2492-2596 | 587 | | 5q35.3 | |
| 161 | HJPBE39 | 801960 | 171 | 170-226 | 588 | | 11q22.1 | 133780, 602574, 602574 |
| 162 | HIPBK28 | 638191 | 172 | 256-387 | 589 | | 16q13 | 114835, 132700, 172490, 600968 |
| 163 | HJPCH08 | 840365 | 173 | 374-727 | 590 | Glu-3 to Phe-9, | | |
| | | | | | | Gln-17 to Leu-50. | | |
| 164 | HKABU43 | 838573 | 174 | 755-1600 | 591 | Ile-69 to Ala-74, | | |
| | | | | | | Ala-122 to Ser-129, | | |
| | | | | | | Thr-160 to Glu-170, | | |
| | | | | | | Lys-197 to Arg-202. | | |
| 165 | HKACI79 | 853361 | 175 | 207-359 | 592 | Ser-37 to Gly-43. | | |
| 166 | HKAFF50 | 790192 | 176 | 343-495 | 593 | Leu-19 to Gln-29. | | |
| 167 | HKGBF25 | 738797 | 177 | 261-371 | 594 | | | |
| 168 | HKMLM95 | 840367 | 178 | 390-404 | 595 | | | |
| 169 | HLDBG17 | 855953 | 179 | 184-309 | 596 | Leu-29 to His-34. | | |
| 170 | HLDQU79 | 740755 | 180 | 99-1142 | 597 | Leu-68 to Lys-74, | | |
| | | | | | | Tyr-109 to Lys-115, | | |
| | | | | | | Gln-200 to Val-205, | | |
| | | | | | | Lys-207 to Lys-214, | | |
| | | | | | | Glu-237 to Ile-244, | | |
| | | | | | | Ala-271 to Thr-279, | | |
| | | | | | | Ser-317 to Ser-329, | | |
| | | | | | | Gln-342 to Gly-348. | | |
| | HLDQU79 | 837599 | 404 | 75-1121 | 821 | | | |
| 171 | HLDRT09 | 830544 | 181 | 522-719 | 598 | Ser-18 to Ser-30. | 2q36 | 120070, 120131, 120131, 138030, |
| | | | | | | | | 147545, 259900, 262000 |
| 172 | HLHBS54 | 837503 | 182 | 73-1101 | 599 | Glu-25 to Glu-36, | | |
| | | | | | | Thr-51 to Asp-57, | | |
| | | | | | | Leu-117 to Gly-129. | | |
| 173 | HLHCS23 | 560663 | 183 | 25-129 | 600 | | | |
| 174 | HLIBO72 | 883431 | 184 | 167-550 | 601 | | | |
| 175 | HLIQE88 | 840321 | 185 | 708-716 | 602 | | 4q28 | 107250, 134820, 134820, 134820, |
| | | | | | | | | 134830, 134850, 134850, 181600, |
| | | | | | | | | 189800, 266300 |
| 176 | BLICO10 | 658740 | 186 | 441-659 | 603 | Pro-30 to Asn-42, | 20q13.13 | 602025 |
| | | | | | | Ser-49 to Val-55, | | |
| | | | | | | Ser-67 to Ser-72. | | |
| 177 | HLJBS28 | 658742 | 187 | 359-412 | 604 | | Xq26.1- | 300123, 301201, 301590, 301845, |
| | | | | | | | q27.2 | 301900, 304340, 306900, 307150, |
| | | | | | | | | 307700, 308000, 308000, 309000, |
| | | | | | | | | 310490, 313850 |
| 178 | HLMJB64 | 658699 | 188 | 12-161 | 605 | Ser-6 to Gly-11. | 20q11.1- | |
| | | | | | | | q11.23 | |
| 179 | HLMMX62 | 688051 | 189 | 185-268 | 606 | Gln-20 to Lys-28. | | |
| 180 | HLQAS12 | 886180 | 190 | 305-343 | 607 | | 12p13.2- | 103950, 200990, 601458, 602096 |
| | | | | | | | p12.3 | |
| 181 | HLQCX36 | 584786 | 191 | 89-247 | 608 | Pro-35 to Ser-40. | | |
| 182 | HLWAF06 | 658701 | 192 | 192-284 | 609 | | | |
| 183 | HLWAV47 | 897769 | 193 | 200-298 | 610 | | 1q41 | 145260, 276901, 600332, 600759, |
| | | | | | | | | 601744, 601975 |
| 184 | HLWBB73 | 740757 | 194 | 122-274 | 611 | | | |
| 185 | HLWCN37 | 827294 | 195 | 81-212 | 612 | | 4q11-q12 | 103600, 103600, 103600, 104150, |
| | | | | | | | | 104150, 104500, 164920, 164920, |
| | | | | | | | | 164920, 170650, 600900 |
| 186 | HLWDB73 | 838453 | 196 | 95-202 | 613 | | 1q32.2 | 145260, 600759, 601975 |
| 187 | HLYAR30 | 781249 | 197 | 562-852 | 614 | Ala-2 to Arg-10, | | |
| | | | | | | Arg-77 to Arg-97. | | |
| 188 | HLYDO73 | 584787 | 198 | 233-271 | 615 | | | |
| 189 | HLYEU59 | 582084 | 199 | 258-389 | 616 | | | |
| 190 | HLYGB19 | 838083 | 200 | 1863-1907 | 617 | | 2p23.3 | 176830, 176830, 182601, 229800, |
| | | | | | | | | 602134 |
| 191 | HLYGE16 | 651339 | 201 | 406-627 | 618 | Arg-23 to Trp-42, | 7q32.2 | 180105, 222800 |
| | | | | | | Val-52 to Pro-61. | | |
| 192 | HMCFH60 | 654853 | 202 | 211-357 | 619 | | 6pter- | |
| | | | | | | | p24.1 | |
| 193 | HMDAB29 | 584789 | 203 | 97-177 | 620 | | | |
| 194 | HMDAD44 | 566854 | 204 | 135-161 | 621 | | | |
| 195 | HMEDE24 | 837027 | 205 | 900-1001 | 622 | Asn-17 to Asn-22, | 6p25.1 | |
| | | | | | | Arg-27 to Lys-33. | | |
| 196 | HMIAK10 | 562774 | 206 | 195-290 | 623 | | | |
| 197 | HMICI80 | 827318 | 207 | 1149-1247 | 624 | Gln-13 to Tyr-20. | | |
| 198 | HMICP65 | 847403 | 208 | 249-341 | 625 | | | |
| 199 | HMJAK70 | 610099 | 209 | 273-305 | 626 | | | |
| 200 | HMQAI38 | 589964 | 210 | 24-86 | 627 | | | |
| 201 | HMSBE04 | 709672 | 211 | 295-378 | 628 | | 3p24.3- | 154705, 182280, 190160, 227646, |
| | | | | | | | p22.1 | 261510, 600163, 601154 |
| 202 | HMSCL38 | 801919 | 212 | 120-227 | 629 | | | |
| 203 | HMSHC86 | 840402 | 213 | 37-318 | 630 | Arg-32 to Gln-37, | | |
| | | | | | | Arg-68 to Phe-73. | | |
| 204 | HMSHU20 | 847410 | 214 | 50-391 | 631 | Ser-2 to Trp-7, | | |
| | | | | | | Gln-44 to Lys-53, | | |
| | | | | | | Ser-80 to Gly-88. | | |
| 205 | HMSHY25 | 886183 | 215 | 656-763 | 632 | His-1 to Gln-6, | | |
| | | | | | | Glu-28 to Pro-35. | | |
| 206 | HMTAB77 | 847411 | 216 | 769-915 | 633 | Gly-3 to Thr-8. | 1p13.2 | 102770, 164790, 601414, 601691, |
| | | | | | | | | 601691, 601691, 601691, 601718, |
| | | | | | | | | 602094 |
| 207 | HMUAE26 | 747403 | 217 | 710-802 | 634 | Ser-25 to Arg-30. | 3q21.2 | 106165, 117700, 117700,150210, |
| | | | | | | | | 169600, 180380, 180380, 180380, |
| | | | | | | | | 203500, 232050, 276902, 600882, |
| | | | | | | | | 601199, 601199, 601199, 601471, |
| | | | | | | | | 601682 |
| 208 | HMVDU15 | 801969 | 218 | 274-351 | 635 | | | |
| 209 | HMWCG28 | 847413 | 219 | 78-200 | 636 | | 12p13.3 | 103950, 193100, 193400, 200990, |
| | | | | | | | | 601458 |
| 210 | HNEGL22 | 799541 | 220 | 472-576 | 637 | | 8p21.2 | 602629 |
| 211 | HNECW49 | 639117 | 221 | 316-489 | 638 | Cys-21 to Trp-26, | | |
| | | | | | | Val-37 to Ser-53. | | |
| 212 | HNEDH88 | 815675 | 222 | 70-171 | 639 | Lys-22 to Gly-27. | | |
| 213 | HNFAC50 | 815676 | 223 | 676-774 | 640 | Lys-7 to Glu-18. | | |
| 214 | HNFCY57 | 877653 | 224 | 317-2206 | 641 | Leu-15 to Leu-25, | 1q44 | 601975 |
| | | | | | | Arg-47 to His-53, | | |
| | | | | | | Glu-130 to Asn-138, | | |
| | | | | | | Pro-140 to Ser-148, | | |
| | | | | | | Asn-157 to Lys-163, | | |
| | | | | | | Asn-178 to Lys-187, | | |
| | | | | | | Pro-281 to Arg-292, | | |
| | | | | | | Leu-341 to Leu-346, | | |
| | | | | | | Lys-471 to Cys-477, | | |
| | | | | | | Arg-513 to Gly-521, | | |
| | | | | | | Gly-570 to Gly-575, | | |
| | | | | | | Leu-614 to Glu-620. | | |
| 215 | HNGAM58 | 688114 | 225 | 68-412 | 642 | Trp-31 to Arg-39, | | |
| | | | | | | Ala-50 to Trp-57, | | |
| | | | | | | Lys-83 to Leu-93, | | |
| | | | | | | Pro-103 to Gly-113. | | |
| 216 | HNGBH53 | 532614 | 226 | 47-187 | 643 | Asn-14 to Glu-24. | | |
| 217 | HNGDX18 | 1145071 | 227 | 237-965 | 644 | Ser-21 to Ser-39, | | |
| | | | | | | Gln-45 to Gln-61, | | |
| | | | | | | Cys-124 to Ser-139. | | |
| | HNGDX18 | 866177 | 405 | 231-629 | 822 | Ser-21 to Ser-39, | | |
| | | | | | | Gln-45 to Gln-61, | | |
| | | | | | | Cys-124 to Gly-130. | | |
| 218 | HNGDY34 | 566863 | 228 | 73-126 | 645 | | | |
| 219 | HNGEQ75 | 535723 | 229 | 30-98 | 646 | | 12q24.12 | 160781, 181405 |
| 220 | HNGFR54 | 695748 | 230 | 73-231 | 647 | Trp-6 to Tyr-11. | | |
| 221 | HNGGA68 | 638116 | 231 | 184-282 | 648 | Ala-8 to Gly-20. | | |
| 222 | HNGGP65 | 597449 | 232 | 181-387 | 649 | | | |
| 223 | HNGHK37 | 609889 | 233 | 234-272 | 650 | | | |
| 224 | HNGHZ69 | 899289 | 234 | 25-54 | 651 | | | |
| 225 | HNGIV64 | 561572 | 235 | 221-247 | 652 | | | |
| 226 | HNGJB41 | 852178 | 236 | 252-473 | 653 | | 22q12.2 | 101000, 101000, 101000, 101000, |
| | | | | | | | | 123620, 138981, 188826, 600850, |
| | | | | | | | | 601669 |
| 227 | HNGKT41 | 836061 | 237 | 415-552 | 654 | | | |
| 228 | HNGNK44 | 834949 | 238 | 611-835 | 655 | Ser-41 to Ser-48, | | |
| | | | | | | Arg-61 to Trp-68. | | |
| 229 | HANGNO53 | 836063 | 239 | 467-571 | 656 | | | |
| 230 | HNGPJ25 | 834942 | 240 | 544-621 | 657 | | | |
| 231 | HNHBN82 | 836157 | 241 | 78-131 | 658 | | | |
| 232 | HNHFE71 | 834487 | 242 | 598-663 | 659 | | | |
| 233 | HNHGK22 | 597451 | 243 | 239-433 | 660 | | | |
| 234 | HNHHB10 | 634589 | 244 | 215-394 | 661 | Pro-40 to Tyr-46. | | |
| 235 | HNHKS19 | 778392 | 245 | 192-317 | 662 | Pro-23 to Gln-34. | | |
| 236 | HNTMH79 | 801921 | 246 | 48-164 | 663 | | | |
| 237 | HODAG07 | 655356 | 247 | 43-174 | 664 | Tyr-37 to Leu-43. | | |
| 238 | HODBB70 | 520196 | 248 | 173-256 | 665 | | | |
| 239 | HODCZ32 | 836069 | 249 | 248-280 | 666 | | | |
| 240 | HOFAA78 | 836646 | 250 | 48-263 | 667 | Trp-1 to Arg-7, | 19q13.33 | 134790, 600040 |
| | | | | | | Pro-65 to Gly-70. | | |
| 241 | HOFMO16 | 596835 | 251 | 149-607 | 668 | Arg-138 to Arg-143. | 16p12- | 108730, 147781, 172471, 182381, |
| | | | | | | | p11.2 | 186580, 266600, 600760, 600760, |
| | | | | | | | | 600761, 600761, 602066 |
| 242 | HOFNU55 | 897611 | 252 | 230-385 | 669 | | 16q13 | 114835, 132700, 172490, 600968 |
| 243 | HOGBF01 | 772573 | 253 | 309-371 | 670 | | | |
| 244 | HOHBO66 | 853375 | 254 | 338-403 | 671 | | | |
| 245 | HORBS82 | 638293 | 255 | 21-140 | 672 | Gly-30 to Ser-35. | | |
| 246 | HORBV76 | 839270 | 256 | 183-779 | 673 | Gly-25 to Leu-38, | | |
| | | | | | | Asp-56 to Gly-65, | | |
| | | | | | | Ser-115 to Lys-121. | | |
| 247 | HOSEC25 | 688055 | 257 | 17-91 | 674 | Thr-19 to Cys-24. | | |
| 248 | HOSEI81 | 562778 | 258 | 203-454 | 675 | Lys-70 to Asn-76. | 12q12-q13 | 107777, 123940, 139350, 139350, 148040, |
| | | | | | | | | 148041, 148043, 148070, 231550, 600194, |
| | | | | | | | | 600231, 600536, 600808, 600956, 601284, |
| | | | | | | | | 601769, 601769, 601928, 602116, 602153 |
| 249 | HOSEJ94 | 795132 | 259 | 848-934 | 676 | | 15q24.3 | 231680, 276700 |
| 250 | HOUCA21 | 655359 | 260 | 200-301 | 677 | | | |
| 251 | HOUDE92 | 580866 | 261 | 70-336 | 678 | Pro-22 to His-31, | | |
| | | | | | | Ser-80 to Gln-88. | | |
| 252 | HOUDR07 | 745404 | 262 | 170-367 | 679 | Pro-27 to Arg-34. | 19p13.3 | 108725, 120700, 133171, 136836, |
| | | | | | | | | 145981, 147141, 164953, 188070, |
| | | | | | | | | 600957, 601238, 601846, 602216, |
| | | | | | | | | 602477 |
| 253 | HOUED72 | 858547 | 263 | 144-179 | 680 | | | |
| 254 | HOUFS04 | 771564 | 264 | 520-738 | 681 | | 13q12.3 | 157900, 600185, 600185 |
| 255 | HOUHI25 | 888279 | 265 | 188-250 | 682 | | 7q22.2 | 126650, 126650 |
| 256 | HOVBD85 | 827362 | 266 | 252-332 | 683 | | | |
| 257 | HPCAB41 | 758003 | 267 | 184-261 | 684 | | | |
| 258 | HPCAL26 | 762822 | 268 | 1021-1113 | 685 | | 12 | |
| 259 | HPFBA54 | 635539 | 269 | 258-395 | 686 | | | |
| 260 | HPFCI36 | 855966 | 270 | 94-153 | 687 | | 10q23.31 | 157640, 174900, 236730, 600512 |
| 261 | HPIAA80 | 829972 | 271 | 314-427 | 688 | | | |
| 262 | HPJBU43 | 862058 | 272 | 242-295 | 689 | | | |
| 263 | HPMBX22 | 702012 | 273 | 211-270 | 690 | | | |
| 264 | HPMCJ84 | 562779 | 274 | 83-199 | 691 | | | |
| 265 | HPMCV30 | 612870 | 275 | 52-195 | 692 | Leu-39 to His-47. | | |
| 266 | HPMFH77 | 702014 | 276 | 251-358 | 693 | Pro-29 to Cys-35. | | |
| 267 | HPQCB83 | 740761 | 277 | 85-189 | 694 | | | |
| 268 | HPRCA64 | 824074 | 278 | 1810-1929 | 695 | | 2q32 | 100690, 142989, 156232, 178600, |
| | | | | | | | | 278250, 600258 |
| 269 | HPRCM72 | 813512 | 279 | 281-607 | 696 | Arg-76 to Lys-91. | | |
| 270 | HPTRE80 | 884167 | 280 | 102-665 | 697 | Gly-35 to Ser-40, | 22q13.33 | |
| | | | | | | Ser-61 to Arg-72, | | |
| | | | | | | Pro-148 to Arg-172. | | |
| 271 | HPTRI42 | 655362 | 281 | 266-481 | 698 | Pro-19 to Pro-26, | 11q13.1 | 106100, 133780, 601650 |
| | | | | | | Gly-33 to Ser-38, | | |
| | | | | | | Gly-45 to Tyr-52, | | |
| | | | | | | Ser-65 to Ser-71. | | |
| 272 | HPTRM02 | 812879 | 282 | 885-1127 | 699 | His-48 to Ser-61, | 7 | |
| | | | | | | Ala-66 to Val-72. | | |
| 273 | HPTRQ52 | 655363 | 283 | 224-325 | 700 | | 1p34 | 130500, 133200, 138140, 168360, |
| | | | | | | | | 171760, 171760, 176100, 176100, |
| | | | | | | | | 178300, 230000, 255800 |
| 274 | HPTVI96 | 636064 | 284 | 271-291 | 701 | | 16p13.3 | 141750, 141800, 141800, 141800, |
| | | | | | | | | 141800, 141850, 141850, 141850, |
| | | | | | | | | 141850, 141850, 156850, 186580, |
| | | | | | | | | 191092, 600140, 600273, 601313, |
| | | | | | | | | 601785 |
| 275 | HPWBA29 | 561956 | 285 | 194-235 | 702 | | | |
| 276 | HPWDK06 | 839825 | 286 | 405-485 | 703 | | | |
| 277 | HRAAD30 | 866187 | 287 | 220-297 | 704 | | 2p23.3 | 176830, 176830, 182601, 229800, |
| | | | | | | | | 602134 |
| 278 | HRADA42 | 827302 | 288 | 122-256 | 705 | | Xq22-24 | 300046, 300088, 300123, 300300, |
| | | | | | | | | 300300, 301201, 301500, 301835, |
| | | | | | | | | 301845, 303630, 303630, 303631, |
| | | | | | | | | 304500, 304700, 304700, 304700, |
| | | | | | | | | 307150, 309300, 309605, 310490, |
| | | | | | | | | 311850, 312080, 312080 |
| 279 | HRADF49 | 866481 | 289 | 169-930 | 706 | Pro-85 to Asp-99, | 2q36.1 | 120070, 120131, 120131, 138030, |
| | | | | | | Arg-163 to Arg-170, | | 259900 |
| | | | | | | Gln-183 to Thr-189, | | |
| | | | | | | Pro-201 to Ser-209, | | |
| | | | | | | Ser-216 to Gly-222. | | |
| 280 | HRADN25 | 800628 | 290 | 198-395 | 707 | Gly-60 to Pro-65. | 12q13 | 107777, 123940, 139350, 139350, |
| | | | | | | | | 148040, 148041, 148043, 148070, |
| | | | | | | | | 231550, 600194, 600231, 600536, |
| | | | | | | | | 600808, 600956, 601284, 601769, |
| | | | | | | | | 601769, 601928, 602116, 602153 |
| 281 | HRADT25 | 800737 | 291 | 233-424 | 708 | Gln-30 to Tyr-36, | | |
| | | | | | | Thr-47 to Glu-56, | | |
| | | | | | | Asn-58 to Thr-63. | | |
| 282 | FLRDAI17 | 560720 | 292 | 578-673 | 709 | | | |
| 283 | HRDDQ39 | 840405 | 293 | 215-355 | 710 | Gly-27 to Pro-35. | | |
| 284 | HRDER22 | 688056 | 294 | 32-61 | 711 | | | |
| 285 | HRDFK37 | 840381 | 295 | 120-152 | 712 | | | |
| 286 | HRGBD54 | 828436 | 296 | 1958-1990 | 713 | | | |
| 287 | HROEA08 | 866190 | 297 | 50-151 | 714 | | 2q31.1 | 100690, 142989, 156232, 178600, |
| | | | | | | | | 600258 |
| 288 | HSAVA08 | 580870 | 298 | 66-146 | 715 | Thr-15 to Gln-22. | | |
| 289 | HSAWN53 | 634697 | 299 | 159-347 | 716 | Gln-42 to Ser-63. | | |
| 290 | HSAWZ40 | 634000 | 300 | 124-237 | 717 | | | |
| 291 | HSDBI90 | 853376 | 301 | 218-262 | 718 | | | |
| 292 | HSDZM54 | 637870 | 302 | 445-552 | 719 | Lys-17 to Leu-23. | | |
| 293 | HSHBF76 | 715838 | 303 | 129-161 | 720 | | | |
| 294 | HSIFG47 | 778378 | 304 | 304-345 | 721 | | | |
| 295 | HSJBY32 | 702020 | 305 | 257-532 | 722 | Pro-49 to Ala-69, | 11p15.5 | 125852, 126452, 126452, 141900, |
| | | | | | | Pro-72 to His-77, | | 141900, 141900, 141900, 141900, |
| | | | | | | Pro-79 to Cys-89. | | 141900, 142000, 142000, 142200, |
| | | | | | | | | 142250, 142270, 176730, 176730, |
| | | | | | | | | 176730, 190020, 191290, 192500, |
| | | | | | | | | 192500, 194071, 194071, 204500, |
| | | | | | | | | 600856, 601680, 602631, 602631 |
| 296 | HSKDR27 | 580874 | 306 | 473-556 | 723 | Pro-18 to Gly-26. | 19p13.2 | |
| | | | | | | | | 108725, 120700, 133171, 143890, |
| | | | | | | | | 147670, 147670, 147670, 151440, |
| | | | | | | | | 164953, 231670, 600276, 600957, |
| | | | | | | | | 601843 |
| 297 | HSLHG78 | 846148 | 307 | 647-859 | 724 | Arg-15 to Ser-27, | | |
| | | | | | | Ser-29 to Tyr-41, | | |
| | | | | | | Thr-55 to Phe-62. | | |
| 298 | HSNAP85 | 784054 | 308 | 941-955 | 725 | | | |
| 299 | HSOAH16 | 827058 | 309 | 206-334 | 726 | Pro-2 to Arg-7, | | |
| | | | | | | Trp-32 to Leu-38. | | |
| 300 | HSQDO85 | 853393 | 310 | 133-168 | 727 | | 22q13.1 | 103050, 103050, 124030, 124030, |
| | | | | | | | | 138981, 182380, 188826, 190040, |
| | | | | | | | | 190040, 190040 |
| 301 | HSQES57 | 831222 | 311 | 195-989 | 728 | Thr-76 to Thr-81, | | |
| | | | | | | Asp-87 to Glu-94, | | |
| | | | | | | Gln-100 to Ser-106, | | |
| | | | | | | Arg-135 to Pro-143, | | |
| | | | | | | Tyr-236 to Ser-244. | | |
| 302 | HSRBE06 | 871264 | 312 | 128-193 | 729 | | | |
| 303 | HSSDI26 | 560722 | 313 | 253-318 | 730 | | | |
| 304 | HSSEA64 | 853395 | 314 | 58-246 | 731 | | | |
| 305 | HSSEF77 | 658725 | 315 | 184-366 | 732 | Arg-22 to Lys-27, | 2p12 | 147200, 178640, 216900 |
| | | | | | | Leu-30 to Asn-39. | | |
| 306 | HSSFE38 | 742512 | 316 | 264-641 | 733 | Glu-37 to Arg-42, | | |
| | | | | | | Gly-108 to Cys-117. | | |
| 307 | HSSGJ58 | 747714 | 317 | 245-361 | 734 | Thr-14 to Gln-34. | | |
| 308 | HSVBD37 | 637110 | 318 | 146-166 | 735 | | 1p22-p21 | 102770, 120280, 120280, 166600, |
| | | | | | | | | 170995, 191540, 232400, 232400, |
| | | | | | | | | 274270, 274270, 600309, 601414, |
| | | | | | | | | 601691, 601691, 601691, 601691, |
| | | | | | | | | 601718, 602094 |
| 309 | HSXCP38 | 895392 | 319 | 211-255 | 736 | | | |
| 310 | HSYBI06 | 740766 | 320 | 232-333 | 737 | | | |
| 311 | HT1SC27 | 630647 | 321 | 366-449 | 738 | | | |
| 312 | HT3BF49 | 838620 | 322 | 306-320 | 739 | | | |
| 313 | HT5FX79 | 794169 | 323 | 228-380 | 740 | Glu-1 to Ser-9, | | |
| | | | | | | Ser-23 to Ser-35. | | |
| 314 | HT5GR59 | 801930 | 324 | 135-230 | 741 | | 8p21.3 | 602629 |
| 315 | HTDAA78 | 566861 | 325 | 151-213 | 742 | Ala-5 to Leu-18. | 1q25.1 | 145001, 150292, 208250, 600995, |
| | | | | | | | | 601652 |
| 316 | HTEAG62 | 812332 | 326 | 1017-1085 | 743 | | | |
| 317 | HTECB02 | 806305 | 327 | 196-366 | 744 | Ser-3 to Arg-9, | 14q32 | 123270, 245200, 251600,270100, |
| | | | | | | Ser-19 to Pro-28, | | 276900 |
| | | | | | | | | Arg-34 to Ala-43. |
| 318 | HTBCC15 | 866488 | 328 | 211-282 | 745 | | 6q21-q22 | 120110, 121014, 156225, 164200, |
| | | | | | | | | 164200, 601410, 601666, 601757, |
| | | | | | | | | 602772 |
| 319 | HTEDJ28 | 762845 | 329 | 287-424 | 746 | Thr-34 to Leu-41. | 8p22-q11 | 148370, 180100, 238600, 238600, |
| | | | | | | | | 238600, 238600, 600143, 601385, |
| | | | | | | | | 602629 |
| 320 | HTEDS12 | 838621 | 330 | 260-370 | 747 | Ala-29 to Thr-36. | 17q21.33 | 109270, 109270, 109270, 109270, |
| | | | | | | | | 109270, 120150, 120150, 120150, |
| | | | | | | | | 148065, 148080, 154275, 171190, |
| | | | | | | | | 185800, 221820, 249000, 253250, |
| | | | | | | | | 600119, 600119, 600525, 601844 |
| 321 | HTEEW69 | 764835 | 331 | 182-1153 | 748 | Asp-63 to Thr-70, | | |
| | | | | | | Asn-77 to Ser-86, | | |
| | | | | | | Thr-101 to Arg-108, | | |
| | | | | | | Pro-117 to Asn-123, | | |
| | | | | | | Gly-194 to Trp-203. | | |
| 322 | HTEGS07 | 827700 | 332 | 493-606 | 749 | Pro-18 to Asn-27. | | |
| 323 | HTEGS11 | 862066 | 333 | 173-196 | 750 | | 5p15.1 | 123000 |
| 324 | HTBHA56 | 806461 | 334 | 280-546 | 751 | His-10 to Ala-20. | 19q13.43 | |
| 325 | HTBHU59 | 840385 | 335 | 170-274 | 752 | Ser-29 to Phe-34. | | |
| 326 | HTEKM46 | 862069 | 336 | 171-287 | 753 | | | |
| 327 | HTEMQ17 | 840387 | 337 | 446-484 | 754 | | 7p15.3 | 153880, 601649 |
| 328 | HTLAP64 | 603913 | 338 | 173-235 | 755 | Ile-8 to Asn-20. | 11p15.5- | 125852, 126452, 126452, 130650, |
| | | | | | | | p15.4 | 141900, 141900, 141900, 141900, |
| | | | | | | | | 141900, 141900, 142000, 142000, |
| | | | | | | | | 142200, 142250, 142270, 150000, |
| | | | | | | | | 176730, 176730, 176730, 190020, |
| | | | | | | | | 191290, 192500, 192500, 194071, |
| | | | | | | | | 194071, 204500, 257200, 257200, |
| | | | | | | | | 600856, 601680, 602631, 602631 |
| 329 | HTLBT80 | 840045 | 339 | 912-1301 | 756 | Ser-107 to Ser-116. | 20q11.21- | 102700, 102700, 602025 |
| | | | | | | | q13.11 | |
| 330 | HTLCX82 | 847091 | 340 | 46-273 | 757 | Glu-48 to Gly-60, | 22q11.21 | 123620, 151410, 600850 |
| | | | | | | Pro-68 to Trp-74. | | |
| 331 | HTLDA84 | 686397 | 341 | 225-266 | 758 | | | |
| 332 | HTLDU78 | 637702 | 342 | 219-245 | 759 | | | |
| 333 | HTLEC82 | 811992 | 343 | 530-640 | 760 | | 19q13.2 | 107741, 113900, 122720, 122720, |
| | | | | | | | | 126340, 126391, 160900, 164731, |
| | | | | | | | | 173850, 207750, 248600, 258501 |
| 334 | HTLEM16 | 779133 | 344 | 1220-1429 | 761 | Arg-29 to Cys-43. | | |
| 335 | HTLEV48 | 723799 | 345 | 205-825 | 762 | Met-1 to Arg-12, | 22q11.2- | 123620, 138720, 145410, 188826, |
| | | | | | | Thr-19 to Leu-27, | q12.1 | 231950, 239500, 275350, 600850, |
| | | | | | | Asp-72 to Val-79, | | 601669 |
| | | | | | | Arg-89 to Pro-94, | | |
| | | | | | | Lys-102 to Ser-111, | | |
| | | | | | | Glu-116 to Arg-122, | | |
| | | | | | | Lys-134 to Pro-142, | | |
| | | | | | | Ser-146 to Ser-151, | | |
| | | | | | | Gly-177 to Asp-196. | | |
| | HTLEV48 | 566786 | 406 | 91-120 | 823 | | | |
| 336 | HTLFI73 | 846063 | 346 | 340-411 | 763 | | | |
| 337 | HTLIF11 | 843506 | 347 | 933-1049 | 764 | Pro-4 to Gly-9. | | |
| 338 | HTNAM63 | 566880 | 348 | 193-285 | 765 | | | |
| 339 | HTNBK13 | 831967 | 349 | 534-599 | 766 | | 22q12 | 123620, 133450, 133450, 600850, |
| | | | | | | | | 601669 |
| 340 | HTOAI50 | 638623 | 350 | 61-144 | 767 | | | |
| 341 | HTOAM11 | 664508 | 351 | 89-193 | 768 | | | |
| 342 | HTODH57 | 823126 | 352 | 228-443 | 769 | Tyr-21 to Phe-26, | | |
| | | | | | | Glu-58 to Trp-66. | | |
| 343 | HTQDH83 | 580884 | 353 | 103-201 | 770 | | | |
| 344 | HTOEV16 | 853616 | 354 | 201-557 | 771 | Arg-60 to Ala-69, | 6q25.3 | 100678, 180020, 600320, 600883, |
| | | | | | | Ala-93 to Cys-99. | 602544 | |
| 345 | HTOGR38 | 824639 | 355 | 314-442 | 772 | | | |
| 346 | HTOHO21 | 732808 | 356 | 439-630 | 773 | Ile-35 to Cys-42. | 15q24-q25 | 118485, 231680, 272800, 272800, |
| | | | | | | | | 272800, 276700, 602685 |
| 347 | HTPDU17 | 840596 | 357 | 52-153 | 774 | | 5q35.3 | |
| 348 | HTSFJ32 | 637720 | 358 | 93-149 | 775 | Leu-12 to Cys-18. | 17p13.1 | 191170, 191170 |
| 349 | HTTEZ02 | 702027 | 359 | 250-336 | 776 | Arg-23 to Leu-28. | 7q34 | 180105, 222800, 274180 |
| 350 | HTXBD09 | 839429 | 360 | 350-388 | 777 | | 17q25 | 114290, 138033, 162100, 170500, |
| | | | | | | | | 170500, 170500, 180860, 264470 |
| 351 | HTXDB22 | 853407 | 361 | 229-297 | 778 | | | |
| 352 | HTXDC38 | 801935 | 362 | 359-415 | 779 | | 16q22.1 | 103850, 114835, 116800, 140100, |
| | | | | | | | | 140100, 192090, 192090, 192090, |
| | | | | | | | | 192090, 245900, 245900, 276600, |
| | | | | | | | | 600223 |
| 353 | BTXDC77 | 844258 | 363 | 65-520 | 780 | | | |
| 354 | HTXDG92 | 658730 | 364 | 216-416 | 781 | | 17q11.2 | 154275, 162200, 162200, 182138, |
| | | | | | | | | 239100, 600881, 601954, 602403 |
| 355 | HTXET11 | 581521 | 365 | 178-267 | 782 | | | |
| 356 | HTXJY08 | 637774 | 366 | 108-158 | 783 | | | |
| 357 | HTXKF95 | 834438 | 367 | 330-566 | 784 | Met-1 to Pro-6, | | |
| | | | | | | Gly-73 to Thr-78. | | |
| 358 | HTXLT36 | 843477 | 368 | 189-230 | 785 | | 4p16 | 225500, 600593, 602363 |
| 359 | HTXMZ07 | 834881 | 369 | 319-432 | 786 | Pro-19 to Ser-28. | 3p21.31 | 116806, 168468, 182280, 212138, |
| | | | | | | | | 600163 |
| 360 | HUFCL31 | 801938 | 370 | 287-367 | 787 | | 9p21 | 108120, 112250, 247640, 600160, |
| | | | | | | | | 600221, 601606 |
| 361 | HUKBT67 | 844446 | 371 | 273-392 | 788 | Ser-32 to Arg-39. | 12q13.13 | 120140, 120140, 120140, 120140, |
| | | | | | | | | 120140, 120140, 120140, 126337, |
| | | | | | | | | 600808, 601284, 601769, 601769, |
| | | | | | | | | 602116 |
| 362 | HUKDF20 | 566823 | 372 | 214-315 | 789 | | | |
| 363 | HUKDY82 | 570896 | 373 | 187-285 | 790 | | | |
| 364 | HUSCJ14 | 894699 | 374 | 74-661 | 791 | Phe-166 to Arg-174, | | |
| | | | | | | Ser-191 to Tyr-196. | | |
| 365 | HUSGL67 | 792637 | 375 | 350-493 | 792 | Met-1 to Tyr-8, | 19q13.33 | 134790, 600040 |
| | | | | | | Gln-27 to Gln-38. | | |
| 366 | HUSGU40 | 684975 | 376 | 500-640 | 793 | Arg-21 to Ser-27, | | |
| | | | | | | Ile-36 to Asp-41. | | |
| 367 | HUSIR18 | 762858 | 377 | 83-151 | 794 | | 6pter-p12.1 | |
| 368 | HUVDJ48 | 564853 | 378 | 196-213 | 795 | | | |
| 369 | HWAAI12 | 830432 | 379 | 223-312 | 796 | | | |
| 370 | HWBBQ70 | 689121 | 380 | 222-353 | 797 | Ala-21 to Ser-31. | | |
| 371 | HWBBU75 | 780360 | 381 | 783-938 | 798 | Ser-17 to Gly-22, | | |
| | | | | | | Leu-34 to Ala-42. | | |
| 372 | HWBCN36 | 722259 | 382 | 378-650 | 799 | Lys45 to Pro-51, | | |
| | | | | | | Arg-80 to Arg-85. | | |
| 373 | HWBDJ08 | 762860 | 383 | 253-405 | 800 | Ser-30 to Gly-36. | | |
| 374 | HWBFX16 | 827312 | 384 | 267-278 | 801 | | | |
| 375 | HWDAC26 | 821335 | 385 | 242-349 | 802 | | Xq21.3- | 300088, 300300, 300300, 301201, |
| | | | | | | | q22 | |
| | | | | | | | | 301500, 301835, 303400, 303630, |
| | | | | | | | | 303630, 303631, 304500, 304700, |
| | | | | | | | | 304700, 304700, 305450, 309300, |
| | | | | | | | | 309605, 311850, 312080, 312080 |
| 376 | HWDAG96 | 796743 | 386 | 866-964 | 803 | | 20q12 | 600281, 600281 |
| 377 | HWDAJ01 | 794016 | 387 | 288-362 | 804 | Pro-17 to Ser-24. | | |
| 378 | HWHPB78 | 740778 | 388 | 200-400 | 805 | Gln-25 to Leu-30. | | |
| 379 | HELGG84 | 851137 | 389 | 147-215 | 806 | | | |
| | HFLGG84 | 674456 | 407 | 147-215 | 824 | | | |
| 380 | HILCA24 | 869856 | 390 | 191-1174 | 807 | Gln-52 to Arg-57, | 5p15.2 | 123000, 602568 |
| | | | | | | Glu-74 to Leu-84, | | |
| | | | | | | Val-104 to Asp-110, | | |
| | | | | | | Gly-157 to Gly-163, | | |
| | | | | | | Asn-185 to Ser-195, | | |
| | | | | | | Arg-245 to Asp-250, | | |
| | | | | | | Pro-302 to Pro-310, | | |
| | | | | | | Thr-316 to Tyr-322. | | |
| | HILCA24 | 782450 | 408 | 189-1172 | 825 | Gln-52 to Arg-57, | | |
| | | | | | | Glu-74 to Leu-84, | | |
| | | | | | | Val-104 to Asp-110, | | |
| | | | | | | Gly-157 to Gly-163, | | |
| | | | | | | Asn-185 to Ser-195, | | |
| | | | | | | Arg-245 to Asp-250, | | |
| | | | | | | Pro-302 to Pro-310, | | |
| | | | | | | Thr-316 to Tyr-322. | | |
| 381 | HE2CA60 | 888705 | 391 | 1731-1754 | 808 | | | |
| | HE2CA60 | 770301 | 409 | 360-383 | 826 | | | |
| 382 | HLWAU42 | 695737 | 392 | 220-393 | 809 | | | |
| | HLWAU42 | 840855 | 410 | 1751-1924 | 827 | | | |
| 383 | HGCAC19 | 851527 | 393 | 317-346 | 810 | | 14q24.3 | 104311, 109150, 182600, 245200, |
| | | | | | | | | 601208 |
| | HGCAC19 | 842540 | 411 | 315-344 | 828 | | | |
| | HGCAC19 | 801999 | 412 | 317-346 | 829 | | | |
| 384 | HPQAX38 | 845752 | 394 | 295-345 | 811 | | | |
| | HPQAX38 | 843592 | 413 | 295-345 | 830 | | | |
| 385 | HTOJL95 | 762851 | 395 | 221-397 | 812 | Gly-26 to Val-32. | | |
| | HTOJL95 | 806212 | 414 | 134-310 | 831 | Gly-26 to Val-32. | | |
| 386 | HTLIF12 | 901225 | 396 | 644-871 | 813 | Phe-30 to Lys-37, | | |
| | | | | | | Pro-43 to Lys-75. | | |
| | HTLIF12 | 891533 | 415 | 644-871 | 832 | Phe-30 to Lys-37, | | |
| | | | | | | Pro-43 to Lys-75. | | |
| | HTLLF12 | 886780 | 416 | 644-871 | 833 | Phe-30 to Lys-37, | | |
| | | | | | | Pro-43 to Lys-75. | | |
| | HTLTF12 | 870167 | 417 | 644-871 | 834 | Phe-30 to Lys-37, | | |
| | | | | | | Pro-43 to Lys-75. | | |
| | HTLIF12 | 842691 | 418 | 644-871 | 835 | Phe-30 to Lys-37, | | |
| | | | | | | Pro-43 to Lys-75. | | |
| | HTLIF12 | 834946 | 419 | 642-869 | 836 | Phe-30 to Lys-37, | | |
| | | | | | | Pro-43 to Lys-75. | | |
| 387 | HTEED26 | 762846 | 397 | 261-359 | 814 | Asp-21 to Gln-28. | | |
| | HTEED26 | 753425 | 420 | 259-357 | 837 | Asp-21 to Gln-28. | | |
| 388 | HPJBJ51 | 878609 | 398 | 716-925 | 815 | Arg-48 to Tyr-54. | | |
| | HPJBJ51 | 829114 | 421 | 715-924 | 838 | Arg-48 to Tyr-54. | | |
| 389 | HOABP31 | 868327 | 399 | 148-522 | 816 | Cys-22 to Ser-27. | Xq21.3- | 300088, 300300, 300300, 301201, |
| | | | | | | | q22 | 301500, 301835, 303400, 303630, |
| | | | | | | | | 303630, 303631, 304500, 304700, |
| | | | | | | | | 304700, 304700, 305450, 309300, |
| | | | | | | | | 309605, 311850, 312080, 312080 |
| | HOABP31 | 835084 | 422 | 148-519 | 839 | Cys-22 to Ser-27. | | |
| 390 | HMCAZ04 | 668249 | 400 | 97-204 | 817 | Met-1 to Pro-7. | 15q15 | 177070, 177070, 182500, 218000, |
| | | | | | | | | 227220, 243500, 600839, 601800 |
| | HMCAZ04 | 887445 | 423 | 498-605 | 840 | Met-1 to Pro-7. | | |
| | HMCAZ04 | 867910 | 424 | 106-1455 | 841 | Pro-76 to Phe-81, | | |
| | | | | | | Gln-95 to Pro-102, | | |
| | | | | | | Leu-121 to Ile-128, | | |
| | | | | | | Asp-131 to Ser-137, | | |
| | | | | | | Thr-174 to Trp-179, | | |
| | | | | | | Arg-217 to Lys-224, | | |
| | | | | | | Val-257 to Asn-262, | | |
| | | | | | | Asn-277 to Glu-283, | | |
| | | | | | | His-325 to Asn-330, | | |
| | | | | | | Lys-365 to Thr-377, | | |
| | | | | | | Pro-404 to Arg411. | | |
| | HMCAZ04 | 858210 | 425 | 497-604 | 842 | Met-1 to Pro-7. | | |
| | HMCAZ04 | 839783 | 426 | 106-1455 | 843 | Pro-76 to Phe-81, | | |
| | | | | | | Gln-95 to Pro-102, | | |
| | | | | | | Leu-121 to Ile-128, | | |
| | | | | | | Asp-131 to Ser-137, | | |
| | | | | | | Thr-174 to Trp-179, | | |
| | | | | | | Arg-217 to Lys-224, | | |
| | | | | | | Val-257 to Asn-262, | | |
| | | | | | | Asn-277 to Glu-283, | | |
| | | | | | | His-325 to Asn-330, | | |
| | | | | | | Lys-365 to Thr-377, | | |
| | | | | | | Pro-404 to Arg-411. | | |
| 391 | HE8FC45 | 845672 | 401 | 155-298 | 818 | | | |
| | HE8FC45 | 843781 | 427 | 155-298 | 844 | | | |

[0104] TABLE 1B.2

| | | | | |
|---|---|---|---|---|
| | | | SEQ | |
| | | | ID | |
| Gene | cDNA | Contig | NO: | Tissue Distribution Library Code:Count |
| No: | Clone ID | ID: | X | (see Table 4 for Library Codes) |

| | | | | |
|---|---|---|---|---|
| 1 | H6BSF56 | 762968 | 11 | AR313:120, AR039:99, AR299:64, AR185:57, AR089:54, AR096:51, AR277:46, AR300:43, |
| | | | | AR316:37, AR060:29, AR218:28, AR240:28, AR104:25, AR219:23, AR282:23, AR055:20, |
| | | | | AR283:12 L0599:4, L0439:3, L0777:3, H0253:2, H0615:2, H0520.2, L0754:2, L0745:2, |
| | | | | L0759:2, H0556:1, H0657:1, S0116:1, H0450:1, S0418:1, S0046:1, S0222:1, H0492:1, |
| | | | | S0049:1, H0570:1, H0123:1, H0050:1, H0051:1, S0036:1, H0494:1, L0805:1, L0776:1, |
| | | | | S0126:1, H0435:1, H0670:1, S0028:1, L0747:1, S0026:1 and H0542:1. |
| 2 | H6EEC72 | 889401 | 12 | AR282:2, AR039:1, AR055:1 S0444:2, S0410:2, H0559:2, H0575:2, H0618:2, H0050:2, |
| | | | | H0521:2, H0295:1, H0650:1, H0255:1, S0418:1, S0358:1, S0376:1, H0580:1, S0045:1, |
| | | | | S0046:1, H0550:1, H0610:1, H0497:1, H0069:1, H0635:1, H0546:1, H0086:1, H0009:1, |
| | | | | H0059:1, H0100:1, H0429:1, H0494:1, L0766:1, L0665:1, H0519:1, H0711:1, S0152:1, |
| | | | | H0555:1, L0743:1, L0748:1, L0747:1, L0759:1, S0192:1, H0422:1 and H0506:1. |
| 3 | HACAB68 | 584773 | 13 | L0748:4, H0457:3 and S6022:1. |
| 4 | HACBS22 | 847113 | 14 | L0439:9, L0751:7, L0766:6, L0361:6, H0052:5, S0002:5, L0769:5, L0777:5, L0770:4, |
| | | | | L0771:4, L0748:4, L0754:4, L0758:4, L0759:4, L0596:4, S0474:3, S0051:3, S0142:3, |
| | | | | L0662:3, L0747:3, H0170:2, H0580:2, S0046:2, H0619:2, L0717:2, H0550:2, S0280:2, |
| | | | | H0039:2, S0422:2, L0794:2, L0775:2, L0805:2, L0655:2, L5623:2, L0666:2, L0665:2, |
| | | | | L0438:2, H0539:2, L0742:2, L0749:2, L0779:2, L0731:2, L0757:2, L0581:2, H0171:1, |
| | | | | H0265:1, H0556:1, H0686:1, S0040:1, H0650:1, H0661:1, H0663:1, H0306:1, S0420:1, |
| | | | | S0356:1, S0442:1, S0354:1, L3646:1, H0637:1, S0222:1, H0431:1, H0586:1, H0492:1, |
| | | | | H0486:1, L3655:1, H0156:1, H0042:1, H0253:1, H0545:1, H0563:1, H0123:1, H0014:1, |
| | | | | H0622:1, T0023:1, H0033:1, H0213:1, H0135:1, H0038:1, H0063:1, S0038:1, T0042:1, |
| | | | | H0560:1, H0561:1, S0372:1, S0450:1, S0344:1, H0538:1, S0426:1, L0762:1, L0637:1, |
| | | | | L3905:1, L5566:1, L0643:1, L0650:1, L0774:1, L0375:1, L0776:1, L0807:1, L0663:1, |
| | | | | L2263:1, L3824:1, S0126:1, H0689:1, H0658:1, H0754:1, S0174:1, S0406:1, L0743:1, |
| | | | | S0031:1, S0436:1, H10668:1, L3378:1 and H0506:1. |
| 5 | HADDE71 | 839187 | 15 | AR283:48, AR277:39, AR313:33, AR219:30, AR316:27, AR282:27, AR089:27, AR299:26, |
| | | | | AR218:26, AR240:25, AR185:22, AR104:22, AR055:22, AR096:22, AR300:20, AR039:20, |
| | | | | AR060:15 L0769:11, L0747:9, L0809:6, S0408:4, L0770:4, L0439:4, L0752:4, |
| | | | | L0759:4, L0766:3, L0803:3, L0666:3, L0751:3, L0780:3, S0007:2, H0619:2, H0351:2, |
| | | | | H0333:2, H0427:2, H0052:2, L0761:2, L0662:2, L0794:2, L0774:2, L0806:2, L0659:2, |
| | | | | H0547:2, H0521:2, L0741:2, L0745:2, L0750:2, L0779:2, L0777:2, H0543:2, H0739:1, |
| | | | | H0171:1, L3019:1, H0483:1, H0254:1, H0125:1, H0675:1, H0580:1, H0722:1, H0733:1, |
| | | | | S0140:1, H0261:1, H0592:1, H0586:1, H0587:1, H0257:1, H0486:1, L0022:1, H0042:1, |
| | | | | H0581:1, H0150:1, H0086:1, H0123:1, T0010:1, H0266:1, H0673:1, S0364:1, H0087:1, |
| | | | | H0264:1, H0494:1, H0560:1, H0538:1, L0762:1, L0772:1, L0646:1, L0765:1, L0649:1, |
| | | | | L0805:1, L0776:1, L0657:1, L0783:1, L5622:1, L0791:1, L2654:1, S0126:1, H0435:1, |
| | | | | S0330:1, H0522:1, L0743:1, L0744:1, L0749:1, L0786:1, L0753:1, L0755:1, L0731:1, |
| | | | | L0758:1, S0436:1, S0011:1 and S0192:1. |
| 6 | HADDJ13 | 827273 | 16 | H0427:1 |
| 7 | HADMA77 | 783049 | 17 | AR104:16, AR039:10, AR277:9, AR089:9, AR240:9, AR055:9, AR300:8, AR218:7, |
| | | | | AR299:7, AR283:7, AR060:7, AR282:7, AR316:6, AR219:6, AR096:5, AR185:5, AR313:4 |
| | | | | L0439:15, S0222:4, L0157:4, L0769:4, L0438:3, L0745:3, L0731:3, L0758:3, |
| | | | | L0599:3, H0443:2, H0441:2, S0010:2, L0662:2, L0744:2, L0748:2, L0750:2, |
| | | | | L0756:2, L0777:2, H0583:1, L0005:1, S0354:1, H0675:1, S0408:1, H0619:1, |
| | | | | H0369:1, H0574:1, H0486:1, H0390:1, S0346:1, H0309:1, H0597:1, T0003:1, H0024:1, |
| | | | | S6028:1, H0028:1, T0006:1, H0628:1, H0135:1, H0551:1, S0438:1, L0520:1, L0768:1, |
| | | | | L0776:1, L0559:1, L0659:1, L0384:1, L0809:1, H0144:1, H0547:1, L0746:1, L0747:1, |
| | | | | L0757:1 and S0434:1. |
| 8 | HADMB15 | 847116 | 18 | AR104:19, AR218:19, AR219:16, AR089:11, AR313:8, ARO55:8, AR060:7, AR299:6, |
| | | | | AR282:5, AR300:5, AR039:5, AR240:5, AR316:5, AR185:5, AR277:4, AR283:4, AR096:3 |
| | | | | L0595:2, L0442:1, L0005:1, L3653:1, H0390:1, H0081:1, H0024:1, L0770:1, L5566:1, |
| | | | | L0651:1, L0565:1, L0439:1, L0747:1, L0752:1, H0445:1, L0592: 1 and L0599:1. |
| 9 | HAGBQ12 | 722205 | 19 | AR060:7, AR055:6, AR104:5, AR185:5, AR089:4, AR299:4, AR277:4, AR300:4, AR283:4, |
| | | | | AR313:3, AR316:3, AR240:3, AR039:3, AR096:3, AR282:2, AR218:2, AR219:1 L0754:4, |
| | | | | L0805:2, L0777:2, L0755:2, S0010:1, H0049:1, L0163:1, L0771:1, L0775:1 and |
| | | | | L0776:1. |
| 10 | HAGEG10 | 823543 | 20 | AR313:19, AR039:13, AR096:11, AR300:10, AR299:9, AR089:8, AR316:8, AR218:7, |
| | | | | AR219:7, AR185:6, AR060:6, AR104:6, AR282:6, AR240:5, AR277:5, AR055:4, AR283:1 |
| | | | | L0766:17, L0663:5, H0486:3, L0439:3, L0747:3, L0750:3, L0779:3, L0592:3, |
| | | | | H0624:2, H0747:2, S0250:2, L0769:2, L0662:2, L0768:2, L0805:2, L0527:2, L0647:2, |
| | | | | L0789:2, L0792:2, L0666:2, L0749:2, L0777:2, L0362:2, H0171:1, H0556:1, S0134:1, |
| | | | | H0650:1, H0661:1, H0402:1, S0420:1, H0676:1, H0580:1, H0438:1, H0600:1, H0497:1, |
| | | | | H0485:1, H0013:1, S0010:1, S0474:1, L0471:1, H0083:1, H0591:1, H0038:1, L0060:1, |
| | | | | H0494:1, L0475:1, S0208:1, L5575:1, L0667:1, L0373:1, L0800:1, L0794:1, L0803:1, |
| | | | | L0774:1, L0775:1, L0555:1, L0807:1, L0659;1, L0526:1, L0519:1, L0529:1, L0787:1, |
| | | | | L0791:1, L0664:1, L0665:1, L3811:1, H0520:1, H0547:1, H0521:1, H0436:1, S0028:1, |
| | | | | L0745:1, L0756:1, L0755:1, L0758:1, H0445:1, L0596:1, H0543:1 and H0423:1. |
| 11 | HAGEQ79 | 828055 | 21 | AR104:37, AR283:37, AR277:26, AR055:20, AR185:20, AR316:18, AR299:17, AR282:16, |
| | | | | AR313:16, AR219:16, AR240:16, AR089:16, AR218:14, AR060:14, AR096:13, AR039:12, |
| | | | | AR300:10 L0805:6, L0809:4, L0803:3, L0779:3, L0794:2, L0776:2, L0438:2, L0439:2, |
| | | | | L0745:2, L0747:2, S0436:2, S0408:1, T0082:1, S0010:1, H0052:1, T0010:1, H0598:1, |
| | | | | L0770:1, L0774:1, L0783:1, L0788:1, L0665:1, L0742:1, L0777:1, L0753:1, L0755:1, |
| | | | | L0759:1 and L0592:1. |
| 12 | HAGFJ67 | 861680 | 22 | AR219:15, AR218:14, AR104:10, AR060:9, AR089:9, AR055:8, AR299:8, AR240:7, |
| | | | | AR096:7, AR039:7, AR300:7, AR185:7, AR316:6, AR282:6, AR283:6, AR313:6, AR277:3 |
| | | | | L0777:6, L0749:5, L0804:3, L0439:3, L0754:3, L0766:2, L0788:2, L0438:2, L0747:2, |
| | | | | H0265:1, H0455:1, S0010:1, L0655:1, L0666:1, S0053:1, S0374:1, L0352:1, L0751:1, |
| | | | | L0756:1, L0755:1, L0731:1, L0757:1, L0758:1, L0759:1, L0599:1 and L0604:1. |
| 13 | HAGFS57 | 847120 | 23 | AR055:7, AR104:6, AR060:5, AR277:4, AR300:3, AR299:3, AR096:3, AR316:3, AR039:2, |
| | | | | AR185:2, AR089:2, AR283:2, AR218:2, AR219:1, AR313:1, AR240:1 L0438:6, L0439:4, |
| | | | | S0360:3, S0422:3, H0547:3, L0747:3, L0005:2, S0222:2, S0002:2, L0664:2, L0754:2, |
| | | | | S0434:2, H0506:2, H0170:1, H0171:1, S0116:1, S0212:1, H0580:1, H0749:1, H0455:1, |
| | | | | L3655:1, H0069:1, H0098:1, S0010:1, L0105:1, H0581:1, H0263:1, H0009:1, L0471:1, |
| | | | | H0099:1, S0003:1, H0039:1, S0036:1, H0090:1, H0591:1, S0426:1, L0794:1, L0776:1, |
| | | | | L5622:1, S0052:1, H0144:1, H0682:1, H0659:1, H0521:1, H0555:1, L0756:1, H0445:1 |
| | | | | and S0452:1. |
| 14 | HAGHN57 | 773286 | 24 | AR313:12, AR316:11, AR218:11, AR185:11, AR039:10, AR219:10, AR299:10, AR060:9, |
| | | | | AR055:8, AR277:8, AR282:8, AR096:7, AR089:7, AR300:7, AR240:6, AR104:6, AR283:4 |
| | | | | H0521:5, L0777:5, S0376:4, H0733:3, H0156:3, H0519:3, H0436:3, L0731:3, H0656:2, |
| | | | | H0580:2, H0747:2, L3816:2, H0036:2, L0471:2, H0090:2, H0040:2, H0551:2, H0494:2, |
| | | | | S0438:2, S0440:2, H0529:2, L0809:2, H0144:2, S0374:2, H0593:2, H0170:1, L3643:1, |
| | | | | H0583:1, H0650:1, S0418:1, S0358:1, S0444:1, L3645:1, H0741:1, H0734:1, S0045:1, |
| | | | | S0476: H0619:1, H0586:1, H0643:1, H0632:1, H0486:1, S0280:1, H0590:1, S0010:1, |
| | | | | S0346:1, H0581:1, H0231:1, H0046:1, H0123:1, S6028:1, H0687:1, S0003:1, S0214:1, |
| | | | | H0252:1, H0615:1, H0212:1, L0455:1, S0366:1, H0163:1, H0038:1, H0634:1, T0067:1, |
| | | | | L0475:1, H0560:1, H0561:1, S0464:1, H0646:1, S0426:1, H0026:1, L0790:1, H0520:1, |
| | | | | H0435:1, S0328:1, H0539:1, H0704:1, S0027:1, L0439:1, L0750:1, L0756:1, L0757:1, |
| | | | | S0434:1, L0581:1, L0595:1, H0543:1 and H0423:1. |
| 15 | HAJAA47 | 534670 | 25 | H0560:1, H0561:1 and H0542:1. |
| 16 | HAJAY92 | 845601 | 26 | AR060:184, AR055:136, AR185:131, AR299:118, AR283:100, AR300:99, AR277:94, |
| | | | | AR089:94, AR104:84, AR282:79, AR039:68, AR316:65, AR240:60, AR096:54, AR218:35, |
| | | | | AR219:33, AR313:33 H0561:1 and L0758:1. |
| 17 | HAJCH70 | 827275 | 27 | H0561:1 |
| 18 | HAOAG15 | 852204 | 28 | AR169:4, AR241:3, AR172:3, AR206:3, AR263:3, AR207:3, AR176:3, AR235:3, AR168:2, |
| | | | | AR183:2, AR297:2, AR166:2, AR163:2, AR282:2, AR171:2, AR193:2, AR178:2, |
| | | | | AR181:2, AR162:2, AR274:2, AR182:2, AR298:2, AR217:2, AR224:2, AR312:2, AR053:2, |
| | | | | AR287:2, AR254:2, AR295:2, AR239:2, AR205:1, AR293:1, AR216:1, AR175:1, AR238:1, |
| | | | | AR285:1, AR316:1, AR277:1, AR033:1, AR179:1, AR267:1, AR291:1, AR288:1, AR289:1, |
| | | | | AR089:1 L0759:3, S0314:2, L0744:2, L0756:2, L0755:2, S0046:1, H0391:1, H0052:1, |
| | | | | H0050:1, S0318:1, S0338:1, S0312:1, L0766:1 and H0144:1. |
| 19 | HAQAI92 | 688037 | 29 | AR218:541, AR219:408, AR240:96, AR185:95, AR055:69, AR039:68, AR096:62, |
| | | | | AR316:50, AR089:42, AR299:41, AR300:37, AR060:31, AR104:29, AR313:26, AR283:23, |
| | | | | AR282:19, AR277:13 H0617:5, H0606:2, L0744:2, L0779:2, H0295:1, H0100:1, |
| | | | | S0440:1, H0026:1, L0762:1, L0504:1, L0769:1, L0764:1, L0662:1, L0649:1, L0804:1, |
| | | | | L0787:1, L0666:1, L0663:1, H0520:1, L0748:1, L0751:1, L0752:1 and S0436:1. |
| 20 | HARAE26 | 560598 | 30 | AR283:497, AR055:181, AR218:59, AR219:57, AR277:46, AR316:43, AR240:38, |
| | | | | AR096:37, AR104:36, AR313:35, AR039:35, AR089:34, AR282:30, AR185:28, AR299:26, |
| | | | | AR060:23, AR300:23 T0082:1 |
| 21 | HATBI94 | 839468 | 31 | AR060:5, AR055:5, AR039:4, AR300:4, AR299:4, AR240:3, AR185:3, AR089:3, AR104:3, |
| | | | | AR283:3, AR282:3, AR316:2, AR219:2, AR218:2, AR096:2, AR277:2, AR313:2 L0758:9, |
| | | | | L0769:4, H0556:3, L0756:3, H0486:2, H0156:2, H0040:2, H0529:2, L0766:2, L0803:2, |
| | | | | L0659:2, L0809:2, L0565:2, H0539:2, L0748:2, L0754:2, L0777:2, H0595:2, L0595:2, |
| | | | | L0361:2, S0114:1, H0402:1, S0358:1, H0580:1, L2255:1, S0222:1, H0587:1, H0497:1, |
| | | | | L3655:1, H0013:1, H0427:1, H0581:1, H0251:1, H0046:1, H0009:1, H0320:1, H0594:1, |
| | | | | H0266:1, H0031:1, L0055:1, H0376:1, H0634:1, S0038:1, H0100:1, L0667:1, L0771:1, |
| | | | | L0804:1, L0776:1, L0547:1, L5623:1, L0790:1, L0791:1, L0793:1, L0665:1, H0144:1, |
| | | | | L3827:1, H0519:1, S0126:1, H0682:1, H0659:1, H0521:1, S0404:1, L0740:1, L0747:1, |
| | | | | L0759:1, S0436:1 and L0591:1. |
| 22 | HATCB45 | 631172 | 32 | L0749:3, H0156:2, S0422:2, L0804:2, L0754:2, L0362:2, L3643:1, H0341:1, L0021:1, |
| | | | | H0620:1, L0529:1, H0762:1, H0670:1, H0660:1, L0748:1, L0750:1 and L0758:1. |
| 23 | HATCI03 | 580805 | 33 | AR313:42, AR039:30, AR299:20, AR096:19, AR185:19, AR277:18, AR300:18, AR089:17, |
| | | | | AR219:15, AR240:14, AR218:13, AR316:12, AR104:10, AR060:10, AR282:8, AR055:7, |
| | | | | AR283:5 S6026:1, H0156:1 and S0426:1. |
| 24 | HATEH20 | 836056 | 34 | AR055:7, AR060:6, AR218:6, AR185:5, AR089:5, AR299:4, AR313:4, AR240:4, AR316:4, |
| | | | | AR300:4, AR283:4, AR096:3, AR039:3, AR282:3, AR104:3, AR277:2, AR219:1 L0439:14, |
| | | | | L0740:13, H0046:10, H0556:9, L0752:9, H0052:7, H0617:7, L0748:7, L0747:7, |
| | | | | L0758:7, S0222:6, L0809:6, L0754:6, S0049:5, H0620:5, L0769:5, L0766:5, L0663:5, |
| | | | | H0144:5, L0438:5, L0741:5, L0731:5, S0436:5, H0657:4, S0278:4, H0599:4, L0163:4, |
| | | | | H0266:4, S0002:4, L0771:4, L0804:4, L0659:4, H0521:4, L0742:4, L0743:4, L0751:4, |
| | | | | L0753:4, L0759:4, S0444:3, H0728:3, H0618:3, S0010:3, H0050:3, L0471:3, S0051:3, |
| | | | | T0010:3, S6028:3, H0551:3, H0494:3, S0144:3, H0529:3, L0763:3, L0770:3, L0637:3, |
| | | | | L0775:3, L0655:3, L0666:3, S0330:3, H0696:3, L0757:3, H0265:2, H0716:2, H0656:2, |
| | | | | S0418:2, S0442:2, H0733:2, L0149:2, H0333:2, H0486:2, H0427:2, H0042:2, H0457:2, |
| | | | | H0041:2, S0003:2, T0006:2, S0364:2, H0124:2, S0366:2, H0135:2, S0038:2, S0422:2, |
| | | | | L0638:2, L5575:2, L5566:2, L0372:2, L0662:2, L0794:2, L0776:2, L0789:2, S0374:2, |
| | | | | H0519:2, H0658:2, H0660:2, S0152:2, S0406:2, H0727:2, L0485:2, L0599:2, L0601:2, |
| | | | | H0506:2, S0040:1, H0713:1, H0740:1, H0650:1, H0341:1, S0212:1, S0282:1, H0663:1, |
| | | | | H0459:1, H0638:1, S0420:1, L0617:1, S0360:1, S0408:1, H0741:1, H0735:1, H0734:1, |
| | | | | H0208:1, S0132:1, H0645:1, H0370:1, L0622:1, L0623:1, H0013:1, S0280:1, H0156:1, |
| | | | | L0021:1, H0097:1, H0575:1, H0036:1, H0590:1, S0346:1, H0318:1, H0230:1, H0596:1, |
| | | | | H0597:1, H0231:1, H0150:1, H0009:1, N0006:1, H0565:1, H0569:1, H0242:1, H0012:1, |
| | | | | H0024:1, H0373:1, H0051:1, H0083:1, H0267:1, H0292:1, H0428:1, H0604:1, H0553:1, |
| | | | | H0181:1, H0168:1, H0169:1, H0708:1, H0163:1, H0090:1, T0067:1, H0264:1, S0386:1, |
| | | | | S0112:1, L0351:1, L0564:1, T0042:1, H0561:1, S0370:1, S0142:1, S0344:1, L0640:1, |
| | | | | L0761:1, L0667:1, L0373:1, L0646:1, L0641:1, L0374:1, L0764:1, L0773:1, L0521:1, |
| | | | | L0626:1, L0533:1, L0803:1, L0651:1, L0805:1, L0661:1, L0657:1, L0634:1, L0542:1, |
| | | | | L0783:1, L0529:1, L0543:1, L5623:1, L0787:1, L0665:1, L3811:1, L3825:1, H0520:1, |
| | | | | H0547:1, S0380:1, H0522:1, H0436:1, H0576:1, L0609:1, L0744:1, L0745:1, L0749:1, |
| | | | | L0786:1, L0777:1, L0755:1, H0444:1, S0434:1, L0480:1, L0584:1, L0595:1, S0011:1, |
| | | | | H0422:1 and H0008:1. |
| 25 | HBAGD86 | 838799 | 35 | AR219:7, AR218:4, AR313:4, AR104:4, AR039:3, AR299:3, AR282:2, AR300:2, AR096:2, |
| | | | | AR316:2, AR277:1, AR240:1, AR089:1 L0809:4, L0766:3, L0439:3, H0624:2, H0411:2, |
| | | | | L0794:2, L0749:2, L0756:2, L0005:1, L3649:1, S0476:1, H0599:1, L0471:1, S0051:1, |
| | | | | T0010:1, H0266:1, S0150:1, S0422:1, L0637:1, L0765:1, L0803:1, L0783:1, L5622:1, |
| | | | | H0144:1, H0672:1, S0392:1, L0748:1, L0754:1, L0779:1, L0777:1, L0731:1 and |
| | | | | L0759:1. |
| 26 | HBCJL35 | 1300785 | 36 | AR096:21, AR240:18, AR316:13, AR277:13, AR283:12, AR313:12, AR300:10, AR282:9, |
| | | | | AR039:9, AR218:9, AR299:8, AR089:8, AR185:8, AR055:7, AR104:6, AR219:4, AR060:4 |
| | | | | H0013:8, L0805:5, H0716:4, S0010:4, H0052:4, H0144:4, H0615:3, H0547:3, L0747:3, |
| | | | | H0645:2, S0049:2, H0009:2, L0769:2, L0776:2, L0665:2, H0519:2, H0658:2, H0660:2, |
| | | | | L0602:2, H0555:2, L0439:2, L0750:2, S0436:2, L0597:2, H0136:2, H0423:2, H0624:1, |
| | | | | H0171:1, H0717:1, S0402:1, H0294:1, S0114:1, S0116:1, H0341:1, S0212:1, H0483:1, |
| | | | | H0664:1, S0360:1, S0046:1, H0619:1, H0411:1, H0369:1, S0222:1, H0438:1, H0486:1, |
| | | | | H0156:1, H0318:1, H0581:1, H0046:1, H0457:1, H0564:1, H0051:1, H0416:1, H0688:1, |
| | | | | H0644:1, L0456:1, H0135:1, H0616:1, H0059:1, H0561:1, S0344:1, S0422:1, L0763:1, |
| | | | | L0646:1, L0521:1, L0766:1, L0649:1, L0789:1, L0663:1, L0438:1, L3811:1, H0435:1, |
| | | | | S0406:1, H0436:1, L0612:1, L0748:1, L0751:1, L0779:1, L0731:1, L0758:1, L0759:1, |
| | | | | L0686:1, L0595:1, S0194:1 and H0721:1. |
| | HBCJL35 | 897937 | 402 | |
| 27 | HBGBC29 | 691473 | 37 | AR299:5, AR218:5, AR313:4, AR300:4, AR055:4, AR060:4, AR277:3, AR316:3, AR089:3, |
| | | | | AR185:3, AR096:3, AR039:3, AR219:3, AR104:3, AR240:3, AR282:2, AR283:2 L0731:20, |
| | | | | L0747:7, L0794:6, L0764:4, L0803:4, L0759:4, L0662:3, L0774:3, L0749:3, L0756:3, |
| | | | | S0436:3, S0360:2, H0156:2, H0046:2, H0181:2, L0766:2, L0659:2, L0809:2, L0438:2, |
| | | | | S0126:2, H0658:2, L0439:2, L0754:2, L0777:2, L0755:2, L0757:2, L0604:2, S0242:2, |
| | | | | S0442:1, S0376:1, S0408:1, L0717:1, H0270:1, H0263:1, H0597:1, H0123:1, H0617:1, |
| | | | | H0551:1, S0440:1, H0647:1, L0770:1, L0769:1, L0638:1, L0775:1, L0651:1, L0527:1, |
| | | | | L0526:1, L0789:1, L0666:1, L0665:1, H0547:1, H0435:1, H0648:1, S0330:1, S0406:1, |
| | | | | H0627:1, L0750:1, L0780:1, L0752:1, L0758:1, L0366:1 and H0293:1. |
| 28 | HBGNC72 | 892131 38 | AR096:11, AR240:11, AR316:9, AR218:9, AR089:8, AR282:8, AR219:8, AR055:7, | |
| | | | | AR060:7, AR299:6, AR104:6, AR039:6, AR185:6, AR313:6, AR283:6, AR300:5, AR277:5 |
| | | | | H0617:5, H0547:3, L0751:3, L0779:3, H0618:2, H0052:2, H0135:2, H0100:2, L0637:2, |
| | | | | L0764:2, H0520:2, H0593:2, H0543:2, H0265:1, H0556:1, H0585:1, H0255:1, H0664:1, |
| | | | | S0420:1, S0442:1, H0637:1, H0733:1, S0045:1, H0614:1, H0485:1, H0486:1, H0374:1, |
| | | | | S0049:1, H0086:1, H0674:1, L0770:1, L0769:1, L3905:1, L0662:1, L0794:1, L0766:1, |
| | | | | L0803:1, L0805:1, L0653:1, L0654:1, L0636:1, L0783:1, L5622:1, L5623:1, L0787:1, |
| | | | | L0663:1, H0519:1, H0521:1, H0555:1, H0436:1, S0028:1, L0741:1, L0758:1, S0276:1 |
| | | | | and H0352:1. |
| 29 | HBHAA81 | 846465 | 39 | AR289:34, AR291:33, AR283:32, AR055:32, AR294:26, AR266:26, AR286:26, AR256:23, |
| | | | | AR285:21, AR293:19, AR259:17, AR295:16, AR292:15, AR298:14, AR258:14, AR296:12, |
| | | | | AR284:11, AR104:10, AR033:9, AR186:9, AR202:7, AR206:7, AR246:7, AR204:7, |
| | | | | AR241:6, AR194:5, AR198:4, AR244:4, AR251:4, AR060:4, AR061:4, AR282:4, AR052:4, |
| | | | | AR053:4, AR205:4, AR309:4, AR316:3, AR182:3, AR312:3, AR192:3, AR273:3, AR229:3, |
| | | | | AR183:3, AR310:3, AR271:3, AR213:3, AR248:3, AR270:3, AR277:2, AR185:2, AR275:2, |
| | | | | AR299:2, AR269:2, AR300:2, AR247:2, AR267:2, AR175:2, AR089:2, AR313:2, AR265:2, |
| | | | | AR268:2, AR237:2, AR096:1, AR232:1, AR039:1, AR240:1, AR179:1, AR231:1, AR234:1 |
| | | | | H0599:8, S0366:7, L0485:6, H0733:5, H0734:5, L0769:5, H0735:4, H0729:3, H0728:3, |
| | | | | H0619:2, H0706:2, L0661:2, L0756:2, L0759:2, S0282:1, S0029:1, S0222:1, L0622:1, |
| | | | | H0122:1, S0010:1, H0196:1, H0012:1, H0200:1, H0373:1, S6028:1, S0364:1, S0036:1, |
| | | | | S0294:1, L0770:1, L0638:1, L5565:1, L0657:1, L0809:1, L0789:1, L0791:1, L0438:1, |
| | | | | L0439:1, L0750:1, L0777:1, S0260:1, L0604:1 and S0460:1. |
| 30 | HBIAA59 | 806303 | 40 | AR313:13, AR089:13, AR299:12, AR240:11, AR104:11, AR185:11, AR039:11, AR055:10, |
| | | | | AR096:10, AR218:9, AR060:9, AR219:7, AR316:7, AR300:7, AR282:6, AR283:5, |
| | | | | AR277:5 L0747:13, L0757:12, L0754:8, L0749:6, L0740:5, L0731:4, H0009:3, |
| | | | | H0051:3, L0750:3, L0756:3, L0777:3, L0752:3, S0376:2, S0360:2, H0619:2, L3388:2, |
| | | | | H0485:2, L3653:2, S0010:2, H0052:2, H0251:2, S0022:2, H0090:2, H0494:2, L0662:2, |
| | | | | L0794:2, L0806:2, L0776:2, L0665:2, H0144:2, S0390:2, L0748:2, L0581:2, H0265:1, |
| | | | | H0556:1, H0716:1, S0402:1, L0808:1, S0212:1, S0001:1, H0661:1, S0358:1, S0444:1, |
| | | | | S0046:1, S6026:1, L0717:1, H0549:1, S0222:1, H0438:1, H0592:1, H0333:1, H0632:1, |
| | | | | H0486:1, H0013:1, H0042:1, S0049:1, H0744:1, H0545:1, H0123:1, H0081:1, H0050:1, |
| | | | | L0471:1, H0105:1, H0012:1, H0620:1, S0051.1, S6028:1, H0688:1, H0553:1, L0455:1, |
| | | | | H0598:1, H0040:1, H0412:1, L0763:1, L0769:1, L0638:1, L0372:1, L0764:1, L0771:1, |
| | | | | L0766:1, L0561:1, L0498:1, L0774:1, L0775:1, L0375:1, L0378:1, L0805:1, L0657:1, |
| | | | | L0659:1, L0809:1, L5623:1, L0789:1, L0663:1, L0438:1, H0520:1, H0518:1, H0696:1, |
| | | | | S312:1, S3014:1, S0028:1, L0744:1, L0751:1, L0780:1, L0755:1, L0758:1, L07591, |
| | | | | S0031:1, S0260:1, H0506:1 and H0008:1. |
| 31 | HBIAC29 | 831751 | 41 | AR089:25, AR218:17, AR104:14, AR219:13, AR313:12, AR316:11, AR060:11, AR096:10, |
| | | | | AR055:10, AR299:9, AR185:9, AR039:9, AR240:8, AR282:8, AR300:8, AR283:6, AR277:5 |
| | | | | L0105:11, L0745:5, L0770:4, L0794:4, L0777:4, S0003:3, L0766:3, L0806:3, |
| | | | | L0809:3, L0740:3, L0751:3, L0749:3, S0376:2, S0360:2, L0598:2, L0776:2, L0666:2, |
| | | | | L0663:2, S0126:2, H0659:2, H0658:2, S0406:2, H0436:2, S3014:2, L0754:2, L0756:2, |
| | | | | L0604:2, H0624:1, H0265:1, S0116:1, H0669:1, H0331:1, L0586:1, S0049:1, H0597:1, |
| | | | | L0471:1, H0024:1, S0214:1, H0169:1, L0455:1, H0135:1, S0422:1, L0451:1, L0772:1, |
| | | | | L0764:1, L0765:1, L0773:1, L0387:1, L0804:1, L0805:1, L0657:1, L0659:1, L0526:1, |
| | | | | L0783:1, L0529:1, L0787:1, L0788:1, L0664:1, L0665:1, L0748:1, L0779:1, L0731:1, |
| | | | | L0599:1, H0543:1 and H0423:1. |
| 32 | HBICW51 | 553630 | 42 | AR055:7, AR060:7, AR218:6, AR240:5, AR300:5, AR1O4:5, AR313:5, AR282:4, AR089:4, |
| | | | | AR185:4, AR283:4, AR096:3, AR316:3, AR277:3, AR299:3, AR219:3, AR039:3 L0766:7, |
| | | | | H0556:5, S0002:2, H0395:1, S0418:1, S0049:1, H0052:1, H0598:1, H0591:1, H0560:1, |
| | | | | L0803:1, L0655:1, H0478:1, L0749:1, L0758:1, S0031:1, H0444:1 and H0543:1. |
| 33 | HBJAB02 | 837309 | 43 | AR282:3, AR277:1, AR039:1, AR316:1 S0434:5, L0794:3, H0255:2, H0318:2, H0251:2, |
| | | | | L0764:2, L0628:2, L0809:2, L0665:2, H0658:2, S0406:2, L0361:2, H0265:1, H0685:1, |
| | | | | H0657:1, H0483:1, S0420:1, S0442:1, S0358:1, H0729:1, H0734:1, S0132:1, S0222:1, |
| | | | | T0082:1, H0150:1, H0083:1, S0214:1, H0252:1, H0628:1, T0041:1, S0344:1, H0529:1, |
| | | | | L0520:1, L0535:1, L0662:1, L0387:1, L0375:1, L0518:1, L0666:1, L0663:1, H0726:1, |
| | | | | H0519:1, H0670:1, H0660:1, L0602:1, L0747:1, L0777:1, L0601:1, S0276:1, H0423:1 |
| | | | | and H0422:1. |
| 34 | HBJAC65 | 679337 | 44 | AR055:7, AR218:6, AR060:6, AR300:5, AR240:5, AR299:4, AR316:4, AR039:4, AR096:4, |
| | | | | AR089:4, AR185:3, AR282:3, AR219:3, AR283:3, AR277:3, AR104:2, AR313:2 L0743:21, |
| | | | | L0744:16, L0748:9, L0754:8, L0747:8, S0474:5, H0617:5, S0360:4, L0665:4, |
| | | | | L0750:4, L0757:4, H0713:3, H0549:3, H0550:3, H0014:3, H0087:3, H0646:3, L0776:3, |
| | | | | L0809:3, L3832:3, H0624:2, H0171:2, H0716:2, H0661:2, H0663:2, S0442:2, S0444:2, |
| | | | | S0408:2, H0013:2, H0427:2, H0188:2, H0031:2, H0090:2, H0413:2, S0352:2, L0769:2, |
| | | | | L0662:2, L0794:2, H0670:2, S0332:2, L0751:2, L0755:2, L0731:2, L0591:2, L0603:2, |
| | | | | S0192:2, H0170:1, H0265:1, H0717:1, H0662:1, S0376:1, H0742:1, H0733:1, H0734:1, |
| | | | | S0045:1, S0046:1, H0619:1, H0411:1, S6022:1, S0222:1, H0392:1, H0592:1, H0587:1, |
| | | | | H0333:1, T0039:1, S0280:1, H0042:1, H0618:1, H0318:1, S0049:1, H0309:1, H0596:1, |
| | | | | H0123:1, H0510:1, H0284:1, H0688:1, H0033:1, H0424:1, H0213:1, H0708:1, H0059:1, |
| | | | | T0004:1, H0509:1, L0640:1, L0637:1, L0641:1, L0765:1, L0771:1, L0775:1, L0376:1, |
| | | | | L0806:1, L0657:1, L0658:1, L0659:1, L0365:1, L0782:1, L0791:1, L0792:1, L2260:1, |
| | | | | H0144:1, H0547:1, H0519:1, H0711:1, H0682:1, H0651:1, H0539:1, S0454:1, S0206:1, |
| | | | | S0032:1, L0779:1, L0601:1, S0194:1 and L3837:1. |
| 35 | HBJBM12 | 560606 | 45 | AR282:9, AR313:7, AR039:7, AR055:7, AR299:6, AR060:5, AR104:5, AR089:5, AR185:4, |
| | | | | AR096:4, AR300:4, AR316:3, AR283:3, AR277:3, AR240:3, AR218:2, AR219:2 H0318:1 |
| | | | | and L0753:1. |
| 36 | HBJDS79 | 813588 | 46 | AR299:21, AR240:19, AR089:18, AR096:18, AR060:18, AR313:17, AR219:17, AR283:16, |
| | | | | AR282:16, AR218:15, AR039:15, AR104:15, AR055:14, AR316:13, AR185:12, AR277:11, |
| | | | | AR300:10 L0769:7, L0754:7, L0777:7, L0809:4, L0751:4, L0771:3, L0776:3, L0439:3, |
| | | | | S0408:2, H0318:2, L0163:2, H0673:2, H0038:2, L0766:2, H0539:2, H0521:2, 50406:2, |
| | | | | H0555:2, L0748:2, L0750:2, L0756:2, L0731:2, H0739:1, H0624:1, H0171:1, H0556:1, |
| | | | | H0685:1, H0295:1, H0294:1, H0663:1, S0442:1, S0410:1, H0580:1, H0734:1, H0747:1, |
| | | | | L0717:1, S0222:1, H0600:1, H0574:1, H0559:1, H0069:1, L0021:1, S0010:1, H0052:1, |
| | | | | L0040:1, H0327:1, H0150:1, H0620:1, H0024:1, T0006:1, H0644:1, S0366:1, H0135:1, |
| | | | | H0059:1, L0351:1, H0494:1, S0438:1, H0647:1, H0529:1, L0763:1, L5565:1, L0372:1, |
| | | | | L0644:1, L0764:1, L0773:1, L0662:1, L0768:1, L0389:1, L0805:1, L0542:1, L0783:1, |
| | | | | L0545:1, L0792:1, L0664:1, S0374:1, H0547:1, H0658:1, H0696:1, S0188:1, L0745:1, |
| | | | | L0746:1, L0749:1, L0753:1, L0758:1, H0444:1, S0436:1, L0603:1, S0026:1 and |
| | | | | H0506:1. |
| 37 | HBJFK45 | 531919 | 47 | AR282:3, AR055:2, AR060:2, AR219:2, AR185:2, AR300:1, AR039:1, AR283:1, AR218:1 |
| | | | | H0318:1 and L0766:1. |
| 38 | HBJIG20 | 866159 | 48 | AR060:1246, AR282:1116, AR300:1098, AR055:1006, AR104:977, AR299:929, AR185:901, |
| | | | | AR240:901, AR283:813, AR316:761, AR277:738, AR089:695, AR039:604, AR096:571, |
| | | | | AR313:390, AR218:357, AR219:319 H0594:11, H0596:8, S0282:5, S0260:5, S0194:5, |
| | | | | H0543:5, S0278:2, H0600:2, H0592:2, H0598:2, S0344:2, H0595:2, S0356:1, H0438:1, |
| | | | | H0574:1, H0599:1, S0346:1, H0318:1, H0597:1, S0388:1, H0316:1, S0390:1 and |
| | | | | H0542:1. |
| 39 | HBJKD16 | 853358 | 49 | AR172:63, AR171:62, AR215:61, AR274:50, AR216:48, AR213:43, AR214:41, AR272:41, |
| | | | | AR169:41, AR224:37, AR225:37, AR217:37, AR254:36, AR205:36, AR170:35, AR243:35, |
| | | | | AR168:35, AR247:34, AR245:32, AR312:32, AR221:32, AR212:31, AR161:29, AR222:28, |
| | | | | AR162:28, AR311:27, AR308:27, AR163:26, AR275:26, AR165:25, AR164:24, AR313:23, |
| | | | | AR053:23, AR166:23, AR223:21, AR039:20, AR089:20, AR309:19, AR096:19, AR242:18, |
| | | | | AR253:18, AR240:17, AR289:16, AR266:16, AR283:16, AR263:16, AR193:16, AR316:16, |
| | | | | AR264:16, AR204:16, AR250:15, AR282:15, AR201:15, AR277:15, AR207:14, AR291:14, |
| | | | | AR246:14, AR200:13, AR198:13, AR271:12, AR299:12, AR300:12, AR195:12, AR185:12, |
| | | | | AR104:12, AR290:11, AR192:11, AR173:11, AR255:11, AR257:11, AR060:11, AR197:11, |
| | | | | AR252:10, AR180:10, AR297:10, AR179:10, AR210:10, AR061:10, AR181:9, AR296:9, |
| | | | | AR199:9, AR270:9, AR269:9, AR178:9, AR183:9, AR268:8, AR055:8, AR177:8, AR262:8, |
| | | | | AR236:8, AR288:8, AR211:8, AR188:7, AR267:7, AR293:7, AR219:7, AR285:7, AR256:7, |
| | | | | AR294:7, AR174:7, AR176:7, AR189:7, AR033:7, AR261:7, AR218:7, AR287:6, AR175:6, |
| | | | | AR196:6, AR231:6, AR203:6, AR286:5, AR235:5, AR190:5, AR230:5, AR234:5, AR191:5, |
| | | | | AR182:5, AR260:5, AR258:4, AR295:4, AR237:4, AR233:4, AR229:4, AR238:4, AR239:3, |
| | | | | AR226:3, AR232:2, AR227:2, AR228:2 L0766:9, L0439:9, L0747:6, L2528:5, L0777:5, |
| | | | | H0673:4, L0438:4, L0758:4, L0362:4, S0116:3, L0748:3, L0752:3, H0445:3, H0156:2, |
| | | | | T0010:2, H0615:2, H0038:2, H0616:2, H0264:2, H0646:2, L0761:2, L0776:2, L0750:2, |
| | | | | L0779:2, S0436:2, L0593:2, S0242:2, H0222:1, H0740:1, H0657:1, H0661:1, H0663:1, |
| | | | | L2293:1, H0589:1, S0444:1, H0340:1, L3646:1, H0580:1, H0749:1, H0393:1, H0549:1, |
| | | | | S0222:1, H0574:1, H0486:1, H0013:1, H0069:1, L0021:1, S0010:1, H0318:1, S0474:1, |
| | | | | H0046:1, L0471:1, H0090:1, L0638:1, L0646:1, L0764:1, L0521:1, L0364:1, L0774:1, |
| | | | | L0659:1, L0543:1, L5622:1, L0792:1, L0666:1, L0664:1, L0665:1, S0428:1, L2657:1, |
| | | | | L2652:1, L3663:1, L2262:1, H0435:1, L3832:1, L0741:1, L0749:1, S0434:1, L0588:1, |
| | | | | H0422:1, L0698:1 and L2359:1. |
| 40 | HBMBM96 | 561935 | 50 | AR313:45, AR039:38, AR277:36, AR299:25, AR096:23, AR185:22, AR089:21, AR219:19, |
| | | | | AR300:18, AR218:18, AR104:17, AR316:16, AR060:13, AR240:12, AR282:11, AR055:9, |
| | | | | AR283:4 L0747:2, H0392:1, H0574:1, H0421:1, L0662:1, L0666:1, S0404:1, L0744:1 |
| | | | | and H0543:1. |
| 41 | HBMBX01 | 705047 | 51 | AR219:38, AR313:32, AR218:31, AR283:30, AR277:27, AR104:27, AR039:25, AR089:23, |
| | | | | AR316:22, AR055:21, AR299:21, AR282:20, AR096:20, AR185:17, AR240:17, AR060:15, |
| | | | | AR300:15 L0748:5, H0318:3, H0543:3, H0484:1, H0402:1, S0474:1, H0421:1, H0052:1, |
| | | | | H0083:1, H0266:1, H0553:1, H0272:1, S0440:1, S0142:1, S0210:1, S0002:1, L0761:1, |
| | | | | L0766:1, L0792:1, H0520:1, H0710:1, L0747:1, H0444:1 and H0595:1. |
| 42 | HBMTM11 | 589515 | 52 | AR039:17, AR313:13, AR219:11, AR055:9, AR218:9, AR104:8, AR096:8, AR089:8, |
| | | | | AR316:8, AR299:7, AR300:7, AR277:7, AR060:7, AR282:6, AR185:6, AR240:6, AR283:2 |
| | | | | S0422:14, L0754:14, L0766:13, L0740:7, L0779:6, L0755:5, H0591:4, L0756:4, |
| | | | | S0354:3, L0663:3, L0438:3, L0777:3, L0752:3, L0362:3, H0423:3, H0624:2, S0218:2, |
| | | | | S0212:2, H0638:2, S0360:2, S0222:2, H0562:2, H0014:2, H0615:2, H0412:2, S0002:2, |
| | | | | L0638:2, L0764:2, S0406:2, H0555:2, L0439:2, L0745:2, L0753:2, H0543:2, H0170:1, |
| | | | | L3643:1, S0040:1, H0713:1, H0740:1, S0134:1, S0116:1, H0669:1, S0442:1, S0444:1, |
| | | | | H0637:1, H0729:1, H0734:1, S0046:1, H0747:1, H0749:1, L0717:1, S6016:1, H0497:1, |
| | | | | H0333:1, L3816:1, H0632:1, H0485:1, H0486:1, H0013:1, H0427:1, H0156:1, L0021:1, |
| | | | | H0122:1, H0318:1, H0596:1, H0546:1, H0046:1, H0457:1, H0123:1, H0375:1, S6028:1, |
| | | | | S0250:1, H0428:1, H0553:1, H0644:1, H0674:1, H0634:1, H0063:1, H0264:1, H0623:1, |
| | | | | H0561:1, H0646:1, H0529:1, L0761:1, L0662:1, L0767:1, L0649:1, L0774:1, L0775:1, |
| | | | | L0375:1, L0805:1, L0776:1, L0658:1, L0518:1, L0783:1, L0809:1, L0647:1, L0367:1, |
| | | | | L0789:1, L0792:1, L0666:1, L0664:1, H0519:1, H0690:1, H0670:1, H0648:1, S0330:1, |
| | | | | S0378:1, H0709:1, H0436:1, S0390:1, S0028:1, L0758:1, L0759:1, S0434:1, S0436:1, |
| | | | | H0668:1, S0412:1 and S0424:1. |
| 43 | HBMTX26 | 695704 | 53 | AR313:88, AR039:66, AR096:36, AR277:36, AR185:35, AR299:34, AR089:32, AR300:31, |
| | | | | AR240:28, AR316:25, AR218:24, AR219:22, AR104:21, AR060:16, AR282:16, AR055:12, |
| | | | | AR283:8 S0116:1 and T0042:1. |
| 44 | HBMTY48 | 637521 | 54 | AR241:34, AR313:20, AR039:19, AR192:19, AR182:18, AR198:16, AR275:14, AR271:13, |
| | | | | AR312:13, AR184:13, AR186:12, AR274:12, AR290:11, AR268:11, AR185:11, AR089:10, |
| | | | | AR204:10, AR267:10, AR096:10, AR270:9, AR299:9, AR052:9, AR240:9, AR213:9, |
| | | | | AR273:9, AR243:9, AR291:8, AR247:8, AR300:8, AR269:8, AR053:8, AR293:8, AR194:8, |
| | | | | AR258:8, AR206:8, AR316:8, AR277:7, AR104:7, AR060:7, AR292:6, AR218:6, AR246:6, |
| | | | | AR309:6, AR183:6, AR263:6, AR244:6, AR202:6, AR205:5, AR233:5, AR296:5, AR282:5, |
| | | | | AR177:5, AR294:5, AR289:5, AR033:5, AR061:5, AR285:5, AR219:5, AR175:5, AR310:4, |
| | | | | AR295:4, AR055:4, AR298:4, AR259:4, AR249:4, AR266:4, AR229:4, AR179:3, AR265:3, |
| | | | | AR256:3, AR248:2, AR283:2, AR284:2, AR280:2, AR286:2, AR226:1, AR237:1 S0116:1, |
| | | | | H0591:1, L2270:1, L0766:1, L2657:1 and H0690:1. |
| 45 | HBMUH74 | 866160 | 55 | AR218:12, AR055:8, AR060:7, AR104:7, AR219:5, AR240:5, AR299:5, AR096:4, |
| | | | | AR316:4, AR300:4, AR039:4, AR089:3, AR283:3, AR185:3, AR313:3, AR282:2, AR277:2 |
| | | | | L0754:3, L0777:3, L0439:2, S0116:1, H0341:1, H0661:1, H0038:1, H0412:1, L0761:1, |
| | | | | L0667:1, L0764:1, L0788:1, H0435:1, L0749:1, L0779:1 and L0758:1. |
| 46 | HBMWE61 | 778066 | 56 | AR313:19, AR104:18, AR219:11, AR055:10, AR060:9, AR277:8, AR218:8, AR283:7, |
| | | | | AR089:7, AR185:6, AR299:6, AR316:5, AR240:5, AR039:5, AR300:5, AR096:4, AR282:4 |
| | | | | S0116:1 |
| 47 | HBNBJ76 | 810332 | 57 | AR104:28, AR283:15, AR185:14, AR240:13, AR055:12, AR089:12, AR218:12, AR060:11, |
| | | | | AR219:11, AR096:10, AR299:9, AR039:9, AR316:8, AR300:7, AR277:7, AR313:7, |
| | | | | AR282:5 H0052:18, L0439:13, L0766:10, S0222:8, L0751:7, L0741:6, H0188:5, |
| | | | | H0617:5, L0438:5, S0360:4, L0764:4, L0748:4, L0740:4, L0753:4, H0265:3, S0040:3, |
| | | | | S0356:3, H0333:3, H0013:3, T0010:3, H0622:3, H0040:3, L0666:3, H0520:3, H0547:3, |
| | | | | H0519:3, L0747:3, L0750:3, L0759:3, S0436:3, H0556:2, H0255:2, H0664:2, H0458:2, |
| | | | | L0005:2, H0728:2, H0549:2, H0581:2, H0309:2, H0009:2, H0178:2, H0135:2, H0090:2, |
| | | | | L0351:2, H0494:2, L0770:2, L0662:2, L0803:2, L0665:2, H0144:2, L0565:2, H0435:2, |
| | | | | H0696:2, H0134:2, H0626:2, L0742:2, L0754:2, L0757:2, S0011:2, H0295:1, H0294:1, |
| | | | | H0583:1, H0341:1, S0418:1, S0420:1, S0442:1, S0354:1, S0007:1, S0476:1, H0619:1, |
| | | | | L3388:1, H0351:1, H0441:1, H0331:1, H0486:1, H0599:1, H0575:1, H0618:1, S0010:1, |
| | | | | T0048:1, S0049:1, H0263:1, H0596:1, H0530:1, H0046:1, H0050:1, H0093:1, S0388:1, |
| | | | | H0594:1, H0290:1, H0328:1, H0615:1, H0428:1, T0023:1, H0030:1, H0031:1, H0628:1, |
| | | | | H0181:1, H0182:1, H0032:1, H0673:1, L0455:1, H0124:1, S0036:1, H0038:1, H0063:1, |
| | | | | H0551:1, H0264:1, S0038:1, S0142:1, S0344:1, S0422:1, L0598:1, L0763:1, L0769:1, |
| | | | | L3905:1, L0768:1, L0376:1, L0806:1, L0629:1, L0807:1, L4501:1, L0663:1, T0068:1, |
| | | | | L3826:1, H0658:1, S0328:1, S0152:1, S3014:1, S0028:1, L0745:1, L0756:1, L0780:1, |
| | | | | S0260:1, H0445:1, L0591:1, L0603:1, S0196:1, H0542:1, H0423:1, H0422:1, L0600:1 |
| | | | | and H0352:1. |
| 48 | HBQAC57 | 793814 | 58 | H0229:1 and L0780:1. |
| 49 | HBSAK32 | 856387 | 59 | AR277:18, AR104:14, AR218:14, AR219:13, AR299:13, AR313:12, AR316:12, AR089:12, |
| | | | | AR185:12, AR283:11, AR060:11, AR039:11, AR096:11, AR240:10, AR055:10, AR282:10, |
| | | | | AR300:7 L0790:2, H0170:1, H0381:1, S0001:1, S0282:1, L0021:1, S0112:1, L0640:1, |
| | | | | L0766:1, L0774:1, L0651:1, L0517:1, L0783:1, L0809:1, L0519:1, L0743:1, L0751:1, |
| | | | | L0747:1, L0749:1, L0750:1, L0777:1, L0755:1, L0758:1 and L0759:1. |
| 50 | HBXCM66 | 639039 | 60 | AR313:74, AR039:52, AR299:36, AR300:36, AR096:35, AR089:32, AR277:32, AR185:32, |
| | | | | AR240:23, AR316:22, AR218:15, AR104:14, AR219:14, AR060:13, AR282:11, AR055:7, |
| | | | | AR283:3 H0550:2, L0523:2, S0282:1, S0045:1, H0549:1, H0052:1 and S0038:1. |
| 51 | HBXCX15 | 637542 | 61 | S0038:3, H0438:1, L0363:1 and S0053:1. |
| 52 | HCDCY76 | 837972 | 62 | AR219:7, AR218:6, AR055:2, AR282:2, AR060:2, AR299:1, AR104:1, AR185:1, AR240:1, |
| | | | | AR277:1 L1430:5, L0770:2, L0754:2, L0747:2, L0777:2, S0360:1, S0045:1, H0486:1, |
| | | | | H0616:1, L0803:1, L0775:1, L0783:1, L0787:1, L0789:1, L0750:1, S0194:1 and |
| | | | | S0276:1. |
| 53 | HCDDL48 | 839743 | 63 | AR282:5, AR055:5, AR060:4, AR240:3, AR283:3, AR300:2, AR316:2, AR104:2, AR039:2, |
| | | | | AR313:2, AR185:1, AR218:1, AR089:1, AR299:1, AR219:1, AR096:1 H0251:1 |
| 54 | HCE1G78 | 761204 | 64 | AR277:13, AR060:9, AR104:9, AR218:8, AR055:8, AR282:8, AR299:8, AR283:7, |
| | | | | AR039:7, AR185:6, AR089:6, AR219:6, AR316:5, AR300:5, AR096:5, AR313:5, AR240:5 |
| | | | | L0439:8, S0356:2, L0803:2, L0809:2, L0666:2, L0752:2, S0442:1, H0052:1, H0194:1, |
| | | | | H0617:1, H0040:1, H0100:1, L5565:1, L0774:1, L0787:1 and L0593:1. |
| 55 | HCE2H52 | 847007 | 65 | AR039:9, AR096:8, AR185:7, AR218:6, AR060:6, AR313:6, AR055:6, AR300:5, AR240:5, |
| | | | | AR299:5, AR089:5, AR104:5, AR316:4, AR277:4, AR283:3, AR219:2, AR282:2 H0255:2, |
| | | | | S0410:2, H0052:1, H0673:1, H0538:1, H0444:1 and H0445:1. |
| 56 | HCE3B04 | 831151 | 66 | AR218:12, AR055:10, AR089:10, AR219:8, AR313:8, AR299:8, AR316:7, AR060:7, |
| | | | | AR104:6, AR185:6, AR039:6, AR096:5, AR300:5, AR277:5, AR240:4, AR283:4, AR282:4 |
| | | | | L0803:3, L0740:3, H0052:2, L0766:2, L0666:2, L0756:2, L0717:1, L0646:1, L0662:1, |
| | | | | L0649:1, L0634:1, L0659:1, L0791:1, L0663:1, L0664:1, L0352:1, S0328:1, L0752:1, |
| | | | | L0758:1 and L0594:1. |
| 57 | HCE5F78 | 838101 | 67 | H0052:2 and H0445:2. |
| 58 | HCEEE79 | 560609 | 68 | H0052:1 |
| 59 | HCEBQ25 | 531784 | 69 | AR039:8, AR313:7, AR185:7, AR055:7, AR300:6, AR060:6, AR240:6, AR218:6, AR089:5, |
| | | | | AR299:5, AR104:5, AR096:4, AR316:4, AR277:3, AR282:3, AR283:3, AR219:3 H0052:1 |
| | | | | and H0144:1. |
| 60 | HCEEU18 | 688041 | 70 | AR313:46, AR039:35, AR299:24, AR219:21, AR277:21, AR089:20, AR096:19, AR185:19, |
| | | | | AR218:16, AR316:14, AR300:13; AR104:13, AR240:12, AR060:11, AR282:10, AR055:9, |
| | | | | AR283:5 H0052:1 |
| 61 | HCEFG93 | 745400 | 71 | AR313:44, AR039:38, AR299:23, AR185:18, AR089:17, AR277:16, AR096:15, AR300:15, |
| | | | | AR219:15, AR104:14, AR218:12, AR316:11, AR240:9, AR060:8, AR282:6, AR055:6, |
| | | | | AR283:3 H0052:1 |
| 62 | HCEFZ82 | 831745 | 72 | L0748:11, H0052:8, L0803:8, L0749:8, L0770:7, L0439:5, L0746:4, L0752:4, |
| | | | | L3811:3, H0575:2, H0012:2, H0031:2, L0768:2, L0804:2, L0774:2, L0740:2, L0747:2, |
| | | | | L0756:2, L0779:2, L0757:2, L0758:2, L0592:2, L0593:2, H0556:1, S0420:1, S0376:1, |
| | | | | H0441:1, H0632:1, S0010:1, T0115:1, H0545:1, H0009:1, H0620:1, H0197:1, H0051:1, |
| | | | | S0388:1, S0051:1, H0252:1, H0032:1, L0455:1, H0591:1, H0272:1, L0564:1, S0438:1, |
| | | | | S0344:1, L0373:1, L0646:1, L0794:1, L0766:1, L0805:1, L0776:1, L0783:1, L0809:1, |
| | | | | S0374:1, H0522:1, H0134:1, L0780:1, L0731:1, L0759:1, S0436:1, L0597:1, H0543:1, |
| | | | | H0423:1 and L0600:1. |
| 63 | HCEGG08 | 844506 | 73 | AR240:6, AR282:6, AR104:5, AR060:5, AR055:4, AR089:4, AR277:4, AR096:4, AR283:3, |
| | | | | AR039:3, AR300:3, AR299:3, AR313:3, AR185:2, AR219:2, AR316:2, AR218:2 L0439:15, |
| | | | | H0052:11, S0007:9, L0438:6, L0731:6, L0779:5, L0754:4, H0550:3, L0769:3, |
| | | | | S0126:3, L0743:3, H0194:2, H0687:2, H0623:2, L0768:2, L0776:2, L0659:2, L0666:2, |
| | | | | L0663:2, H0689:2, S0330:2, L0748:2, L0786:2, L0777:2, L0752:2, L0758:2, L0608:2, |
| | | | | H0352:2, H0662:1, S0356:1, S0354:1, S0444:1, S0045:1, S0476:1, H0441:1, H0431:1, |
| | | | | H0333:1, H0642:1, H0575:1, H0590:1, T0048:1, H0150:1, H0024:1, S0050:1, S0388:1, |
| | | | | H0252:1, H0039:1, H0135:1, H0038:1, H0264:1, H0494:1, L0770:1, L4747:1, L0372:1, |
| | | | | L0646:1, L0521:1, L0794:1, L0803:1, L0775:1, L0653:1, L0661:1, L0807:1, L0657:1, |
| | | | | L0809:1, L0792:1, L0664:1, L2258:1, H0144:1, L0352:1, H0519:1, H0593:1, H0658:1, |
| | | | | H0672:1, H0539:1, S0406:1, L0751:1, L0749:1, L0756:1, L0753:1, H0506:1 and |
| | | | | L2357:1. |
| 64 | HCEGX05 | 827060 | 74 | AR219:16, AR104:13, AR218:13, AR089:11, AR185:9, AR313:9, AR299:8, AR240:8, |
| | | | | AR096:8, AR316:8, AR055:7, AR039:6, AR060:6, AR300:6, AR283:5, AR277:4, AR282:4 |
| | | | | L0766:11, L0748:5, L0757:4, L0662:3, H0587:2, L3816:2, L0041:2, H0039:2, |
| | | | | L0659:2, L0438:2, H0672:2, H0521:2, L0750:2, L0758:2, L0596:2, L0589:2, L0605:2, |
| | | | | H0265:1, H0341:1, H0728:1, S0222:1, H0600:1, L0623:1, H0069:1, H0052:1, H0569:1, |
| | | | | S0388:1, T0010:1, L0055:1, L0456:1, H0560:1, H0641:1, S0426:1, L0770:1, L0769:1, |
| | | | | L5575:1, L0794:1, L0776:1, L0783:1, L0382:1, L0666:1, L0663:1, S0052:1, S0216:1, |
| | | | | H0702:1, L3825:1, L3828:1, H0670:1, H0539:1, H0522:1, S0406:1, S0390:1, L0743:1, |
| | | | | L0744:1, L0439:1, L0740:1, L0747:1, L0779:1, L0777:1, H0445:1, S0436:1, H0542:1, |
| | | | | H0423:1 and H0422:1. |
| 65 | HCFLN88 | 610000 | 75 | S0410:22, L0770:9, L0748:9, L0769:7, L0776:6, L0659:6, H0424:5, L0761:5, |
| | | | | L0731:5, H0486:4, L0803:4, L0809:4, L0666:4, H0696:4, L0754:4, L0779:4, L0758:4, |
| | | | | H0729:3, H0618:3, H0135:3, L0637:3, L0771:3, L0766:3, L0805:3, L0665:3, L0751:3, |
| | | | | H0542:3, H0341:2, H0402:2, S0358:2, S0376:2, S0360:2, H0747:2, S0132:2, L3109:2, |
| | | | | L0717:2, H0592:2, H0253:2, S0010:2, H0052:2, H0545:2, H0050:2, H0617:2, H0087:2, |
| | | | | H0551:2, H0100:2, H0560:2, L0763:2, L5565:2, L0646:2, L0764:2, L0655:2, L0663:2, |
| | | | | L2260:2, S0374:2, H0414:2, S0406:2, H0436:2, L0743:2, L0740:2, L0749:2, L0755:2, |
| | | | | L0757:2, L0759:2, H0445:2, H0136:2, H0543:2, H0423:2, H0352:2, H0170:1, H0171:1, |
| | | | | H0225:1, H0713:1, S0218:1, L0785:1, H0692:1, S0212:1, H0483:1, H0254:1, H0305:1, |
| | | | | S0356:1, S0442:1, S0444:1, S0408:1, H0619:1, H0393:1, H0406:1, H0370:1, H0249:1, |
| | | | | H0101:1, H0250:1, S0280:1, H0599:1, H0575:1, H0706:1, T0048:1, H0318:1, S0474:1, |
| | | | | H0581:1, T0115:1, H0009:1, H0572:1, H0024:1, S0051;1 H0271:1, H0288:1, T0006:1, |
| | | | | H0213:1, H0553:1, H0644:1, S0364:1, H0163:1, H0090:1, H0264:1, H0488:1, S0112:1, |
| | | | | H0494:1, H0652:1, S0344:1, S0002:1, S0426:1, L4497:1, L5575:1, L3905:1, L5566:1, |
| | | | | L0772:1, L0641:1, L0645:1, L0773:1, L0650:1, L0774:1, L0775:1, L0378:1, L0806:1, |
| | | | | L0783:1, L5622:1, L0790:1, L0664:1, L3827:1, H0547:1, H0519:1, S0126:1, H0711:1, |
| | | | | H0672:1, S0330:1, H0521:1, S0392:1, S0037:1, L0742:1, L0439:1, L0745:1, L0747:1, |
| | | | | L0750:1, L0777:1, S0436:1, L0485:1, L0608:1, S0011:1, H0653:1 and H0422:1. |
| 66 | HCFLT90 | 788578 | 76 | AR218:22, AR219:21, AR313:17, AR240:17, AR096:15, AR089:13, AR104:11, AR316:11, |
| | | | | AR060:10, AR185:9, AR055:8, AR282:8, AR300:7, AR299:7, AR039:5, AR277:5, AR283:1 |
| | | | | L0777:11, L0745:9, L0754:7, L0769:4, L0747:4, L0766:3, L0649:3, L0749:3, |
| | | | | L0779:3, L0757:3, H0580:2, H0266:2, H0181:2, H0617:2, L0770:2, H0651:2, H0522:2, |
| | | | | L0748:2, L0740:2, L0746:2, S0434:2, H0136:2, H0423:2, H0716:1, H0295:1, H0657:1, |
| | | | | L3659:1, H0459:1, S0360:1, S0410:1, H0733:1, S0132:1, S0476:1, S0300:1, H0013:1, |
| | | | | L0021:1, H0575:1, S0010:1, H0530:1, H0545:1, H0594:1, H0292:1, H0553:1, L0143:1, |
| | | | | H0068:1, S0036:1, H0059:1, H0561:1, H0641:1, S0344:1, S0422:1, L0772:1, L0764:1, |
| | | | | L0771:1, L0662:1, L0775:1, L0776:1, L0527:1, L0663:1, L0438:1, H0520:1, S0126:1, |
| | | | | H0689:1, H0659:1, H0539:1, S0027:1, L0439:1, L0751:1, L0750:1, L0752:1, L0755:1, |
| | | | | L0758:1, L0592:1, S0026:1, L3813:1 and H0721:1. |
| 67 | HCLBK61 | 845659 | 77 | AR185:98, AR096:71, AR055:67, AR104:53, AR240:51, AR089:49, AR219:36, AR218:34, |
| | | | | AR299:28, AR316:27, AR300:25, AR039:24, AR277:22, AR060:21, AR313:20, AR283:18, |
| | | | | AR282:17 H0156:3, H0052:3, L0731:3, T0040:2, H0599:2, S0010:2, H0050:2, H0012:2, |
| | | | | H0201:2, S6028:2, H0188:2, H0628:2, H0038:2, L0796:2, S0037:2, S3014:2, S0032:2, |
| | | | | L0777:2, S0114:1, S0212:1, H0663:1, S0418:1, H0735:1, H0351:1, H0550:1, T0039:1, |
| | | | | H0013:1, H0004:1, H0318:1, L0738:1, H0544:1, H0545:1, H0009:1, H0123:1, H0024:1, |
| | | | | H0594:1, S0022:1, H0031:1, HO644:1, H0135:1, H0090:1, H0616:1, T0041:1, H0646:1, |
| | | | | S0210:1, L3905:1, L0761:1, L0521:1, L0807:1, L0809:1, L0789:1, S0310:1, S0126:1, |
| | | | | H0658:1, S0044:1, S0406:1, S0027:1, S0028:1, S0206:1, L0748:1, L0439:1, L0740:1, |
| | | | | L0751:1, L0779:1, L0759:1, S0436:1, L0485:1, L0599:1, L0594:1, L0603:1, S0194:1 |
| | | | | and S0276:1. |
| 68 | HCQCC96 | 845066 | 78 | AR252:46, AR197:44, AR204:38, AR195:35, AR253:34, AR178:31, AR230:31, AR254:31, |
| | | | | AR233:29, AR250:28, AR180:28, AR198:28, AR266:26, AR243:26, AR193:24, AR239:23, |
| | | | | AR061:23, AR267:23, AR201:23, AR227:22, AR229:22, AR228:22, AR237:21, AR162:21, |
| | | | | AR181:21, AR163:21, AR170:21, AR161:20, AR257:20, AR192:20, AR226:20, AR176:19, |
| | | | | AR234:19, AR171:18, AR183:18, AR245:18, AR271:18, AR182:17, AR258:17, AR270:17, |
| | | | | AR179:17, AR275:17, AR238:16, AR231:16, AR296:16, AR261:16, AR033:16, AR174:15, |
| | | | | AR185:15, AR255:15, AR164:15, AR262:15, AR207:15, AR053:15, AR165:15, AR272:14, |
| | | | | AR256:14, AR039:14, AR269:14, AR242:14, AR166:14, AR205:14, AR175:14, AR246:14, |
| | | | | AR300:13, AR203:13, AR289:12, AR236:12, AR104:12, AR316:11, AR232:11, AR293:11, |
| | | | | AR055:11, AR287:11, AR169:11, AR260:11, AR235:11, AR168:11, AR089:11, AR173:10, |
| | | | | AR308:10, AR286:10, AR268:10, AR291:10, AR060:10, AR297:10, AR313:10, AR288:10, |
| | | | | AR212:10, AR213:10, AR299:10, AR177:10, AR188:9, AR096:9, AR190:9, AR191:9, |
| | | | | AR294:9, AR282:9, AR285:9, AR283:9, AR172:8, AR277:8, AR189:8, AR247:8, AR309:8, |
| | | | | AR312:8, AR274:8, AR240:7, AR218:7, AR264:7, AR210:6, AR200:6, AR295:6, AR290:6, |
| | | | | AR219:6, AR215:6, AR199:5, AR263:5, AR196:5, AR223:5, AR311:5, AR216:5, |
| | | | | AR214:4, AR224:4, AR225:4, AR211:4, AR217:4, AR221:2, AR222:2 S0360:5, L0748:5, |
| | | | | L0766:3, H0657:2, L3388:2, H0581:2, H0596:2, H0563:2, S0003:2, H0328:2, H0670:2, |
| | | | | L0756:2, S0436:2, S0026:2, H0170:1, H0556:1, H0344:1, H0650:1, H0656:1, H0638:1, |
| | | | | S0420:1, H0675:1, S0007:1, H0574:1, H0632:1, H0013:1, H0036:1, S0010:1, H0318:1, |
| | | | | H0052:1, H0251:1, H0150:1, H0050:1, H0090:1, H0038:1, S0440:1, H0130:1, S0142:1, |
| | | | | S0422:1, H0529:1, L0803:1, L0659:1, L5623:1, L0666:1, S0428:1, S0126:1, H0689:1, |
| | | | | H0648:1, H0672:1, S0330:1, H0539:1, S0378:1, H0521:1, H0522:1, H0478:1, L0744:1, |
| | | | | L0754:1, L0779:1, L0752:1, S0260:1, H0445:1, H0343:1, H0595:1, S0434:1, H0423:1 |
| | | | | and S0424:1. |
| 69 | HCQCJ56 | 832157 | 79 | AR055:8, AR060:5, AR104:4, AR240:3, AR218:3, AR299:3, AR300:3, AR185:3, AR277:3, |
| | | | | AR089:2, AR283:2, AR282:2, AR039:2, AR316:2, AR096:2, AR219:2 L0779:4, L0777:3, |
| | | | | H0050:2, H0670:2, L0748:2, L0717:1, H0596:1, L0641:1, L0794:1, L0803:1, L0774:1, |
| | | | | L0809:1 and L0749:1. |
| 70 | HCRAY10 | 695709 | 80 | AR089:10, AR060:10, AR055:10, AR277:10, AR218:9, AR299:8, AR185:8, AR240:8, |
| | | | | AR283:7, AR300:7, AR316:7, AR096:7, AR282:6, AR313:6, AR104:6, AR039:6, AR219:5 |
| | | | | L0758:6, H0545:3, L0754:3, L0759:3, H0170:2, L0766:2, L0649:2, L0665:2, H0696:2, |
| | | | | H0177:1, H0549:1, H0392:1, H0327:1, L0695:1, H0674:1, H0529:1, L0762:1, L0769:1, |
| | | | | L0800:1, L4753:1, L0658:1, L0809:1, L2263:1, L0740:1 and L0777:1. |
| 71 | HCRBF72 | 828945 | 81 | AR231:6, AR291:4, AR230:3, AR299:3, AR033:3, AR161:2, AR185:2, AR197:2, AR162:2, |
| | | | | AR060:2, AR181:2, AR215:2, AR311:2, AR288:2, AR271:2, AR216:2, AR196:1, AR257:1, |
| | | | | AR309:1, AR089:1, AR313:1, AR236:1, AR267:1, AR289:1 L0794:7, H0551:4, H0618:3, |
| | | | | H0617:3, L0769:3, L0747:3, H0556:2, S0356:2, L0771:2, L0789:2, L0748:2, L0757:2, |
| | | | | L0758:2, L0596:2, L0601:2, H0170:1, H0295:1, H0650:1, H0657:1, H0341:1, H0254:1, |
| | | | | H0580:1, S0045:1, H0370:1, L0623:1, H0013:1, H0069:1, H0706:1, H0253:1, H0581:1, |
| | | | | H0327:1, H0546:1, H0545:1, H0178:1, H0083:1, H0266:1, L0483:1, H0606:1, L0055:1, |
| | | | | H0165:1, H0068:1, H0616:1, H0087:1, H0059:1, H0494:1, S0438:1, S0422:1, H0529:1, |
| | | | | L3904:1, L5575:1, L0372:1, L0768:1, L0387:1, L0806:1, L0807:1, L0809:1, L5623:1, |
| | | | | L3820:1, L2260:1, S0148:1, H0547:1, H0435:1, H0660:1, H0666:1, S0152:1, H0521:1, |
| | | | | H0696:1, H0627:1, H0631:1, L0743:1, L0749:1, L0750:1, L0779:1, L0759:1, L0593:1, |
| | | | | H0665:1, S0192:1 and H0543:1. |
| 72 | HCRNF78 | 793774 | 82 | AR313:6, AR218:4, AR299:4, AR277:2, AR039:2, AR300:2, AR185:2, AR089:2, AR096:2, |
| | | | | AR316:2, AP219:2, AR282:1, AR104:1 H0031:3, L0777:3, L0803:2, L0439:2, L0608:2, |
| | | | | S0114:1, S0001:1, S0356:1, H0587:1, H0013:1, H0036:1, H0274:1, H0622:1, S0036:1, |
| | | | | H0038:1, H0561:1, L0662:1, L0794:1, L0804:1, L0657:1, L0787:1, L0791:1, L0666:1, |
| | | | | L0663:1, H0660:1, L0758:1, L0589:1, S0194:1 and H0423:1. |
| 73 | HCUAF85 | 589520 | 83 | AR247:4, AR265:4, AR253:3, AR202:3, AR251:2, AR186:2, AR183:2, AR267:2, AR270:2, |
| | | | | AR295:2, AR205:2, AR033:2, AR248:2, AR268:2, AR271:2, AR292:2, AR285:2, AR296:2, |
| | | | | AR269:2, AR291:2, AR229:1, AR206:1, AR290:1, AR282:1, AR266:1, AR294:1, AR275:1, |
| | | | | AR298:1, AR277:1, AR213:1, AR310:1, AR053:1, AR286:1, AR061:1, AR240:1, AR273:1, |
| | | | | AR052:1, AR263:1, AR184:1, AR299:1, AR231:1, AR237:1 H0306:2 and H0305:1. |
| 74 | HCUCF89 | 637986 | 84 | AR313:26, AR039:18, AR277:13, AR299:12, AR096:11, AR089:11, AR185:11, AR300:10, |
| | | | | AR240:8, AR316:8, AR218:5, AR282:4, AR104:4, AR060:4, AR219:3, AR055:2 H0306:1, |
| | | | | L0761:1 and H0436:1. |
| 75 | HCUCK44 | 790277 | 85 | AR172:3, AR245:3, AR252:3, AR161:3, AR164:3, AR166:3, AR221:2, AR162:2, AR163:2, |
| | | | | AR169:2, AR311:2, AR261:2, AR165:2, AR214:2, AR224:2, AR296:2, AR264:1, AR195:1, |
| | | | | AR277:1, AR212:1, AR217:1, AR096:1, AR193:1, AR295:1, AR287:1, AR216:1, AR213:1, |
| | | | | AR257:1, AR275:1, AR089:1, AR201:1, AR282:1 L3450:19, H0271:18, S0002:12, |
| | | | | L0794:12, S0144:8, L3783:8, L3807:8, H0250:7, L0777:7, L3119:6, L3729:6, |
| | | | | L0665:6, H0518:6, S0132:5, H0264:5, S0426:5, S0328:5, S0330:5, L0758:5, S0444:4, |
| | | | | S0344:4, L0770:4, L0776:4, L0659:4, S0052:4, S0053:4, L0743:4, L0747:4, S0436:4, |
| | | | | L0065:3, L0769:3, L0766:3, L0774:3, L0657:3, H0521:3, L0748:3, L0749:3, L0731:3, |
| | | | | L2999:2, H0306:2, H0402:2, H0638:2, S0360:2, S0408:2, S0476:2, H0393:2, S0278:2, |
| | | | | L3516:2, H0050:2, H0014:2, H0416:2, H0617:2, H0634:2, H0494:2, S0440:2, L0800:2, |
| | | | | L0771:2, L0648:2, L0549:2, L0806:2, L0805:2, L0666:2, S0428:2, S0216:2, L3210:2, |
| | | | | S0404:2, L0439:2, L0740:2, L0750:2, L0752:2, L0596:2, L0599:2, T0002:1, H0159:1, |
| | | | | H0650:1, H0657:1, L0785:1, H0662:1, L3659:1, S0442:1, S0358:1, S0410:1, L3646:1, |
| | | | | H0741:1, L3117:1, H0619:1, L2791:1, H0613:1, H0600:1, H0592:1, H0486:1, L2504:1, |
| | | | | L3750:1, H0069:1, H0581:1, H0596:1, H0044:1, H0009:1, H0024:1, H0057:1, S0051:1, |
| | | | | H0355:1, H0615:1, L0483:1, S0036:1, H0090:1, H0038:1, H0087:1, H0413:1, H0100:1, |
| | | | | S0448:1, S0142:1, S0210:1, H0529:1, L3904:1, L0761:1, L0772:1, L0372:1, L0646:1, |
| | | | | L0645:1, L0764:1, L0773:1, L0662:1, L0768:1, L0387:1, L0649:1, L0551:1, L0550:1, |
| | | | | L0803:1, L0775:1, L0653:1, L0655:1, L0656:1, L0782:1, L0787:1, L4537:1, L2257:1, |
| | | | | S0374:1, H0690:1, H0659:1, H0658:1, S0378:1, H0710:1, S0152:1, H0696:1, H0704:1, |
| | | | | S0406:1, H0436:1, L0744:1, L0756:1, L0779:1, L0780:1, L0755:1, L0759:1, S0031:1, |
| | | | | L0581:1, L0601:1, L0603:1, S0196:1, L3632:1 and H0352:1. |
| 76 | HCUDD64 | 835082 | 86 | AR282:3, AR219:3 H0052:3, S3012:2, L0754:2, H0402:1, H0413:1, S0374:1, L0438:1, |
| | | | | L0748:1 and L0740:1. |
| 77 | HCWAE64 | 535893 | 87 | AR277:7, AR282:1 H0305:1 |
| 78 | HCWFU39 | 651316 | 88 | AR277:20, AR313:11, AR039:8, AR300:7, AR299:6, AR185:5, AR096:5, AR240:5, |
| | | | | AR089:4, AR282:3, AR316:3, AR104:2, AR055:1, AR060:1 H0305:3, H0589:1, H0052:1 |
| | | | | and T0010:1. |
| 79 | HDHAA42 | 695710 | 89 | AR283:17, AR277:13, AR104:12, AR282:11, AR316:11, AR055:10, AR089:10, AR219:9, |
| | | | | AR313:9, AR096:9, AR218:9, AR299:9, AR300:8, AR060:8, AR185:8, AR039:7, AR240:6 |
| | | | | H0616:4, L0803:3, H0038:2, L0809:2, H0555:2, L0439:2, L0759:2, L0005:1, S0049:1, |
| | | | | H0569:1, S0050:1, L0163:1, S0003:1, S0440:1, S0422:1, L0771:1, L0649:1, L0804:1, |
| | | | | L0774:1, L0775:1, L0784:1, L0659:1, L0788:1, L0664:1, L0438:1, H0648:1, S0330:1, |
| | | | | L0602:1, L0744:1, L0748:1, L0745:1, L0747:1, L0749:1, L0752:1, L0758:1, S0436:1, |
| | | | | L0608:1, S0196:1 and S0412:1. |
| 80 | HDHEB76 | 553622 | 90 | AR060:2, AR055:1 H0170:1 and H0570:1. |
| 81 | HDPCW16 | 840358 | 91 | AR089:36, AR185:34, AR219:34, AR218:27, AR104:14, AR316:13, AR282:12, AR277:10, |
| | | | | AR240:8, AR283:8, AR313:7, AR096:6, AR039:6, AR055:5, AR299:4, AR300:4, AR060:4 |
| | | | | L0783:7, H0441:5, L0666:4, H0617:3, L3905:3, L0439:3, T0049:2, H0341:2, H0661:2, |
| | | | | L0717:2, H0009:2, L0471:2, H0641:2, L0764:2, L0662:2, L0659:2, L0792:2, L0663:2, |
| | | | | H0521:2, L0748:2, H0657:1, H0255:1, H0664:1, H0402:1, S0418:1, S0045:1, S0046:1, |
| | | | | H0749:1, H0370:1, H0600:1, H0497:1, H0333:1, H0486:1, L0021:1, H0706:1, H0544:1, |
| | | | | H0545:1, H0046:1, H0041:1, H0178:1, L0157:1, H0673:1, T0069:1, L0351:1, H0494:1, |
| | | | | H0625:1, H0649:1, L0502:1, L0770:1, L0769:1, L5575:1, L0645:1, L0533:1, L0493:1, |
| | | | | L0517:1, L0518:1, L0782:1, L0809:1, L0787:1, L0789:1, L0665:1, L0438:1, H0520:1, |
| | | | | S0126:1, H0690:1, H0539:1, L0609:1, L0612:1, L0747:1, L0749:1, L0786:1, L0779:1, |
| | | | | L0731:1, L0758:1, H0653:1, H0667:1 and H0352:1. |
| 82 | HDPDI72 | 897277 | 92 | AR263:7, AR039:6, AR089:5, AR184:5, AR096:4, AR313:4, AR299:4, AR282:3, AR277:3, |
| | | | | AR240:3, AR060:3, AR218:3, AR249:3, AR316:3, AR185:2, AR055:2, AR274:2, AR104:2, |
| | | | | AR267:2, AR247:2, AR300:2, AR206:1, AR283:1, AR052:1, AR312:1, AR275:1, AR183:1, |
| | | | | AR270:1, AR309:1, AR238:1 H0521:2 and H0580:1. |
| 83 | HDPDJ58 | 587265 | 93 | AR263:8, AR249:6, AR053:5, AR270:5, AR312:5, AR039:4, AR309:4, AR096:4, AR052:4, |
| | | | | AR198:4, AR183:4, AR253:4, AR313:4, AR282:4, AR243:3, AR269:3, AR184:3, AR192:3, |
| | | | | AR267:3, AR268:3, AR213:3, AR316:3, AR290:3, AR310:2, AR240:2, AR275:2, AR273:2, |
| | | | | AR186:2, AR238:2, AR298:2, AR206:2, AR234:2, AR277:2, AR177:2, AR292:2, AR226:1, |
| | | | | AR060:1, AR237:1, AR296:1, AR205:1, AR299:1, AR033:1, AR294:1, AR293:1, AR291:1, |
| | | | | AR231:1, AR175:1, AR182:1, AR185:1, AR284:1, AR218:1 L0766:14, H0457:10, |
| | | | | H0486:4, H0581:4, S0406:4, H0422:4, H0171:3, L0655:3, H0521:3, L0779:3, H0749:2, |
| | | | | H0156:2, H0090:2, H0551:2, L0598:2, L0666:2, L0438:2, L0748:2, L0756:2, L0777:2, |
| | | | | T0002:1, H0656:1, S0212:1, H0662:1, H0638:1, S0442:1, S0140:1, H0747:1, H0261:1, |
| | | | | H0587:1, L3816:1, H0574:1, L0586:1, L0022:1, H0318:1, H0123:1, L0471:1, H0039:1, |
| | | | | H0591:1, T0041:1, S0344:1, S0426:1, UNKWN:1, L0794:1, L0387:1, L0776:1, L0606:1, |
| | | | | L0659:1, L0367:1, L0792:1, L0793:1, H0690:1, H0539:1, H0436:1, L0439:1, L0780:1, |
| | | | | L0755:1, L0759:1, H0445:1, H0423:1 and H0506:1. |
| 84 | HDPFU43 | 790189 | 94 | AR277:53, AR283:13, AR096:12, AR240:12, AR316:11, AR219:11, AR218:10, AR104:9, |
| | | | | AR282:9, AR299:8, AR039:8, AR313:8, AR185:8, AR300:7, AR060:7, AR055:7, AR089:7 |
| | | | | H0585:8, L3388:8, S0474:7, H0622:4, H0141:3, H0553:3, S0126:3, H0539:3, L0750:3, |
| | | | | H0556:2, H0717:2, H0581:2, S0440:2, S0344:2, L0771:2, L0774:2, L0664:2, S0380:2, |
| | | | | H0521:2, L0751:2, L0755:2, L3643:1, H0650:1, H0306:1, S0420:1, L0617:1, S0444:1, |
| | | | | S0360:1, H0580:1, S0046:1, H0619:1, H0549:1, H0486:1, T0039:1, L0021:1, H0274:1, |
| | | | | H0457:1, H0012:1, H0620:1, S0003:1, S0214:1, H0615:1, H0628:1, H0087:1, H0551:1, |
| | | | | S0438:1, S0422:1, H0529:1, L0770:1, L0761:1, L0767:1, L0768:1, L0804:1, L0515:1, |
| | | | | L0809:1, H0703:1, H0711:1, H0672:1, S0378:1, H0522:1, H0696:1, H0555:1, S3014:1, |
| | | | | L0754:1, L07471, L0749:1, L0731:1, H0445:1, S0436:1, L0581:1, S0026:1, H0543:1 |
| | | | | and H0423:1. |
| 85 | HDPFYI8 | 779450 | 95 | AR313:9, AR039:6, AR299:4, AR300:4, AR096:3, AR185:3, AR089:3, AR316:2, AR277:2, |
| | | | | AR240:1, AR218:1, AR060:1 S0114:1, H0427:1, H0123:1, H0688:1, H0264:1, L0547:1, |
| | | | | L0518:1, L3811:1, H0521:1, H0445:1 and H0543:1. |
| 86 | HDPIE44 | 899328 | 96 | AR263:6, AR265:3, AR184:3, AR183:3, AR096:3, AR313:3, AR269:3, AR039:3, AR104:2, |
| | | | | AR312:2, AR270:2, AR268:2, AR298:2, AR296:2, AR292:2, AR060:2, AR052:2, AR282:2, |
| | | | | AR291:2, AR198:2, AR316:2, AR192:2, AR299:2, AR286:2, AR267:2, AR218:2, AR055:2, |
| | | | | AR295:2, AR290:2, AR283:2, AR089:2, AR289:1, AR231:1, AR213:1, AR247:1, AR284:1, |
| | | | | AR293:1, AR053:1, AR033:1, AR238:1, AR258:1, AR182:1, AR177:1, AR277:1, AR185:1, |
| | | | | AR310:1 L3811:7, L0439:7, L0759:5, L0591:5, L0803:4, H0547:4, L0748:4, L0755:4, |
| | | | | L0596:4, H0171:3, S0376:3, S0007:3, H0024:3, H0355:3, H0615:3, H0428:3, H0090:3, |
| | | | | H0623:3, S0422:3, L0794:3, L0766:3, L0659:3, H0144:3, H0658:3, S0406:3, L0749:3, |
| | | | | L0758:3, S0436:3, H0624:2, H0717:2, S0358:2, S0360:2, H0486:2, H0427:2, S0010:2, |
| | | | | H0052:2, H0251:2, H0687:2, H0622:2, H0553:2, H0644:2, H0591:2, S0438:2, L0769:2, |
| | | | | L0662:2, L0805:2, S0374:2, S0126:2, H0689:2, H0670:2, H0521:2, S0028:2, L0744:2, |
| | | | | L0740:2, L0754:2, L0752:2, L0593:2, S0192:2, H0506:2, H0265:1, H0294:1, H0656:1, |
| | | | | S0212:1, L0481:1, S0418:1, L0005:1, S0356:1, S0442:1, S0408:1, H0733:1, H0208:1, |
| | | | | S0045:1, H0619:1, L0717:1, S0222:1, H0455:1, L3653:1, H0013:1, H0599:1, S0474:1, |
| | | | | H0196:1, H0263:1, H0046:1, H0172:1, H0050:1, L0471:1, H0012:1, H0620:1, H0014:1, |
| | | | | H0051:1, H0356:1, H0375:1, S0316:1, H0328:1, H0688:1, L0483:1, S0364:1, S0366:1, |
| | | | | H0135:1, H0163:1, H0038:1, H0040:1, H0634:1, H0551:1, H0488:1, T0042:1, H0494:1, |
| | | | | S0016:1, H0625:1, H0561:1, S0440:1, L2270:1, S0344:1, L3818:1, H0538:1, L0598:1, |
| | | | | L0770:1, L0638:1, L0641:1, L0626:1, L0804:1, L0375:1, L0784:1, L0523:1, L0806:1, |
| | | | | L0776:1, L0526:1, L0809:1, L5622:1, L0789:1, L0793:1, L4559:1, L0663:1, L4560:1, |
| | | | | L3826:1, L3828:1, H0683:1, H0672:1, H0651:1, S0330:1, H0539:1, H0555:1, S0390:1, |
| | | | | S0206:1, L0747:1, L0779:1, S0308:1, L0604:1 and H0423:1. |
| 87 | HDPIU94 | 813352 | 97 | AR055:17, AR277:13, AR060:12, AR316:9, AR219:8, AR240:8, AR089:8, AR300:8, |
| | | | | AR218:8, AR039:7, AR283:7, AR096:6, AR282:5, AR104:5, AR185:4, AR299:4, AR313:2 |
| | | | | L0748:6, L0666:5, L0665:5, L0768:4, L0777:4, L0595:4, H0352:4, S0045:3, H0124:3, |
| | | | | L0774:3, S0028:3, L0439:3, L0756:3, L0592:3, S0376:2, S0360:2, H0619:2, S0222:2, |
| | | | | L3816:2, H0635:2, H0036:2, H0052:2, H0046:2, L0041:2, S0312:2, H0551:2, L3815:2, |
| | | | | L0764:2, L0663:2, H0144:2, L3825:2, L0751:2, L0754:2, L0745:2, L0731:2, L0589:2, |
| | | | | H0653:2, H0136:2, H0216:2, H0624:1, S6024:1, S0430:1, H0656:1, H0255:1, S0046:1, |
| | | | | H0747:1, H0645:1, L2759:1, H0013:1, H0156:1, H0575:1, H0050:1, S0050:1, H0373:1, |
| | | | | H0687:1, S0314:1, S0250:1, H0031:1, H0135:1, H0634:1, H0616:1, H0380:1, H0264:1, |
| | | | | H0433:1, H0059:1, L0351:1, S0422:1, L0800:1, L0662:1, L0626:1, L0766:1, L0803:1, |
| | | | | L0375:1, L0655:1, L0659:1, L0783:1, L0809:1, L0664:1, L2263:1, L2258:1, L2259:1, |
| | | | | H0726:1, L3826:1, L3827:1, H0648:1, S0152:1, L3833:1, H0521:1, S0390:1, S3014:1, |
| | | | | S0027:1, L0749:1, L0750:1, L0780:1, L0758:1, L0759:1, S0260:1 and L0366:1. |
| 88 | HDPOL37 | 745377 | 98 | AR283:17, AR089:16, AR316:16, AR096:16, AR277:15, AR039:15, AR104:14, AR313:12, |
| | | | | AR060:11, AR219:10, AR282:9, AR240:9, AR299:8, AR055:8, AR185:8, AR218:7, |
| | | | | AR244:5, AR265:4, AR300:4, AR310:2, AR295:2, AR271:2, AR298:1, AR175:1, AR266:1, |
| | | | | AR291:1, AR286:1, AR296:1, AR309:1, AR312:1, AR294:1 H0618:2, H0040:1 and |
| | | | | H0522:1. |
| 89 | HDPOO76 | 838594 | 99 | AR218:924, AR096:917, AR219:813, AR316:779, AR240:765, AR089:547, AR313:512, |
| | | | | AR039:433, AR299:400, AR104:348, AR300:336, AR185:267, AR060:243, AR282:172, |
| | | | | AR055:155, AR277:94, AR283:93 S0474:29, L0766:11, H0521:10, L0803:7, L0748:6, |
| | | | | L0717:5, L0759:5, S0003:4, L3832:4, H0663:3, H0156:3, L0598:3, L0770:3, L0771:3, |
| | | | | L0804:3, L2439:3, H0522:3, L0731:3, S0436:3, H0486:2, S0426:2, L0805:2, L0659:2, |
| | | | | L2260:2, S0126:2, S0406:2, L0749:2, L0755:2, L0757:2, L0758:2, L0590:2, S0026:2, |
| | | | | H0716:1, H0341:1, S0212:1, L0481:1, S0444:1, S0360:1, L3649:1, H0637:1, H0580:1, |
| | | | | H0734:1, H0749:1, L3092:1, H0619:1, L3388:1, H0586:1, H0574:1, H0427:1, L0021:1, |
| | | | | H0575:1, H0318:1, H0545:1, H0024:1, H0373:1, H0071:1, H0179:1, S0214:1, H0428:1, |
| | | | | H0674:1, H0591:1, H0616:1, H0488:1, H0494:1, S0438:1, S0440:1, H0647:1, S0142:1, |
| | | | | UNKWN:1, L0369:1, L0763:1, L0769:1, L0646:1, L0648:1, L0662:1, L0650:1, L0775:1, |
| | | | | L0653:1, L0776:1, L0656:1, L0782:1, L0809:1, L0519:1, S0052:1, L2657:1, H0144:1, |
| | | | | L3823:1, H0520:1, H0547:1, H0660:1, S0380:1, L0742:1, L0439:1, L0750:1, L0777:1, |
| | | | | S0031:1, H0445:1, S0434:1, H0665:1, H0667:1, S0194:1, S0276:1 and S0458:1. |
| 90 | HDPPD93 | 637588 | 100 | AR202:68, AR194:68, AR281:64, AR244:59, AR315:56, AR205:52, AR246:50, AR280:49, |
| | | | | AR283:45, AR314:39, AR271:38, AR232:37, AR243:37, AR241:35, AR316:34, AR282:33, |
| | | | | AR204:33, AR263:32, AR089:32, AR192:32, AR265:31, AR277:31, AR206:30, AR219:29, |
| | | | | AR310:29, AR033:29, AR096:29, AR313:28, AR299:28, AR240:26, AR247:26, AR273:24, |
| | | | | AR300:24, AR198:24, AR295:24, AR274:24, AR218:24, AR039:23, AR275:23, AR055:23, |
| | | | | AR213:23, AR104:22, AR251:22, AR238:20, AR177:20, AR312:20, AR060:19, AR226:19, |
| | | | | AR052:19, AR231:18, AR053:18, AR309:18, AR234:18, AR227:18, AR185:17, AR292:17, |
| | | | | AR237:17, AR229:16, AR258:16, AR183:16, AR175:15, AR294:14, AR256:13, AR259:13, |
| | | | | AR233:13, AR293:11, AR186:11, AR253:10, AR061:10, AR266:10, AR267:9, AR285:8, |
| | | | | AR248:8, AR270:8, AR296:8, AR284:7, AR179:7, AR289:7, AR249:7, AR268:6, AR269:6, |
| | | | | AR291:6, AR184:6, AR298:5, AR286:5, AR182:5, AR290:4 L0794:6, L0748:6, H0556:5, |
| | | | | L0771:5, H0052:4, L0756:4, L0596:4, H0265:3, H0341:3, H0587:3, L0662:3, L0803:3, |
| | | | | L0790:3, S0152:3, L0750:3, S0114:2, S0360:2, H0318:2, L0471:2, L0369:2, L0763:2, |
| | | | | L0770:2, L0764:2, L0766:2, L0774:2, L0378:2, L0789:2, L0666:2, L3825:2, H0547:2, |
| | | | | L0747:2, L0777:2, L0581:2, H0543:2, H0422:2, S0218:1, H0255:1, S0418:1, S0354:1, |
| | | | | S0376:1, S0408:1, L3649:1, S0045:1, H0747:1, H0619:1, L0717:1, S0222:1, H0431:1, |
| | | | | H0586:1, H0013:1, H0069:1, S0049:1, H0009:1, H0071:1, H0083:1, H0428:1, T0006:1, |
| | | | | H0424:1, H0213:1, H0644:1, H0628:1, H0135:1, H0163:1, H0616:1, H0413:1, H0059:1, |
| | | | | H0561:1, S0448:1, H0647:1, L3818:1, S0002:1, L0769:1, L0800:1, L0363:1, L0767:1, |
| | | | | L0768:1, L0649:1, L0804:1, L0806:1, L0657:1, L0512:1, L0659:1, L0384:1, L0647:1, |
| | | | | L5622:1, L5623:1, L0664:1, L0665:1, S0374:1, L3828:1, S0126:1, H0711:1, H0658:1, |
| | | | | H0666:1, H0539:1, H0753:1, H0521:1, H0522:1, S0406:1, H0555:1, H0436:1, L0439:1, |
| | | | | L0749:1, S0031:1, L0595:1, H0136:1, H0542:1, H0423:1, S0424:1, and H0352:1. |
| 91 | HDPPW82 | 778405 | 101 | H0522:1 |
| 92 | HDPXN20 | 801896 | 102 | H0521:1 |
| 93 | HDTAU35 | 838139 | 103 | AR060:1023, AR299:967, AR300:859, AR185:836, AR055:789, AR277:731, AR283:653, |
| | | | | AR282:627, AR089:609, AR104:608, AR039:494, AR316:450, R240:391, AR096:364, |
| | | | | AR313:222, AR219:187, AR218:164 H0486:1 |
| 94 | RDTAV54 | 801898 | 104 | AR283:87, AR299:76, AR277:74, AR282:72, AR316:71, AR313:64, AR240:63, AR096:63, |
| | | | | AR219:61, AR060:54, AR218:51, AR055:51, AR089:49, AR185:49, AR300:44, AR104:40, |
| | | | | AR039:35 L0751:14, L0748:8, L0605:8, L0758:6, L0750:5, L0755:5, L0757:5, |
| | | | | L0761:4, S0406:4, L0747:4, L0752:4, L0717:3, L0659:3, L0740:3, L0754:3, L0753:3, |
| | | | | L0731:3, L0596:3, S0444:2, L0770:2, L0769:2, L0662:2, L0768:2, L0766:2, L0774:2, |
| | | | | L0775:2, H0435:2, H0672:2, S0330:2, L0744:2, L0745:2, L0780:2, S0436:2, H0423:2, |
| | | | | H0739:1, H0224:1, H0225:1, H0294:1, T0049:1, L0785:1, S0116:1, L3659:1, H0306:1, |
| | | | | S0354:1, S0360:1, H0742:1, H0208:1, S0046:1, S0476:1, S6026:1, S0278:1, H0331:1, |
| | | | | H0486:1, L0477:1, L0586:1, S0280:1, H0575:1, T0082:1, H0036:1, H0421:1, H0057:1, |
| | | | | S0051:1, H0239:1, H0510:1, S0250:1, H0030:1, H0031:1, H0644:1, L0055:1, S0036:1, |
| | | | | H0551:1, S0438:1, H0509:1, S0144:1, S0422:1, L0520:1, L0762:1, L0638:1, L0772:1, |
| | | | | L0372:1, L0646:1, L0764:1, L0771:1, L0773:1, L0648:1, L0386:1, L0776:1, L0655:1, |
| | | | | L0783:1, L0790:1, L0666:1, S0374:1, S0126:1, H0689:1, H0682:1, H0659:1, H0670:1, |
| | | | | H0539:1, S0380:1, H0704:1, L0743:1, L0779:1, L0759:1, L0588:1, L0593:1, L0361:1, |
| | | | | L0366:1, H0653:1, S0242:1, H0422:1, S0446:1 and H0506:1. |
| 95 | HDTFX18 | 801957 | 105 | AR313:6, AR277:5, AR039:4, AR096:4, AR055:3, AR283:3, AR300:3, AR282:3, AR316:3, |
| | | | | AR104:2, AR299:2, AR240:2, AR060:2, AR185:2, AR089:2, AR218:1 L0748:2, L0731:2, |
| | | | | H0486:1, H0634:1, L0766:1, L0809:1, L0750:1 and L0777:1. |
| 96 | HDTGW48 | 827285 | 106 | AR313:4, AR316:3, AR096:3, AR039:2, AR300:1, AR055:1, AR282:1, AR060:1, AR104:1, |
| | | | | AR240:1, AR299:1, AR277:1 H0591:2, L0758:2, H0585:1, H0486:1, H0618:1, L0794:1, |
| | | | | L0804:1, H0672:1 and L0750:1. |
| 97 | HE2CH58 | 838140 | 107 | H0171:3, S0376:1, L0637:1, L0768:1, L0805:1, L0659:1, L0748:1, L0759:1 and |
| | | | | L0595:1. |
| 98 | HE2HC60 | 753265 | 108 | AR277:44, AR283:36, AR219:36, AR21B:34, AR055:31, AR316:29, AR313:24, AR089:24, |
| | | | | AR104:23, AR282:22, AR299:21, AR039:19, AR240:19, AR096:18, AR185:18, AR300:18, |
| | | | | AR060:14 L0439:13, L0777:9, L0717:8, L0748:6, L0659:5, L0747:4, H0318:3, |
| | | | | L0665:3, L0779:3, H0170:2, H0212:2, L0455:2, S0422:2, L0764:2, L0662:2, L0768:2, |
| | | | | L0766:2, L0775:2, L0655:2, L0809:2, H0520:2, H0672:2, L0746:2, L0755:2, L0758:2, |
| | | | | L0759:2, L0595:2, H0624:1, H0171:1, H0685:1, H0661:1, H0402:1, S0408:1, L3646:1, |
| | | | | S0046:1, H0333:1, T0109:1, H0013:1, S0280:1, L0021:1, H0590:1, H0581:1, H0374:1, |
| | | | | H0596:1, L0471:1, H0014:1, S0051:1, S0003:1, H0328:1, H0617:1, H0040:1, H0412:1, |
| | | | | H0494:1, H0641:1, L0761:1, L0645:1, L0773:1, L0521:1, L0375:1, L0651:1, L0805:1, |
| | | | | L0776:1, L0526:1, L0783:1, L0789:1, L0666:1, L0664:1, H0701:1, H0723:1, L0352:1, |
| | | | | H0547:1, H0658:1, H0670:1, H0648:1, H0651:1, H0436:1, L0740:1, L0754:1, L0752:1, |
| | | | | L0757:1, S0436:1, L0591:1, L0592:1 and H0293:1. |
| 99 | HE2PO93 | 771655 | 109 | AR219:19, AR218:19, AR313:13, AR299:13, AR185:13, AR089:11, AR055:10, AR316:10, |
| | | | | AR060:10, AR300:9, AR096:8, AR104:7, AR039:7, AR240:6, AR282:6, AR283:5, AR277:3 |
| | | | | L0803:5, L0731:5, S0422:4, L2903:3, S0408:2, H0040:2, L0766:2, L0666:2, L2657:2, |
| | | | | H0144:2, H0648:2, L0748:2, L0439:2, L0754:2, L0779:2, H0170:1, H0171:1, S0114:1, |
| | | | | H0657:1, L2285:1, S0354:1, S0360:1, H0580:1, H0742:1, H0741:1, H0749:1, L2777:1, |
| | | | | L0717:1, H0411:1, H0431:1, H0586:1, H0052:1, H0596:1, H0014:1, S0388:1, S0051:1, |
| | | | | S0003:1, H0591:1, T0042:1, H0625:1, H0509:1, L0598:1, H0026:1, L0763:1, L0639:1, |
| | | | | L0372:1, L0646:1, L0641:1, L0768:1, L0649:1, L0651:1, L0805:1, L0776:1, L0635:1, |
| | | | | L0664:1, L0665:1, L2264:1, L2262:1, S0374:1, L0438:1, L0352:1, H0672:1, S0380:1, |
| | | | | H0696:1, H0134:1, S0406:1, H0478:1, L0758:1, L0759:1, S0436:1, S0011:1 and |
| | | | | S0424:1. |
| 100 | HE6AU52 | 562782 | 110 | H0008:1 |
| 101 | HE6CS65 | 762960 | 111 | AR219:61, AR277:59, AR218:48, AR283:47, AR282:43, AR316:39, AR089:38, AR313:36, |
| | | | | AR299:34, AR240:33, AR104:29, AR055:29, AR096:29, AR039:27, AR185:26, AR300:22, |
| | | | | AR060:21 L0777:16, L0748:12, L0757:11, L0776:8, L0439:7, H0692:6, H0046:6, |
| | | | | L0769:5, L0666:5, S0242:5, L0770:4, L0771:4, L0438:4, L0743:4, L0754:4, L0749:4, |
| | | | | L0758:4, S0444:3, H0051:3, L0662:3, L0766:3, S0378:3, L0751:3, L0747:3, S0436:3, |
| | | | | S0212:2, H0637:2, H0497:2, H0545:2, H0050:2, H0031:2, H0090:2, H0100:2, L0768:2, |
| | | | | L0561:2, L0774:2, L0775:2, L0657:2, H0670:2, S3014:2, L0744:2, L0752:2, L0581:2, |
| | | | | H0624:1, H0170:1, H0713:1, H0717:1, S6024:1, T0049:1, H0255:1, S0356:1, S0442:1, |
| | | | | S0358:1, S0376:1, S0360:1, H0619:1, L3651:1, L0717:1, S0278:1, H0391:1, H0333:1, |
| | | | | H0013:1, H0053:1, H0575:1, S0346:1, H0052:1, H0263:1, H0596:1, L0738:1, H0572:1, |
| | | | | H0510:1, H0266:1, H0688:1, H0039:1, H0622:1, H0111:1, H0181:1, H0617:1, H0032:1, |
| | | | | H0169:1, H0634:1, H0087:1, H0412:1, S0450:1, S0440:1, L0639:1, L0637:1, L0372:1, |
| | | | | L0646:1, L0651:1, L0806:1, L0659:1, L0792:1, L0664:1, L0665:1, S0216:1, H0144:1, |
| | | | | H0697:1, S0374:1, L3812:1, H0520:1, H0547:1, H0658:1, H0660:1, H0648:1, H0521:1, |
| | | | | H0696:1, S0027:1, S0028:1, L0741:1, L0740:1, L0779:1, L0731:1, L0759:1, S0260:1, |
| | | | | H0445:1, S0434:1, L0362:1 and L0366:1. |
| 102 | HE6EY13 | 847058 | 112 | AR283:50, AR218:31, AR240:28, AR096:25, AR219:23, AR316:22, AR313:22, AR089:22, |
| | | | | AR104:21, AR299:20, AR185:19, AR055:18, AR060:17, AR282:15, AR277:13, AR039:13, |
| | | | | AR300:11 H0692:12, L0748:7, L0751:7, S0434:6, H0265:5, H0494:5, L0659:5, |
| | | | | H0545:4, H0100:4, L0766:4, L0666:3, S0126:3, S0406:3, L0743:3, L0754:3, L0750:3, |
| | | | | L0731:3, L0361:3, H0542:3, H0657:2, S0356:2, S0358:2, H0733:2, S0007:2, L0021:2, |
| | | | | S0474:2, H0581:2, S0049:2, L0471:2, L0163:2, H0181:2, H0040:2, H0087:2, S0344:2, |
| | | | | S0002:2, L0769:2, L0774:2, H0689:2, S0378:2, H0521:2, L0747:2, L0757:2, L0758:2, |
| | | | | L0759:2, L0362:2, H0543:2, H0352:2, H0556:1, T0002:1, H0716:1, H0656:1, S0212:1, |
| | | | | S0418:1, S0442:1, S0376:1, S0444:1, S0360:1, H0637:1, S0046:1, H0393:1, L0717:1, |
| | | | | S0278:1, H0549:1, H0427:1, H0123:1, H0011:1, H0012:1, H0015:1, H0083:1, H0188:1, |
| | | | | H0328:1, H0625:1, H0428:1, H0039:1, H0030:1, H0606:1, H0124:1, H0708:1, H0135:1, |
| | | | | H0163:1, T0067:1, H0412:1, S0438:1, H0654:1, S0142:1, H0529:1, L0638:1, L3904:1, |
| | | | | L3905:1, L0761:1, L0667:1, L0627:1, L0646:1, L0649:1, L0803:1, L0661:1, L0657:1, |
| | | | | L0512:1, L0518:1, L0791:1, L0793:1, L0663:1, H0144:1, S0374:1, L0438:1, H0520:1, |
| | | | | H0670:1, H0672:1, S0328:1, H0539:1, H0518:1, H0555:1, H0478:1, S3014:1, S0027:1, |
| | | | | L0741:1, L0744:1, L0439:1, L0752:1, L0753:1, L0755:1, S0436:1, L0591:1, S0242:1, |
| | | | | H0423:1, S0456:1 and H0506:1. |
| 103 | HE6FV29 | 588454 | 113 | AR219:37, AR218:36, AR315:34, AR280:34, AR271:33, AR244;29, AR089:29, AR314:29, |
| | | | | AR243:28, AR281:26, AR282:25, AR273:25, AR205:24, AR192:22, AR206:22, AR198:19, |
| | | | | AR247:19, AR316:19, AR039:19, AR231:18, AR269:17, AR246:17, AR204:16, AR234:16, |
| | | | | AR299:16, AR313:15, AR194:15, AR055:14, AR186:14, AR237:14, AR060:14, AR241:13, |
| | | | | AR270:13, AR293:12, AR240:12, AR232:11, AR238:11, AR251:10, AR300:10, AR061:10, |
| | | | | AR233:10, AR227:10, AR291:9, AR185:9, AR202:9, AR266:9, AR226:9, AR229:9, |
| | | | | AR184:8, AR179:8, AR182:8, AR175:8, AR312:8, AR268:8, AR289:7, AR284:7, AR249:7, |
| | | | | AR183:7, AR310:7, AR267:7, AR052:7, AR033:7, AR296:7, AR290:7, AR265:7, AR177:7, |
| | | | | AR309:7, AR292:6, AR298:6, AR275:6, AR277:6, AR285:6, AR294:5, AR248:5, AR053:5, |
| | | | | AR253:5, AR295:5, AR286:5, AR259:5, AR274:4, AR258:4, AR213:4, AR096:4, AR256:4, |
| | | | | AR104:4, AR283:3, AR263:2 S0440:32, S0476:22, H0494:20, L0754:17, S0372:16, |
| | | | | S0132:13, L0666:13, S0330:13, H0046:12, H0586:11, H0587:11, S0328:11, S0360:10, |
| | | | | S0436:9, S0356:8, H0622:8, S0003:7, L0806:7, H0648:7, L0747:7, L0752:7, H0674:6, |
| | | | | L0777:6, L0362:6, L0662:5, L0659:5, L0601:5, S0430:4, S0358:4, S0408:4, H0592:4, |
| | | | | S0214:4, H0039:4, H0031:4, H0551:4, H0264:4, H0560:4, L0763:4, L0653:4, L5623:4, |
| | | | | L0663:4, S0376:3, S0444:3, S0410:3, H0370:3, H0600:3, H0644:3, L0646:3, L0649:3, |
| | | | | L0776:3, L0783:3, L0809:3, L0665:3, H0696:3, S0406:3, S3014:3, L0755:3, S0434:3, |
| | | | | L0591:3, H0170:2, S0134:2, H0662:2, S0442:2, H0393:2, H0596:2, H0597:2, H0688:2, |
| | | | | H0553:2, H0032:2, H0169:2, H0598:2, H0090:2, H0379:2, H0380:2, L0770:2, L0372:2, |
| | | | | L0549:2, L0376:2, L0517:2, L0518:2, L5622:2, H0658:2, H0670:2, S0380:2, S0152:2, |
| | | | | S0350:2, S0027:2, L0744:2, L0779:2, L0759:2, L0599:2, S0196:2, S0456:2, H0171:1, |
| | | | | H0556:1, T0002:1, H0713:1, H0483:1, H0663:1, L0005:1, S0354:1, T0008:1, H0742:2, |
| | | | | H0741:1, H0411:1, H0549:1, T0039:1, H0013:1, L0021:1, H0349:1, S0010:1, H0204:1, |
| | | | | L0738:1, H0545:1, H0014:1, H0015:1, H0373:1, H0355:1, H0510:1, H0615:1, L0483:1, |
| | | | | L0142:1, L0143:1, H0166:1, H0673:1, H0708:1, H0591:1, H0038:1, H0040:1, H0634:1, |
| | | | | T0067:1, H0272:1, H0487:1, H0412:1, H0623:1, H0059:1, H0100:1, S0352:1, S0382:1, |
| | | | | S0448:1, S0306:1, S0438:1, S0472:1, H0646:1, L0503:1, L0640:1, L0637:1, L0761:1, |
| | | | | L0772:1, L0764:1, L0771:1, L0648:1, L0794:1, L5564:1, L0551:1, L0805:1, L0382:1, |
| | | | | L0519:1, L0789:1, L0532:1, L0664:1, H0144:1, H0520:1, H0547:1, S0126:1, H0689:1, |
| | | | | H0711:1, H0435:1, H0659:1, H0666:1, S0378:1, H0704:1, S0044:1, H0555:1, S0392:1, |
| | | | | S0322:1, L0748:1, L0740:1, L0745:1, L0749:1, L0756:1, L0757:1 and S0242:1. |
| 104 | HE8BQ49 | 589443 | 114 | H0013:2 |
| 105 | HE8SG96 | 862016 | 115 | AR052:43, AR184:40, AR248:40, AR249:35, AR253:33, AR312:30, AR053:28, AR313:25, |
| | | | | AR265:24, AR213:24, AR310:23, AR096:22, AR173:22, AR263:21, AR165:20, AR309:20, |
| | | | | AR164:19, AR247:18, AR183:18, AR166:18, AR257:17, AR299:17, AR290:17, AR269:17, |
| | | | | AR270:17, AR175:17, AR218:16, AR268:16, AR258:16, AR238:15, AR229:15, AR292:15, |
| | | | | AR162:15, AR161:15, AR293:14, AR300:14, AR262:14, AR163:14, AR284:14, AR259:13, |
| | | | | AR251:13, AR219:13, AR039:13, AR226:13, AR267:12, AR296:12, AR182:12, AR231:12, |
| | | | | AR240:11, AR177:11, AR285:11, AR298:11, AR179:11, AR191:11, AR237:10, AR281:10, |
| | | | | AR236:10, AR291:10, AR286:10, AR316:10, AR260:10, AR089:10, AR294:10, AR228:9, |
| | | | | AR234:9, AR255:9, AR280:9, AR315:9, AR199:9, AR282:8, AR239:8, AR314:8, AR185:8, |
| | | | | AR256:8, AR196:8, AR033:8, AR295:8, AR289:8, AR055:8, AR287:7, AR235:7, AR288:7, |
| | | | | AR212:7, AR232:7, AR266:7, AR203:7, AR180:7, AR178:6, AR242:6, AR061:6, AR261:6, |
| | | | | AR297:6, AR200:6, AR277:6, AR197:6, AR230:6, AR189:6, AR233:6, AR250:6, AR227:6, |
| | | | | AR264:6, AR192:5, AR207:5, AR172:5, AR308:5, AR245:5, AR193:5, AR181:5, AR060:5, |
| | | | | AR170:5, AR168:5, AR188:5, AR171:4, AR311:4, AR214:4, AR283:4, AR216:4, AR241:4, |
| | | | | AR210:4, AR223:4, AR190:4, AR104:4, AR195:4, AR201:4, AR224:4, AR254:3, AR222:3, |
| | | | | AR275:3, AR217:3, AR274:3, AR169:3, AR225:3, AR272:3, AR211:3, AR204:3, AR186:2, |
| | | | | AR271:2, AR205:2, AR198:2, AR176:2, AR243:2, AR174:2, AR215:1 H0244:1 and |
| | | | | S0106:1. |
| 106 | HE8TY46 | 899528 | 116 | AR226:12, AR227:11, AR238:10, AR237:10, AR175:9, AR183:9, AR232:9, AR234:8, |
| | | | | AR182:8, AR233:7, AR291:7, AR293:7, AR269:7, AR104:7, AR184:7, AR060:6, AR298:6, |
| | | | | AR089:6, AR270:6, AR292:6, AR285:6, AR268:6, AR179:6, AR295:5, AR290:5, AR284:5, |
| | | | | AR289:5, AR294:5, AR055:5, AR316:5, AR229:5, AR231:5, AR296:5, AR185:5, AR247:5, |
| | | | | AR096:5, AR240:5, AR265:5, AR313:5, AR256:5, AR259:4, AR266:4, AR219:4, AR282:4, |
| | | | | AR258:4, AR251:4, AR061:4, AR299:4, AR177:4, AR309:4, AR286:4, AR267:4, AR033:4, |
| | | | | AR300:3, AR039:3, AR244:3, AR218:3, AR310:3, AR283:3, AR277:3, AR253:3, AR213:2, |
| | | | | AR312:2, AR186:2, AR271:1, AR052:1, AR314:1 H0253:8, L0439:8, L0769:7, H0618:6, |
| | | | | L0758:6, H0052:5, L0749:5, H0617:4, H0135:4, L0766:4, S0406:4, S0001:3, H0255:3, |
| | | | | S0410:3, H0619:3, L3655:3, S0422:3, L0775:3, L0378:3, H0547:3, H0521:3, L0742:3, |
| | | | | L0750:3, L0755:3, L0757:3, S0434:3, L0605:3, H0381:2, H0419:2, H0341:2, S0420:2, |
| | | | | H0733:2, H0749:2, H0550:2, H0438:2, H0599:2, H0318:2, H0046:2, H0050:2, H0012:2, |
| | | | | H0024:2, S0050:2, T0010:2, L0455:2, H0412:2, H0413:2, H0494:2, L0772:2, L0645:2, |
| | | | | L0764:2, L0771:2, L0662:2, L0666:2, L0665:2, L0438:2, H0520:2, H0519:2, H0134:2, |
| | | | | L0741:2, L0748:2, L0751:2, L0747:2, L0777:2, L0759:2, H0445:2, L0596:2, L0603:2, |
| | | | | L0411:1, H0556:1, S0114:1, S0218:1, H0656:1, S0116:1, H0125:1, S0418:1, S0354:1, |
| | | | | S0360:1, H0729:1, H0730:1, H0741:1, H0722:1, H0728:1, H0747:1, H0771:1, L0717:1, |
| | | | | S0278:1, H0549:1, H0370:1, H0392:1, H0613:1, H0013:1, H0427:1, H0575:1, T0082:1, |
| | | | | H0706:1, H0036:1, H0421:1, S0049:1, H0194:1, H0085:1, H0231:1, L0041:1, H0041:1, |
| | | | | H0009:1, H0123:1, H0620:1, H0199:1, H0246:1, H0014:1, L0163:1, H0594:1, S6028:1, |
| | | | | H0266:1, H0188:1, H0687:1, H0288:1, H0033:1, H0181: S0364:1, S0366:1, S0036:1, |
| | | | | H0038:1, H0616:1, H0264:1, H0268:1, H0117:1, S0038:1, H0100:1, L0351:1, L0435:1, |
| | | | | T0041:1, T0042:1, S0448:1, S0142:1, S0002:1, H0529:1, L0796:1, L0639:1, L3904:1, |
| | | | | L5575:1, L3905:1, L5566:1, L0761:1, L0374:1, L0648:1, L0768:1, L0649:1, L0803:1, |
| | | | | L0375:1, L0805:1, L0776:1, L0655:1, L0659:1, L0526:1, L0783:1, L5622:1, L0793:1, |
| | | | | L0709:1, L3821:1, L2257:1, L2259:1, L0710:1, L2261:1, L2264:1, L2262:1, L2654:1, |
| | | | | H0144:1, H0690:1, H0660:1, S0330:1, H0539:1, S0378:1, S0152:1, H0522:1, H0694:1, |
| | | | | H0555:1, H0436:1, S3012:1, S0390:1, S3014:1, S0028:1, L0743:1, L0779:1, L0752:1, |
| | | | | H0444:1, S0436:1, L0581:1, H0543:1, H0423:1, S0458:1 and H0506:1. |
| 107 | HE9GG20 | 633719 | 117 | AR104:15, AR055:10, AR089:10, AR060:9, AR277:7, AR185:7, AR300:7, AR218:6, |
| | | | | AR299:6, AR313:6, AR096:6, AR282:5, AR316:5, AR219:5, AR283:5, AR039:5, AR240:5 |
| | | | | L0748:6, H0144:3, S0010:2, S0474:2, L0439:2, L0749:2, H0717:1, H0662:1, H0734:1, |
| | | | | S6022:1, S0222:1, S0280:1, L0109:1, H0163:1, L0639:1, L0659:1, L0744:1, L0745:1, |
| | | | | L0747:1, L0756:1, L0596:1 and S0276:1. |
| 108 | HEBCI18 | 831464 | 118 | AR055:8, AR060:7, AR240:7, AR185:6, AR104:6, AR283:5, AR089:5, AR300:5, AR218:4, |
| | | | | AR299:4, AR313:4, AR316:4, AR096:3, AR277:3, AR219:2, AR039:2, AR282:2 |
| 109 | HEBDF77 | 692347 | 119 | AR104:10, AR213:5, AR055:4, AR172:4, AR060:4, AR221:4, AR254:3, AR161:3, |
| | | | | AR162:3, AR170:3, AR089:3, AR163:3, AR207:3, AR218:3, AR313:3, AR039:2, AR223:2, |
| | | | | AR096:2, AR205:2, AR296:2, AR185:2, AR282:2, AR243:2, AR283:2, AR230:2, AR181:2, |
| | | | | AR197:2, AR299:2, AR224:2, AR316:2, AR228:2, AR300:2, AR176:2, AR277:1, AR295:1, |
| | | | | AR217:1, AR219:1, AR309:1, AR222:1, AR240:1, AR238:1, AR216:1, AR226:1, AR233:1, |
| | | | | AR264:1, AR177:1, AR266:1, AR289:1, AR297:1 L0805:6, L0438:5, L0439:5, L0794:3, |
| | | | | L0759:2, L0005:1, S0007:1, H0351:1, S0346:1, L0157:1, L0351:1, L0769:1, L0638:1, |
| | | | | L0776:1, L0741:1, L0756:1, L0608:1 and L03661. |
| 110 | HEBDQ91 | 840288 | 120 | AR218:18, AR219:15, AR104:14, AR185:11, AR055:10, AR060:9, AR313:9, AR299:8, |
| | | | | AR096:7, AR089:7, AR282:7, AR316:6, AR240:6, AR277:6, AR283:6, AR039:5, AR300:5 |
| | | | | S0007:5, L0805:3, S6026:1, L0769:1, L0438:1, L0741:1, L0748:1 and L0758:1. |
| 111 | HEBFR46 | 847064 | 121 | AR313:58, AR039:47, AR300:30, AR096:29, AR299:29, AR277:28, AR089:27, AR185:27, |
| | | | | AR316:22, AR219:22, AR104:21, AR218:20, AR240:20, AR282:15, AR060:15, AR055:11, |
| | | | | AR283:7 H0457:10, H0550:5,H0436:5, H0549:4, H0616:4, L0519:4, H0556:3, H0580:3, |
| | | | | S0007:3, S0046:3, L0809:3, L0747:3, L0777:3, S0436:3, H0295:2, T0040:2, H0266:2, |
| | | | | L0761:2, L0783:2, L0789:2, H0658:2, H0521:2, L0753:2, L0731:2, L0596:2, H0543:2, |
| | | | | S0040:1, S0116:1, S0282:1, H0662:1, H0402:1, H0125:1, L0534:1, L0562:1, S0356:1, |
| | | | | S0358:1, H0749:1, L3816:1, H0559:1, H0069:1, H0599:1, H0618:1, H0253:1, H0581:1, |
| | | | | H0546:1, H0123:1, S0051:1, H0083:1, H0687:1, H0284:1, H0124:1, H0038:1, H0551:1, |
| | | | | H0623:1, S0038:1, T0041:1, S0440:1, S0150:1, L3818:1, S0002:1, L0763:1, L0769:1, |
| | | | | L5575:1, L0627:1, L0800:1, L0662:1, L0803:1, L0793:1, L0666:1, L2264:1, L3825:1, |
| | | | | L3827:1, L3828:1, H0547:1, H0519:1, H0539:1, S0037:1, S0206:1, L0748:1, L0749:1, |
| | | | | H0595:1, L0593:1, S0194:1 and S0276:1. |
| 112 | HEBGE07 | 798096 | 122 | S0007:1 |
| 113 | HEBGE23 | 836129 | 123 | AR282:4, AR313:4, AR316:3, AR089:3, AR060:3, AR055:3, AR185:3, AR104:2, AR240:2, |
| | | | | AR218:2, AR219:2, AR096:2, AR299:2, AR039:2, AR277:1 L0809:7, L0758:7, S0007:4, |
| | | | | L0662:4, L0794:4, L0665:4, L0439:4, L0754:4, H0333:3, L0769:3, L0761:3, L0803:3, |
| | | | | H0395:2, S0222:2, H0052:2, H0124:2, S0036:2, L0535:2, L0666:2, H0658:2, L0751:2, |
| | | | | L0747:2, L0592:2, L0485:2, H0716:1, H0295:1, H0402:1, H0125:1, S0418:1, S0442:1, |
| | | | | H0733:1, H0734:1, H0619:1, H0586:1, L0623:1, H0486:1, S0280:1, L0021:1, H0618:1, |
| | | | | H0318:1, S0474:1, H0251:1, H0123:1, H0050:1, S0051:1, H0179:1, H0615:1, T0006:1, |
| | | | | H0673:1, H0087:1, H0264:1, H0100:1, L0763:1, L5565:1, L0667:1, L0772:1, L0644:1, |
| | | | | L0768:1, L0775:1, L0805:1, L0655:1, L0659:1, L0526:1, L5623:1, L0663:1, S0052:1, |
| | | | | H0682:1, H0660:1, L0602:1, L0743:1, L0750:1, L0756:1, L0779:1, L0777:1, H0136:1 |
| | | | | and S0424:1. |
| 114 | HELAT35 | 693175 | 124 | AR313:30, AR039:24, AR185:15, AR299:13, AR096:13, AR300:12, AR277:11, AR218:11, |
| | | | | AR089:10, AR240:8, AR316:8, AR104:7, AR060:6, AR219:5, AR055:5, AR282:4, AR283:2 |
| | | | | S0045:1 and H0100:1. |
| 115 | HELBU54 | 637624 | 125 | AR039:40, AR313:39, AR185:24, AR299:21, AR277:18, AR096:18, AR089:16, AR300:14, |
| | | | | AR316:13, AR218:12, AR104:12, AR219:12, AR240:12, AR060:9, AR282:8, AR055:8, |
| | | | | AR283:4 L0748:3, S0045:1, L0749:1 and S0436:1. |
| 116 | HEMEY47 | 834491 | 126 | AR313:86, AR039:58, AR096:37, AR299:36, AR089:34, AR277:32, AR185:31, AR240:30, |
| | | | | AR300:27, AR316:25, AR219:23, AR218:23, AR104:18, AR060:16, AR282:16, AR055:11, |
| | | | | AR283:7 L0717:2, H0052:2, L0527:2, L0748:2, L0750:2, H0686:1, S0442:1, H0329:1, |
| | | | | S0046:1, H0551:1, H0538:1, L0646:1, L0663:1, H0672:1, S0152:1, H0521:1, H0522:1, |
| | | | | L0759:1, L0581:1 and L0593:1. |
| 117 | HEOMC46 | 866171 | 127 | AR277:48, AR283:34, AR219:31, AR218:30, AR316:28, AR313:27, AR282:27, AR089:25, |
| | | | | AR299:23, AR240:23, AR096:22, AR039:22, AR104:20, AR185:20, AR300:19, AR055:19, |
| | | | | AR060:13 H0749:2, H0581:2, H0457:2 and S0116:1. |
| 118 | HEPBA14 | 855935 | 128 | AR222:530, AR224:483, AR172:461, AR217:453, AR168:409, AR214:400, AR169:392, |
| | | | | AR171:348, AR221:329, AR223:292, AR170:277, AR314:262, AR210:259, AR216:246, |
| | | | | AR215:227, AR315:218, AR052:194, AR280:183, AR225:182, AR053:169, AR200:164, |
| | | | | AR219:158, AR245:151, AR212:140, AR205:138, AR213:131, AR253:125, AR312:124, |
| | | | | AR218:122, AR281:120, AR273:117, AR254:115, AR248:107, AR104:106, AR313:106, |
| | | | | AR250:104, AR189:102, AR309:102, AR308:99, AR199:98, AR249:97, AR243:94, |
| | | | | AR186:90, AR275:90, AR240:89, AR203:88, AR272:88, AR033:88, AR247:85, AR310:81, |
| | | | | AR231:79, AR268:79, AR316:78, AR193:78, AR264:75, AR290:74, AR096:74, AR190:74, |
| | | | | AR246:73, AR188:73, AR201:71, AR206:71, AR173:70, AR255:70, AR180:69, AR265:69, |
| | | | | AR291:68, AR197:68, AR211:66, AR288:64, AR269:63, AR202:62, AR244:62, AR271:62, |
| | | | | AR242:62, AR274:61, AR270:61, AR296:60, AR178:59, AR183:58, AR207:57, AR285:57, |
| | | | | AR284:56, AR165:56, AR039:55, AR267:55, AR196:54, AR195:54, AR089:54, AR311:54, |
| | | | | AR164:53, AR179:52, AR175:52, AR166:51, AR191:51, AR198:50, AR252:50, AR162:49, |
| | | | | AR182:49, AR251:48, AR184:48, AR181:48, AR234:48, AR185:47, AR263:47, AR238:47, |
| | | | | AR176:47, AR174:47, AR237:46, AR300:45, AR299:45, AR297:45, AR239:44, AR163:44, |
| | | | | AR060:44, AR161:43, AR229:42, AR282:42, AR177:41, AR292:40, AR194:39, AR287:37, |
| | | | | AR294:37, AR061:34, AR204:34, AR241:32, AR295:32, AR230:31, AR293:31, AR232:31, |
| | | | | AR226:29, AR258:29, AR298:29, AR192:28, AR262:27, AR266:27, AR289:26, AR236:24, |
| | | | | AR257:24, AR256:23, AR235:23, AR277:22, AR055:22, AR260:21, AR259:21, AR283:20, |
| | | | | AR261:18, AR286:17, AR233:14, AR227:13, AR2228:12 H0150:1 |
| 119 | HEQAH80 | 701984 | 129 | AR219:28, AR218:28, AR313:7, AR300:7, AR039:6, AR240:6, AR316:6, AR096:6, |
| | | | | AR277:5, AR299:4, AR185:4, AR282:4, AR089:3, AR060:3, AR055:2, AR104:2, AR283:2 |
| | | | | S0358:9, L0757:6, H0544:2, H0545:2, H0551:2, L0770:2, L0803:2, L0665:2, H0672:2, |
| | | | | L0747:2, L0755:2, L0731:2, S0434:2, L0591:2, L0599:2, L3658:1, S0420:1, S0376:1, |
| | | | | S0278:1, H0635:1, L0022:1, H0042:1, H0575:1, H0184:1, H0546:1, H0266:1, L0194:1, |
| | | | | H0644:1, H0673:1, H0591:1, H0634:1, T0067:1, H0488:1, H0413:1, H0623:1, S0440:1, |
| | | | | S0344:1, S0002:1, S0426:1, L0764:1, L0771:1, L0804:1, L0775:1, L0776:1, L0655:1, |
| | | | | L0606:1, L0783:1, L0809:1, L5623:1, L0532:1, L0663:1, S0053:1, L2259:1, H0547:1, |
| | | | | H0690:1, H0435:1, S0454:1, H0696:1, S0406:1, L0751:1, L0759:1, H0444:1 and |
| | | | | S0458:1. |
| 120 | HEQBF89 | 786205 | 130 | AR313:76, AR277:64, AR039:62, AR299:47, AR089:47, AR316:44, AR096:43, AR185:41, |
| | | | | AR300:40, AR283:38, AR282:37, AR104:34, AR240:34, AR219:33, AR218:29, AR055:22, |
| | | | | AR060:21 H0544:1 |
| 121 | HETCI16 | 844543 | 131 | AR282:28, AR055:21, AR060:18, AR219:17, AR089:16, AR218:15, AR104:14, AR299:14, |
| | | | | AR277:14, AR185:14, AR300:13, AR240:11, AR283:10, AR316:9, AR096:9, AR039:9, |
| | | | | AR313:4 H0046:6, L0747:6, L0756:6, L0803:5, L0740:5, L0662:4, L0748:4, S0360:3, |
| | | | | H0620:3, H0014:3, H0674:3, L0774:3, L5622:3, L0439:3, S0408:2, H0431:2, L0761:2, |
| | | | | L0794:2, L0663:2, H0659:2, L0751:2, L0779:2, L0596:2, L0588:2, T0049:1, S0442:1, |
| | | | | S0376:1, S0444:1, S0468:1, S0045:1, S0476:1, H0645:1, H0549:1, H0550:1, T0109:1, |
| | | | | H0013:1, H0156:1, H0599:1, H0575:1, T0048:1, H0196:1, H0544:1, H0050:1, H0510:1, |
| | | | | H0292:1, H0039:1, H0135:1, H0616:1, S0016:1, L0640:1, L0770:1, L0637:1, L3905:1, |
| | | | | L0388:1, L0805:1, L0776:1, L0659:1, L0809:1, L0790:1, L0792:1, L0666:1, L0664:1, |
| | | | | H0144:1, L0438:1, H0547:1, H0519:1, H0689:1, H0672:1, S0328:1, H0521:1, H0627:1, |
| | | | | S3014:1, S0027:1, S0028:1, L0780:1, L0757:1, L0758:1, S0026:1 and H0506:1. |
| 122 | HBTDW58 | 790557 | 132 | AR104:86, AR219:76, AR218:62, AR313:59, AR283:55, AR299:49, AR185:46, AR055:44, |
| | | | | AR277:40, AR316:35, AR089:35, AR282:31, AR039:29, AR060:24, AR096:21 L0731:7, |
| | | | | H0046:4, H0494:4, L0439:4, H0013:3, S0010:3, S0036:3, L0748:3, H0542:3, H0486:2, |
| | | | | H0599:2, H0009:2, H0050:2, S0003:2, H0428:2, L0749:2, L0777:2, H0136:2, H02651, |
| | | | | L36431, H0686:1, H0650:1, S0116:1, H0341:1, H0638:1, S0418:1, S0356:1, S0360:1, |
| | | | | H0742:1, H0741:1, H0728:1, H0733:1, S0046:1, H0747:1, S0222:1, H0497:1, H0333:1, |
| | | | | L3653:1, H0427:1, H0156:1, H0581:1, H0744:1, H0309:1, H0327:1, H0562:1, H0510:1, |
| | | | | S0312:1, S0214:1, H0615:1, L0055:1, H0038:1, H0433:1, S0438:1, S0002:1, L0598:1, |
| | | | | H0529:1, L0768:1, L0766:1, L0550:1, L0805:1, L0653:1, L0776:1, L0655:1, L0661:1, |
| | | | | L0527:1, L0657:1, L5623:1, L2262:1, H0144:1, H0701:1, L3661:1, S0122:1, H0365:1, |
| | | | | H0648:1, H0539:1, S0152:1, H0521:1, H0696:1, H0555:1, L0740:1, L0754:1, L0745:1, |
| | | | | L0747:1, L0756:1, L0779:1, L0757:1, L0758:1, L0759:1, H0445:1, S0436:1, L0588:1, |
| | | | | L0595:1, L0362:1, S0026:1, S0242:1, H0422:1, S0424:1, H0721:1 and H0352:1 |
| 123 | HETEY67 | 704077 | 133 | AR060:3, AR104:3, AR300:3, AR089:3, AR055:2, AR299:2, AR313:2, AR282:2, AR277:2, |
| | | | | AR185:1, AR039:1, AR316:1, AR096:1 H0046:21, L0803:4, L0790:2, L0750:2, L0777:2, |
| | | | | L0758:2, L0362:2, S0280:1, S0474:1, L0769:1, L0794:1, L0774:1, L0809:1 and |
| | | | | L0666:1 |
| 124 | HFCDW95 | 847383 | 134 | L0766:9, L0803:8, H0341:7, H0521:7, L0770:6, L0771:6, L0754:6, L0752:6, L0731:6, |
| | | | | S0354:5, S0422:5, L0662:5, H0519:5, L0439:5, L0779:5, L0758:5, S0436:5, H0009:4, |
| | | | | H0673:4, L0800:4, L0521:4, L0805:4, L0659:4, L0809:4, L0438:4, S0028:4, L0485:4, |
| | | | | L0601:4, H0657:3, H0638:3, S0418:3, H0733:3, S0007:3, S0222:3, L3655:3, S0214:3, |
| | | | | H0529:3, L0369:3, L0794:3, L0649:3, L0776:3, L0665:3, L3391:3, H0144:3, H0670:3, |
| | | | | S0406:3, L0756:3, L0755:3, L0759:3, H0667:3, S0420:2, S0358:2, S0360:2, H0580:2, |
| | | | | H0729:2, S0476:2, H0645:2, S6026:2, S0300:2, L2543:2, H0156:2, S0010:2, H0085:2, |
| | | | | H0178:2, H0375:2, S6028:2, H0266:2, S0003:2, H0428:2, H0169:2, S0036:2, H0090:2, |
| | | | | H0634:2, L0640:2, L0769:2, L0637:2, L0761:2, L0646:2, L0774:2, L0775:2, L0806:2, |
| | | | | L0807:2, L07832, L5622:2, L0666:2, L2653:2, L2264:2, H0725:2, L3827:2, H0547:2, |
| | | | | H0435:2, H0659:2, S0380:2, S3014:2, S0206:2, L0740:2, L0753:2, L0757:2, S0434:2, |
| | | | | L0596:2, H0668:2, H0542:2, H0170:1, H0556:1, S0342:1, H0713:1, H0717:1, H0716:1, |
| | | | | H0294:1, L2877:1, T0049:1, S0218:1, L2910:1, L2915:1, L2991:1, S0282:1, S0400:1, |
| | | | | L2289:1, H0241:1, H0402:1, L0534:1, L0539:1, S0376:1, S0444:1, S0410:1, H0329:1, |
| | | | | H0722:1, H0728:1, H0734:1, S0045:1, H0749:1, H0406:1, H0411:1, H0443:1, S0220:1, |
| | | | | H0441:1, H0415:1, H0438:1, H0362:1, H0333:1, H0574:1, L0623:1, H0486:1, L1819:1, |
| | | | | T0060:1, H0013:1, H0427:1, H0599:1, H0575:1, H0318:1, S0474:1, H0581:1, H0374:1, |
| | | | | T0110:1, H0150:1, H0563:1, H0050:1, H0014:1, S0388:1, S0051:1, H0687:1, H0039:1, |
| | | | | H0030:1, H0553:1, H0644:1, H0628:1, H0166:1, L0455:1, H0708:1, S0366:1, H0591:1, |
| | | | | H0038:1, H0551:1, H0380:1, H0623:1, S0386:1, T0042:1, H0494:1, H0561:1, S0370:1, |
| | | | | H0509:1, H0130:1, H0641:1, L0598:1, L0763:1, L0638:1, L0796:1, L0667:1, L0630:1, |
| | | | | L0373:1, L0641:1, L0773:1, L5569:1, L5574:1, L0381:1, L0655:1, L0607:1, L0661:1, |
| | | | | L0527:1, L0518:1, L5623:1, L0787:1, L0789:1, L0790:1, L0792:1, L0793:1, L0710:1, |
| | | | | L2262:1, L2380:1, L2412:1, S0374:1, H0520:1, S0126:1, H0648:1, H0710:1, H0522:1, |
| | | | | H0696:1, H0555:1, H0436:1, S0392:1, S3012:1, L0742:1, L0745:1, L0747:1, L0749:1, |
| | | | | L0777:1, L0593:1, L0366:1, S0026:1, S0242:1, S0276:1, S0196:1, H0543:1, H0423:1, |
| | | | | S0460:1, L3357:1 and L3372:1. |
| 125 | HFCFD04 | 824057 | 135 | AR218:174, AR219:161, AR096:104, AR104:102, AR316:93, AR089:90, A2R282:89, |
| | | | | AR277:88, AR283:80, AR313:79, AR240:79, AR039:74, AR299:71, AR300:65, AR185:65, |
| | | | | AR060:55, AR055:48 H0009:1 |
| 126 | HFCFE20 | 701985 | 136 | H0052:2, H0560:2, H0529:2, L0470:1, S0212:1, H0305:1, S0420:1, S0356:1, H0550:1, |
| | | | | S0222:1, H0497:1, S0010:1, H0251:1, H0009:1, H0024:1, H0083:1, H0290:1, H0379:1, |
| | | | | H0264:1, S0150:1, S0426:1, L3905:1, H0520:1, H0547:1, S0044:1, S3014:1, S0434:1, |
| | | | | L0581:1, L0604:1, H0136:1, H0423:1 and S0424:1. |
| 127 | HFEAY59 | 658685 | 137 | AR055:5, AR277:5, AR283:5, AR060:4, AR282:4, AR104:4, AR300:3, AR240:3, AR316:2, |
| | | | | AR039:2, AR089:2, AR096:2, AR218:2, AR185:2, AR219:1, AR299:1 H0081:2 and |
| | | | | H0586:1. |
| 128 | HFEBO17 | 852218 | 138 | AR089:12, AR218:11, AR060:10, AR299:10, AR219:10, AR313:9, AR055:9, AR316:9, |
| | | | | AR240:8, AR282:8, AR096:8, AR185:8, AR104:7, AR039:7, AR277:7, AR300:6, AR283:4 |
| | | | | L0803:4, L0438:4, L0766:2, L0526:2, H0659:2, S0444:1, S0408:1, H0421:1, H0081:1, |
| | | | | H0050:1, S0370:1, L0770:1, L0637:1, L0646:1, L0800:1, L0662:1, L0804:1, L0607:1, |
| | | | | L0659:1, L0790:1, L0665:1, L0352:1, H0648:1, H0651:1, S0328:1, H0436:1, L0749:1, |
| | | | | L0750:1, L0777:1, L0752:1, L0599:1, S0242:1 and H0422:1. |
| 129 | HFUA29 | 839206 | 139 | AR263:10, AR184:8, AR313:5, AR241:5, AR251:5, AR039:4, AR052:4, AR198:4, |
| | | | | AR192:4, AR204:4, AR312:4, AR183:4, AR296:4, AR282:3, AR096:3, AR268:3, AR229:3, |
| | | | | AR182:3, AR285:3, AR053:3, AR270:3, AR269:3, AR299:3, AR309:3, AR316:3, AR089:3, |
| | | | | AR291:3, AR247:3, AR238:3, AR298:3, AR266:3, AR277:2, AR185:2, AR248:2, AR213:2, |
| | | | | AR177:2, AR289:2, AR202:2, AR290:2, AR300:2, AR186:2, AR240:2, AR295:2, AR246:2, |
| | | | | AR293:2, AR226:2, AR292:2, AR284:2, AR294:2, AR234:2, AR175:2, AR227:2, AR258:2, |
| | | | | AR253:2, AR286:2, AR256:2, AR233:2, AR259:2, AR231:2, AR237:1, AR060:1, AR033:1, |
| | | | | AR219:1, AR244:1, AR271:1, AR104:1, AR267:1, AR232:1, AR218:1, AR055:1 L0766:20, |
| | | | | L0754:10, L0776:8, L0803:5, L0749:5, H0661:4, L0740:4, L0751:4, L0608:4, |
| | | | | L0770:3, L0750:3, L0761:2, L0794:2, L0806:2, L0783:2, L0809:2, L0789:2, L0438:2, |
| | | | | S0404:2, L0745:2, L0777:2, L0755:2, L0758:2, S0134:1, H0638:1, S0358:1, S0408:1, |
| | | | | S0045:1, S0046:1, H0581:1, H0023:1, H0355:1, S0214:1, L0055:1, H0477:1, L0796:1, |
| | | | | L3905:1, L0772:1, L0646:1, L0800:1, L0642:1, L0764:1, L0773:1, L0363:1, L0768:1, |
| | | | | L0804:1, L0774:1, L0805:1, L0655:1, L0807:1, L0526:1, L0531:1, H0689:1, S0378:1, |
| | | | | S0152:1, S0406:1, H0732:1, L0742:1, L0748:1, L0747:1, L0753:1, L0757:1, S0194:1, |
| | | | | H0422:1 and S0424:1. |
| 130 | HFIJA68 | 847074 | 140 | AR241:47, AR313:34, AR039:26, AR089:24, AR198:24, AR192:23, AR204:18, AR183:17, |
| | | | | AR299:16, AR229:16, AR218:16, AR096:15, AR185:15, AR300:14, AR271:14, AR275:14, |
| | | | | AR240:13, AR247:13, AR243:12, AR238:12, AR194:12, AR316:12, AR258:12, AR226:12, |
| | | | | AR219:11, AR177:11, AR293:11, AR274:10, AR175:10, AR273:10, AR277:10, AR233:9, |
| | | | | AR312:9, AR280:9, AR234:9, AR104:9, AR315:9, AR292:8, AR269:8, AR231:8, AR205:8, |
| | | | | AR314:7, AR060:7, AR295:7, AR265:7, AR237:7, AR053:7, AR179:7, AR186:7, AR270:7, |
| | | | | AR281:7, AR052:7, AR267:6, AR268:6, AR227:6, AR294:6, AR249:6, AR202:6, AR033:6, |
| | | | | AR182:6, AR184:6, AR246:6, AR259:6, AR256:5, AR213:5, AR282:5, AR232:4, AR206:4, |
| | | | | AR309:4, AR253:4, AR310:4, AR296:4, AR251:4, AR055:3, AR290:3, AR248:3, AR291:3, |
| | | | | AR286:3, AR285:2, AR298:2, AR263:2, AR289:2, ARO61:2, AR244:2, AR284:2, AR283:2, |
| | | | | AR266:1 S0194:1 |
| 131 | HFKES05 | 827572 | 141 | L0777:7, S0358:5, L0439:5, L0751:5, H0135:4, H0265:3, H0556:3, L0770:3, L0769:3, |
| | | | | L0662:3, L0768:3, L0731:3, H0305:2, H0083:2, L0142:2, S0208:2, S0002:2, L0663:2, |
| | | | | L0665:2, H0521:2, L0741:2, L0747:2, L0779:2, H0543:2, H0149:1, H0657:1, S0116:1, |
| | | | | S0001:1, H0663:1, S0356:1, S0354:1, H0580:1, S0045:1, H0549:1, S6014:1, H0309:1, |
| | | | | H0085:1, H0234:1, H0597:1, H0544:1, H0546:1, H0123:1, H0012:1, H0024:1, H0356:1, |
| | | | | H0594:1, T0006:1, H0424:1, H0644:1, H0182:1, H0617:1, L0055:1, H0673:1, H0169:1, |
| | | | | H0038:1, H0040:1, H0100:1, L0351:1, T0041:1, H0561:1, H0132:1, L0763:1, L0638:1, |
| | | | | L0637:1, L0372:1, L0765:1, L0648:1, L0649:1, L0774:1, L0375:1, L0807:1, L0545:1, |
| | | | | L0529:1, L0788:1, L0666:1, L0664:1, S0374:1, H0691:1, H0658:1, H0670:1, H0666:1, |
| | | | | S0044:1, S0028:1, L0744:1, L0749:1, L0755:1, L0758:1, H0445:1, S0436:1, L0593:1 |
| | | | | and H0352:1. |
| 132 | HFKEU12 | 634006 | 142 | AR055:9, AR219:7, AR060:7, AR282:6,.AR277:5, AR039:5, AR104:5, AR313:5, AR300:5, |
| | | | | AR218:4, AR299:4, AR283:4, AR240:4, AR089:4, AR316:4, AR096:3, AR185:3 H0012:2 |
| | | | | and L0805:1. |
| 133 | HFKFX64 | 566835 | 143 | AR273:15, AR244:9, AR274:9, AR192:9, AR184:8, AR186:8, AR204:8, AR052:7, |
| | | | | AR243:7, AR202:7, AR269:7, AR271:6, AR198:6, AR206:6, AR312:6, AR246:6, AR247:6, |
| | | | | AR241:5, AR213:5, AR275:5, AR309:5, AR253:5, AR061:5, AR055:5, AR267:5, AR182:5, |
| | | | | AR060:5, AR268:4, AR053:4, AR282:4, AR205:4, AR194:4, AR185:4, AR033:3, AR183:3, |
| | | | | AR277:3, AR270:3, AR240:3, AR266:3, AR310:3, AR104:3, AR291:3, AR313:3, AR248:3, |
| | | | | AR219:3, AR249:3, AR265:3, AR251:3, AR300:3, AR295:2, AR229:2, AR237:2, AR294:2, |
| | | | | AR299:2, AR218:2, AR293:2, AR233:2, AR238:2, AR283:2, AR292:2, AR175:2, AR226:2, |
| | | | | AR316:2, AR039:2, AR089:2, AR227:2, AR296:2, AR231:2, AR234:2, AR289:2, AR096:2, |
| | | | | AR298:2, AR177:2, AR286:1, AR259:1, AR256:1, AR179:1, AR263:1 H0012:3 and |
| | | | | L0809:1. |
| 134 | HFPDR62 | 839400 | 144 | S0222:2, S0114:1, H0305:1, H0449:1 and T0039:1. |
| 135 | HFPDS07 | 821646 | 145 | AR060:37, AR104:33, AR299:19, AR039:13, AR316:12, AR313:11, AR185:11, AR055:10, |
| | | | | AR096:10, AR277:9, AR218:8, AR240:7, AR089:7, AR300:6, AR282:5, AR283:4, AR219:2 |
| | | | | L0803:24, L0439:13, H0052:5, L0804:5, L0774:5, H0090:4, L0659:4, H0521:4, |
| | | | | L0751:4, S0222:3, H0486:3, H0622:3, L0766:3, H0144:3, S0126:3, H0656:2, S0360:2, |
| | | | | H0580:2, H0575:2, S0346:2, H0046:2, L0455:2, S0036:2, H0623:2, S0002:2, L0775:2, |
| | | | | L0607:2, L0790:2, L0438:2, L0748:2, L0740:2, L0752:2, L0757:2, L0759:2, H0422:2, |
| | | | | H0222:1, L3659:1, S0418:1, S0356:1, H0437:1, H0587:1, H0590:1, S0010:1, S0665:1, |
| | | | | S0049:1, H0263:1, H0572:1, H0562:1, H0569:1, H0051:1, H0275:1, S6028:1, S0003:1, |
| | | | | H0252:1, H0400:1, H0591:1, H0551:1, H0264:1, H0488:1, H0056:1, L0351:1, L0370:1, |
| | | | | S0438:1, S0422:1, L0637:1, L0646:1, L0662:1, L0809:1, L0647:1, L0367:1, L0666:1, |
| | | | | L0665:1, H0701:1, L3811:1, L3824:1, H0547:1, H0648:1, S0152:1, H0522:1, S0406:1, |
| | | | | H0436:1, S0028:1, L0777:1, L0755:1, L0758:1, S0260:1, S0436:1, L0366:1, S0196:1 |
| | | | | and H0542:1. |
| 136 | HFTAS49 | 847386 | 146 | L0750:10, L0779:7, L0777:7, L0731:7, L0805:6, L0766:5, L0770:4, L0769:4, |
| | | | | L0761:4, L0776:4, L0752:4, L0794:3, L0751:3, L0754:3, H0140:2, L0803:2, L0747:2, |
| | | | | L0755:2, L0759:2, S0218:1, H0657:1, S0282:1, S0376:1, H0580:1, H0734:1, S0046:1, |
| | | | | H0747:1, H0392:1, H0497:1, H0635:1, H0575:1, S0346:1, S0474:1, S0049:1, H0123:1, |
| | | | | L0471:1, H0024:1, L0051:1, H0031:1, H0412:1, H0560:1, S0002:1, S0426:1, H0743:1, |
| | | | | L0763:1, L0772:1, L0374:1, L0375:1, L0806:1, L0382:1, L0809:1, S0126:1, H0659:1, |
| | | | | S0044:1, S0190:1, L0439:1, L0745:1, L0756:1, L0753:1, L0608:1 and L0604:1. |
| 137 | HFTBM38 | 638338 | 147 | AR185:7, AR089:5, AR055:5, AR104:4, AR218:3, AR060:3, AR299:3, AR316:3, AR277:3, |
| | | | | AR300:2, AR240:2, AR282:2, AR039:2, AR096:2, AR313:2, AR283:1, AR219:1 L0439:14, |
| | | | | H0052:9, L0770:3, H0544:2, L0769:2, L0650:2, L0438:2, H0593:2, L0742:2, L0779:2, |
| | | | | L0758:2, S0040:1, H0581:1, H0009:1, H0567:1, H0566:1, H0123:1, H0266:1, H0687:1, |
| | | | | H0433:1, H0100:1, S0002:1, L0369:1, L0640:1, L0639:1, L0637:1, L5575:1, L5565:1, |
| | | | | L0764:1, L0521:1, L0794:1, L0803:1, L0653:1, L0655:1, L0647:1, L0367:1, L5623:1, |
| | | | | L0790:1, L0663:1, L0665:1, H0670:1, S0406:1, H0479:1, L0743:1, L0751:1, L0747:1, |
| | | | | L0749:1, L0757:1, S0434:1, H0665:1 and H0352:1. |
| 138 | HFTDH56 | 862021 | 148 | AR060:10, AR096:9, AR055:9, AR104:8, AR240:6, AR218:6, AR283:5, AR185:5, |
| | | | | AR089:5, AR300:4, AR316:4, AR299:4, AR219:3, AR277:3, AR282:3, AR039:2, AR313:2 |
| | | | | L0754:7, L0777:6, L0794:4, L0803:4, L0750:4, L0731:4, H0046:3, H0050:3, H0620:3, |
| | | | | H0135:3, H0539:3, L0749:3, L0759:3, H0550:2, T0039:2, H0013:2, H0052:2, H0039:2, |
| | | | | L0809:2, H0547:2, L0748:2, H0624:1, S0001:1, H0208:1, H0619:1, H0393:1, S0278:1, |
| | | | | H0069:1, H0635:1, H0253:1, H0123:1, H0024:1, T0010:1, H0687:1, H0428:1, H0494:1, |
| | | | | L0764:1, L0784:1, L0807:1, L0438:1, H0689:1, L0747:1 and L0755:1. |
| 139 | HFVGK35 | 731868 | 149 | AR313:56, AR039:46, AR299:32, AR277:31, AR185:26, AR219:24, AR089:24, AR218:24, |
| | | | | AR096:24, AR316:22, AR104:20, AR283:17, AR240:17, AR300:16, AR055:14, AR282:13, |
| | | | | AR060:12 L0766:2, S0376:1, S0444:1, H0393:1, H0411:1, H0333:1, L0021:1, H0373:1, |
| | | | | H0688:1, L0142:1, H0087:1, L0520:1, L0769:1, L0803:1, L0664:1, L0665:1, H0436:1, |
| | | | | L0748:1, L0747:1, L0779:1, L0759:1 and H0217:1. |
| 140 | HFXAV37 | 626595 | 150 | AR313:13, AR039:13, AR300:8, AR299:7, AR277:6, AR096:6, AR185:5, AR089:5, |
| | | | | AR218:4, AR104:4, AR316:4, AR282:4, AR060:3, AR240:2, AR055:2, AR219:2, AR283:1 |
| | | | | S0002:2, S0134:1, S0001:1 and L0589:1. |
| 141 | HFXBT66 | 580831 | 151 | AR313:202, AR039:152, AR300:78, AR299:76, AR096:75, AR277:66, AR185:64, |
| | | | | AR089:63, AR316:53, AR104:50, AR219:44, AR218:43, AR240:36, AR282:31, AR060:29, |
| | | | | AR055:16, AR283:14 S0001:1 |
| 142 | HGBER72 | 826710 | 152 | AR313:68, AR039:56, AR299:36, AR185:31, AR096:30, AR300:28, AR277:27, AR089:27, |
| | | | | AR219:25, AR316:22, AR218:21, AR104:20, AR282:17, AR060:15, AR240:14, AR055:11, |
| | | | | AR283:7 L0766:12, H0436:9, H0543:8, L0769:6, L0749:6, L0731:6, H0556:5, L0655:5, |
| | | | | S0434:5, L0439:4, L0758:4, S0114:3, H0255:3, L3904:3, L0794:3, L0776:3, L0659:3, |
| | | | | L0783:3, L0809:3, L0751:3, H0423:3, S0358:2, S0360:2, S0007:2, H0549:2, H0550:2, |
| | | | | H0486:2, H0014:2, S0388:2, H0424:2, H0031:2, H0628:2, L5575:2, L0771:2, L0662:2, |
| | | | | L0791:2, L0793:2, L2265:2, L0438:2, S0328:2, L0740:2, L0756:2, H0265:1, H0686:1, |
| | | | | S0134:1, H0657:1, H0656:1, S0001:1, S0418:1, L0619:1, S0442:1, S0408:1, H0730:1, |
| | | | | H0749:1, H0619:1, H0351:1, S0222:1, H0592:1, H0586:1, T0060:1, H0250:1, H0618:1, |
| | | | | H0318:1, H0052:1, H0251:1, H0545:1, H0569:1, H0012:1, H0201:1, S6028:1, H0288:1, |
| | | | | H0622:1, T0023:1, L0483:1, H0604:1, S0036:1, H0135:1, H0040:1, H0264:1, S0039:1, |
| | | | | L0640:1, L0763:1, L0770:1, L0761:1, L0648:1, L0521:1, L0533:1, L0774:1, L0775:1, |
| | | | | L0376:1, L0378:1, L0629:1, L5623:1, L0666:1, L0664:1, S0310:1, L3811:1, H0689:1, |
| | | | | H0659:1, H0660:1, H0648:1, H0696:1, H0576:1, S0028:1, L0742:1, L0750:1, L0779:1, |
| | | | | L0777:1, L0752:1, L0591:1, L0601:1, H0542:1 and H0506:1. |
| 143 | HGBEY14 | 658691 | 153 | AR282:4, AR313:2, AR299:1, AR096:1, AR283:1, AR300:1, AR060:1, AR089:1 L0766:9, |
| | | | | L0803:8, L0777:4, L0770:3, H0411:2, H0012:2, L0809:2, L0793:2, L0747:2, H0620:1, |
| | | | | H0014:1, H0087:1, L0662:1, L0794:1, L0776:1, L0791:1, L0666:1, L0665:1, H0435:1, |
| | | | | H0627:1, L0749:1, L0779:1, L0731:1, L0758:1, H0445:1, S0026:1 and H0667:1. |
| 144 | HBBGS55 | 858372 | 154 | AR039:82, AR313:78, AR300:45, AR096:42, AR277:41, AR185:40, AR299:37, AR089:37, |
| | | | | AR104:29, AR316:28, AR240:24, AR219:20, AR218:19, AR282:17, AR060:16, ARO55:8, |
| | | | | AR283:7 H0542:5 |
| 145 | HHEOW19 | 886174 | 155 | AR169:30, AR089:25, AR207:25, AR308:25, AR214:24, AR263:24, AR165:24, AR264:24, |
| | | | | AR164:23, AR161:23, AR168:23, AR222:23, AR171:22, AR283:22, AR166:22, AR162:22, |
| | | | | AR311:21, AR163:21, AR096:21, AR223:21, AR213:19, AR104:19, AR316:19, AR219:19, |
| | | | | AR218:18, AR217:18, AR312:18, AR212:18, AR225:17, AR309:17, AR282:17, AR313:17, |
| | | | | AR039:17, AR272:17, AR299:16, AR216:16, AR060:15, AR172:15, AR274:15, AR053:15, |
| | | | | AR170:15, AR240:14, AR055:14, AR185:14, AR195:13, AR277:13, AR197:13, AR235:13, |
| | | | | AR295:12, AR192:12, AR224:12, AR296:11, AR297:11, AR246:11, AR285:10, AR198:10, |
| | | | | AR245:10, AR293:10, AR252:10, AR288:10, AR205:10, AR300:10, AR221:9, AR242:9, |
| | | | | AR287:9, AR201:9, AR247:9, AR253:9, AR033:9, AR266:9, AR215:9, AR275:8, AR291:8, |
| | | | | AR174:8, AR261:8, AR193:8, AR243:8, AR271:8, AR177:8, AR270:8, AR254:8, AR289:7, |
| | | | | AR236:7, AR286:7, AR175:6, AR204:6, AR269:6, AR189:6, AR294:6, AR180:6, |
| | | | | AR178:5, AR250:5, AR183:5, AR199:5, AR257:5, AR181:5, AR179:5, AR268:5, AR262:5, |
| | | | | AR173:5, AR290:5, AR258:5, AR255:4, AR061:4, AR210:4, AR191:4, AR190:4, AR229:4, |
| | | | | AR196:4, AR176:4, AR188:3, AR226:3, AR239:3, AR182:3, AR200:3, AR234:3, AR238:3, |
| | | | | AR267:3, AR232:3, AR230:3, AR203:3, AR256:3, AR231:3, AR211:3, AR237:3, AR233:2, |
| | | | | AR227:2, AR260:2, AR228:1 L0748:4, L0745:4, L0775:3, L0776:3, L0758:3, H0458:2, |
| | | | | H0050:2, S0003:2, H0529:2, L0764:2, L0747:2, L0599:2, L0362:2, H0556:1, S0116:1, |
| | | | | S0282:1, H0662:1, H0305:1, S0420:1, S0444:1, H0329:1, H0351:1, H0411;1, S0278:1, |
| | | | | H0438:1, T0039:1, H0635:1, H0156:1, H0235:1, H0327:1, L0471:1, H0428:1, H0031:1, |
| | | | | H0644:1, H0032:1, S0366:1, H0038:1, H0616:1, T0067:1, H0477:1, H0059:1, H0560:1, |
| | | | | H0625:1, S0422:1, L0769:1, L0761:1, L0667:1, L0771:1, L0662:1, L0806:1, L0655:1, |
| | | | | L0809:1, L5622:1, L0789:1, L0790:1, L0665:1, S0052:1, H0144:1, H0520:1, H0547:1, |
| | | | | H0519:1, H0435:1, H0539:1, S0044:1, S0392:1, L0754:1, L0749:1, L0750:1, L0779:1, |
| | | | | L0755:1, L0759:1, S0434:1, L0608:1, H0543:1 and S0452:1. |
| 146 | HHFEB79 | 1300768 | 156 | AR215:14, AR225:11, AR316:9, AR089:9, AR217:8, AR221:8, AR235:7, AR161:7, |
| | | | | AR162:7, AR163:7, AR170:7, AR039:7, AR096:7, AR172:6, AR216:6, AR168:6, AR176:6, |
| | | | | AR183:6, AR269:6, AR171:5, AR055:5, AR182:5, AR313:5, AR299:5, AR224:5, AR060:5, |
| | | | | AR233:5, AR214:5, AR296:5, AR180:4, AR266:4, AR300:4, AR282:4, AR222:4, AR181:4, |
| | | | | AR104:4, AR218:4, AR228:4, AR290:4, AR263:4, AR178:4, AR173:4, AR247:4, AR257:4, |
| | | | | AR270:4, AR255:4, AR185:4, AR237:4, AR229:4, AR169:4, AR165:4, AR277:4, AR177:4, |
| | | | | AR268:4, AR264:4, AR179:4, AR311:4, AR267:4, AR166:4, AR240:4, AR175:4, AR309:4, |
| | | | | AR200:3, AR164:3, AR191:3, AR061:3, AR283:3, AR219:3, AR236:3, AR293:3, AR291:3, |
| | | | | AR231:3, AR261:3, AR234:3, AR288:3, AR190:3, AR223:3, AR294:3, AR211:3, AR238:3, |
| | | | | AR262:3, AR230:3, AR210:3, AR287:3, AR297:3, AR250:3, AR239:3, AR289:3, AR196:2, |
| | | | | AR203:2, AR226:2, AR285:2, AR053:2, AR272:2, AR174:2, AR286:2, AR227:2, AR188:2, |
| | | | | AR254:2, AR295:2, AR258:2, AR275:2, AR232:2, AR256:2, AR189:2, AR312:2, AR308:2, |
| | | | | AR212:2, AR199:2, AR205:2, AR260:2, AR198:1, AR033:1, AR274:1, AR192:1 H0494:1 |
| | | | | and H0768:1. |
| | HHFEB79 | 863749 | 403 | |
| 147 | HHFFF87 | 778071 | 157 | AR089:36, AR316:33, AR281:33, AR313:33, AR218:32, AR283:32, AR096:31, AR315:30, |
| | | | | AR219:30, AR104:29, AR240:28, AR282:28, AR314:27, AR299:27, AR039:27, AR183:27, |
| | | | | AR277:26, AR296:26, AR269:26, AR280:26, AR263:26, AR291:26, AR060:25, AR289:25, |
| | | | | AR310:23, AR295:23, AR055:23, AR265:23, AR290:23, AR266:23, AR213:23, AR247:22, |
| | | | | AR185:22, AR270:22, AR175:21, AR268:21, AR033:21, AR284:21, AR285:20, AR256:20, |
| | | | | AR177:20, AR300:20, AR292:19, AR267:19, AR298:19, AR053:19, AR182:19, AR231:18, |
| | | | | AR312:18, AR293:18, AR294:17, AR052:17, AR259:16, AR286:16, AR309:16, AR232:16, |
| | | | | AR238:16, AR258:15, AR253:15, AR184:14, AR251:14, AR249:14, AR248:14, AR234:14, |
| | | | | AR179:14, AR226:12, AR229:12, AR237:12, AR205:11, AR061:10, AR233:10, AR227:9, |
| | | | | AR244:9, AR206:7, AR246:7, AR275:7, AR273:6, AR202:6, AR194:5, AR271:5, AR274:5, |
| | | | | AR198:5, AR192:5, AR186:4, AR241:4, AR243:3 L0748:18, L0747:14, L0749:12, |
| | | | | L0731:12, L0766:10, L0771:9, L0809:9, L0666:7, L0754:7, H0556:6, L0775:6, |
| | | | | L0665:6, L0751:6, L0663:5, S0380:5, L0439:5, L0750:5, L0755:5, H0333:4, H0597:4, |
| | | | | H0024:4, H0039:4, H0551:4, H0413:4, L0769:4, L0662:4, L0794:4, L0649:4, L0783:4, |
| | | | | L0742:4, L0759:4, L0596:4, L0591:4, H0624:3, S0356:3, H0156:3, S0010:3, H0328:3, |
| | | | | H0553:3, H0038:3, H0494:3, H0633:3, L0637:3, L0776:3, L0659:3, L0438:3, H0658:3, |
| | | | | S0406:3, L0740:3, L0745:3, L0777:3, L0752:3, H0265:2, H0661:2, L3659:2, S0418:2, |
| | | | | S0442:2, S0354:2, S0444:2, S0360:2, S0045:2, L0717:2, S0222:2, H0331:2, H0013:2, |
| | | | | H0581:2, H0052:2, H0012:2, H0620:2, H0014:2, H0051:2, S0214:2, H0030:2, H0673:2, |
| | | | | H0135:2, T0067:2, H0412:2, S0440:2, H0529:2, L0770:2, L0761:2, L0803:2, L0805:2, |
| | | | | L0655:2, S0374:2, H0520:2, H0696:2, L0757:2, L0758:2, S0436:2, L0588:2, S0192:2, |
| | | | | H0542:2, L3643:1, H0685:1, S0114:1, S0134:1, H0657:1, H0341:1, S0212:1, S0001:1, |
| | | | | H0669:1, H0662:1, S0420:1, H0676:1, S0408:1, H0637:1, H0580:1, H0208:1, S0476:1, |
| | | | | H0619:1, H0393:1, L3388:1, S6014:1, H0357:1, H0642:1, H0486:1, H0042:1, H0575:1, |
| | | | | S0346:1, H0318:1, S0474:1, H0263:1, H0204:1, H0327:1, H0545:1, H0041:1, H0009:1, |
| | | | | H0050:1, L0471:1, L0163:1, S0051:1, H0083:1, H0355:1, H0594:1, H0271:1, H0416:1, |
| | | | | H0687:1, S0314:1, H0688:1, H0428:1, H0622:1, T0023:1, L0483:1, H0644:1, H0628:1, |
| | | | | H0617:1, H0090:1, H0040:1, H0264:1, H0059:1, H0100:1, L0564:1, S0150:1, H0646:1, |
| | | | | S0422:1, L0520:1, L0638:1, L0796:1, L3905:1, L5566:1, L0646:1, L0764:1, L0521:1, |
| | | | | L0363:1, L0768:1, L0650:1, L0774:1, L0375:1, L0651:1, L0606:1, L0807:1, L0656:1, |
| | | | | L0382:1, L0529:1, L0788:1, L0664:1, L0352:1, H0519:1, H0690:1, H0435:1, H0660:1, |
| | | | | H0666:1, H0672:1, H0651:1, H0330:1, H0539:1, H0752:1, S0152:1, H0521:1, H0522:1, |
| | | | | H0436:1, S3014:1, S0027:1, L0744:1, L0756:1, L0779:1, L0780:1, L0753:1, H0445:1, |
| | | | | L0485:1, L0581:1, L0608:1, L0366:1, H0653:1 and S0276:1. |
| 148 | HHFFL34 | 753230 | 158 | AR265:3, AR183:3, AR184:3, AR248:3, AR309:2, AR310:2, AR269:2, AR206:1, AR282:1, |
| | | | | AR267:1, AR270:1, AR295:1, AR277:1, AR186:1, AR205:1 H0599:3, L0766:3, S0037:3, |
| | | | | H0556:2, H0242:2,H0620:2, H0543:2, H0170:1, T0002:1, H0300:1, S0360:1, S0045:1, |
| | | | | S0476:1, H0549:1, H0309:1, H0545:1, H0081:1, H0050:1, S0388:1, H0644:1, T0041:1, |
| | | | | S0144:1, H0529:1, H0026:1, L0659:1, L2261:1, H0520:1, S0126:1, H0539:1, L0602:1, |
| | | | | S0152:1, S0044:1, H0436:1, S3014:1, S0027:1, L0779:1, L0731:1 and S0424:1. |
| 149 | HHFFS40 | 824059 | 159 | AR219:22, AR277:18, AR283:17, AR218:16, AR039:15, AR282:15, AR089:14, AR316:13, |
| | | | | AR313:13, AR096:12, AR299:12, AR104:12, AR240:10, AR055:10, AR300:10, AR185:9, |
| | | | | AR060:8 S0422:7, L0748:6, L0591:6, L0766:5, L0754:5, H0423:5, S0408:4, H0069:4, |
| | | | | L0803:4, L0602:4, H0657:3, S0442:3, S0046:3, H0596:3, S0003:3, H0032:3, H0169:3, |
| | | | | H0674:3, L0662:3, L0794:3, L0526:3, H0670:3, L0740:3, L0759:3, S0134:2, S0212:2, |
| | | | | H0661:2, S0444:2, H0046:2, L0471:2, H0355:2, H0038:2, H0100:2, L0564:2, S0440:2, |
| | | | | H0529:2, L0770:2, L0769:2, L0667:2, L0771:2, L0521:2, L0804:2, L0805:2, L0384:2, |
| | | | | L0809:2, L0665:2, H0659:2, L0743:2, L0750:2, L0731:2, S0436:2, L0592:2, L0599:2, |
| | | | | L0608:2, L0362:2, H0171:1, H0556:1, H0686:1, H0713:1, H0717:1, H0738:1, H0740:1, |
| | | | | H0656:1, H0663:1, H0662:1, H0402:1, S0356:1, H0742:1, H0730:1, H0747:1, S0222:1, |
| | | | | H0574:1, H0632:1, H0486:1, H0013:1, H0581:1, S0049:1, H0052:1, H0194:1, H0309:1, |
| | | | | H0263:1, H0123:1, H0050:1, H0373:1, H0510:1, S6028:1, H0266:1, H0615:1, L0483:1, |
| | | | | H0644:1, L0143:1, H0708:1, H0135:1, H0163:1, H0090:1, H0616:1, T0067:1, H0488:1, |
| | | | | H0412:1, H0059:1, H0494:1, S0382:1, S0306:1, S0450:1, H0509:1, H0641:1, H0647:1, |
| | | | | H0646:1, L0520:1, L0763:1, L0637:1, L0373:1, L0363:1, L5564:1, L0775:1, L0375:1, |
| | | | | L0651:1, L0655:1, L0661:1, L0527:1, L0656:1, L0659:1, L0518:1, L0532:1, L0663:1, |
| | | | | L0664:1, S0374:1, H0682:1, H0658:1, H0660:1, H0672:1, H0539:1, H0521:1, S0044:1, |
| | | | | S0406:1, H0478:1, L0744:1, L0439:1, L0747:1, L0779:1, L0777:1, L0758:1, L0480:1, |
| | | | | L0595:1, H0667:1, S0192:1, S0194:1, S0196:1, H0422:1 and S0424:1. |
| 150 | HHGCS78 | 634605 | 160 | AR277:76, AR283:71, AR219:57, AR218:56, AR316:56, AR089:52, AR313:52, AR240:51, |
| | | | | AR055:45, AR282:45, AR299:44, AR104:41, AR096:41, AR185:34, AR039:33, AR060:31, |
| | | | | AR300:30 L0770:7, H0333:3, L0783:2, L0731:2, H0445:2, S0418:1, H0741:1, S0002:1, |
| | | | | L0369:1, L0643:1, L0764:1, L0794:1, L0803:1, L0775:1, L0375:1, L0378:1, L0655:1, |
| | | | | L0809:1, L0666:1, L0664:1, L0754:1, L0747:1, L0749:1, L0752:1 and L0591:1. |
| 151 | HHGDT26 | 658692 | 161 | L0748:2, S0218:1, H0333:1, H0271:1, S0210:1, L0776:1, S0188:1, L0745:1 and |
| | | | | H0423:1. |
| 152 | HHPFP26 | 753269 | 162 | AR219:14, AR218:13, AR313:11, AR299:8, AR089:8, AR185:7, AR316:7, AR039:6, |
| | | | | AR096:6, AR300:6, AR055:6, AR060:4, AR104:4, AR282:3, AR240:2, AR283:2, AR277:2 |
| | | | | L0766:4, H0441:3, S0422:3, L0750:3, L0752:3, L0755:3, H0624:2, S0360:2, L0771:2, |
| | | | | L0662:2, L0794:2, L0803:2, L0804:2, L0776:2, L0791:2, L0666:2, S0406:2, L0439:2, |
| | | | | L0731:2, L0758:2, S0194:2, H0170:1, L3388:1, H0411:1, H0486:1, L0163:1, H0051:1, |
| | | | | H0551:1, H0625:1, L0381:1, L0650:1, L0659:1, L0518:1, L0790:1, L0793:1, H0519:1, |
| | | | | H0659:1, S0380:1, S0013:1, L0747:1, L0777:1, L0591:1, L0608:1 and H0422:1. |
| 153 | HHPFU28 | 824573 | 163 | AR218:11, AR039:9, AR219:9, AR104:8, AR300:8, AR185:7, AR055:6, AR299:6, |
| | | | | AR089:6, AR096:6, AR240:6, AR060:5, AR282:5, AR316:5, AR313:4, AR277:3, |
| | | | | AR283:3 L0622:2, L0518:2, L0382:2, L0663:2, L0750:2, L0752:2, L0362:2, S0114:1, |
| | | | | S0420:1, S0354:1, S0444:1, S0222:1, S0010:1, H0046:1, H0051:1, L0483:1, H0644:1, |
| | | | | H0412:1, H0529:1, L0794:1, L0561:1, L0666:1, S0330:1, S0028:1, L0779:1, L0777:1, |
| | | | | L0758:1, S0031:1, H0444:1 and L0592:1. |
| 154 | HHPSA85 | 658695 | 164 | AR104:25, AR313:9, AR055:5, AR060:5, AR240:5, AR096:5, AR277:5, AR282:4, |
| | | | | AR089:4, AR316:4, AR185:4, AR218:4, AR300:4, AR299:3, AR039:3, AR283:2, AR219:2 |
| | | | | L0756:5, H0051:4, L0438:4, L0759:4, S0031:4, S0007:3, S6028:3, L0666:3, L0439:3, |
| | | | | H0556:2, S6024:2, S0300:2, H0013:2, S0036:2, L0770:2, L0411:1, L0393:1, H0393:1, |
| | | | | L3653:1, L3657:1, H0581:1, H0235:1, H0327:1, H0046:1, H0009:1, L0157:1, H0201:1, |
| | | | | S0051:1, H0399:1, H0064:1, H0038:1, H0040:1, H0634:1, H0100:1, L0638:1, L0796:1, |
| | | | | L0768:1, L0794:1, L0766:1, L0803:1, L0606:1, L0791:1, L0792:1, H0144:1, H0698:1, |
| | | | | L3811:1, H0547:1, H0519:1, H0659:1, L0779:1, L0752:1, S0260:1 and H0136:1. |
| 155 | HHSBI65 | 801910 | 165 | AR176:10, AR216:9, AR217:8, AR168:8, AR169:8, AR182:8, AR161:8, AR196:8, |
| | | | | AR162:8, AR214:8, AR228:8, AR269:8, AR231:8, AR233:7, AR171:7, AR207:7, AR229:7, |
| | | | | AR181:7, AR223:7, AR163:7, AR198:7, AR165:7, AR172:7, AR225:7, AR267:7, AR224:7, |
| | | | | AR266:6, AR268:6, AR170:6, AR164:6, AR237:6, AR221:6, AR222:6, AR177:6, AR179:6, |
| | | | | AR235:6, AR270:6, AR183:6, AR204:6, AR288:6, AR053:6, AR239:6, AR193:5, AR236:5, |
| | | | | AR250:5, AR191:5, AR264:5, AR293:5, AR296:5, AR055:5, AR238:5, AR247:5, AR309:5, |
| | | | | AR300:5, AR178:5, AR295:5, AR290:5, AR294:5, AR060:5, AR061:5, AR287:5, AR257:5, |
| | | | | AR201:5, AR282:5, AR291:5, AR175:5, AR311:4, AR261:4, AR234:4, AR289:4, AR275:4, |
| | | | | AR262:4, AR252:4, AR242:4, AR213:4, AR253:4, AR297:4, AR203:4, AR277:4, AR180:4, |
| | | | | AR212:4, AR200:4, AR316:4, AR286:4, AR274:4, AR255:4, AR312:4, AR240:4, AR174:4, |
| | | | | AR215:4, AR039:4, AR192:4, AR263:4, AR205:4, AR283:3, AR232:3, AR271:3, AR285:3, |
| | | | | AR190:3, AR226:3, AR185:3, AR033:3, AR246:3, AR230:3, AR188:3, AR308:3, AR227:3, |
| | | | | AR096:3, AR173:3, AR313:3, AR089:3, AR195:3, AR272:3, AR199:3, AR189:3, AR260:3, |
| | | | | AR197:3, AR299:3, AR104:2, AR210:2, AR258:2, AR211:2, AR256:2, AR243:2, AR218:2, |
| | | | | AR219:2 L0439:7, L0794:5, L0766:5, S0354:2, H0549:2, S0051:2, S0142:2, L0372:2, |
| | | | | L0809:2, L0438:2, H0658:2, H0650:1, H0381:1, S0116:1, S0356:1, S0360:1, H0261:1, |
| | | | | H0586:1, H0486:1, H0036:1, H0052:1, L0738;1, H0457:1, H0014:1, H0051:1, H0617:1, |
| | | | | H0032:1, H0561:1, S0440:1, H0633:1, L0763:1, L0761:1, L0800:1, L0644:1, L0645:1, |
| | | | | L0764:1, L0648:1, L0655:1, L0657:1, L0658:1, L0368:1, L0665:1, L3811:1, S0044:1, |
| | | | | S0406:1, H0626:1, L0731:1, S0434:1, S0436:1, H0653:1 and H0423:1. |
| 156 | HHSDI53 | 862028 | 166 | AR313:45, AR039:43, AR300:22, AR299:22, AR096:21, AR316:20, AR185:19, AR089:19, |
| | | | | AR277:19, AR219:15, AR240:14, AR104:14, AR218:13, AR282:12, AR060:11, AR055:8, |
| | | | | AR283:4 L0766:10, L0752:8, L0439:6, L0747:6, L0740:5, L0756:5, S0408:4, L0779:4, |
| | | | | L0777:4, L0731:4, S0051:3, H0169:3, L0803:3, L0774:3, L0809:3, L0754:3, S0360:2, |
| | | | | H0574:2, S0422:2, L0763:2, L0805:2, L0666:2, L0663:2, L0751:2, L0755:2, L0759:2, |
| | | | | L0601:2, H0624:1, S0040:1, H0713:1, S0114:1, S0298:1, S0420:1, S0444:1, H0580:1, |
| | | | | H0730:1, H0733:1, L3388:1, H0351:1, H0600:1, H0331:1, H0013:1, L0021:1, H0575:1, |
| | | | | H0590:1, T0110:1, H0012:1, H0615:1, H0031:1, H0553:1, H0591:1, S0440:1, H0646:1, |
| | | | | S0002:1, L0772:1, L0645:1, L0773:1, L0662:1, L0794:1, L0381:1, L0775:1, L0776:1, |
| | | | | L0657:1, L0659:1, L0528:1, L5622:1, L0790:1, H0547:1, H0648:1, H0539:1, S0152:1, |
| | | | | H0696:1, S0044:1, S0406:1, S0028:1, L0758:1, S0434:1, S0436:1, L0366:1, S0011:1, |
| | | | | S0276:1, H0422:1, S0398:1 and S0424:1. |
| 157 | HHSFC09 | 801911 | 167 | L0752:6, L0758:4, L0662:3, L0776:3, L0666:3, L0750:3, L0755:3, H0657:2, H0597:2, |
| | | | | H0150:2, H0081:2, S0388:2, H0213:2, H0617:2, L0770:2, L0764:2, L0775:2, L0657:2, |
| | | | | L0659:2, L0439:2, L0740:2, L0751:2, L0747:2, H0543:2, H0624:1, H0265:1, H0254:1, |
| | | | | H0638:1, H0586:1, S0280:1, H0618:1, H0581:1, H0309:1, H0544:1, L0471:1, H0024:1, |
| | | | | S0051:1, H0688:1, H0424:1, H0644:1, L0055:1, H0100:1, L0351:1, H0396:1, S0144:1, |
| | | | | L0769:1, L0638:1, L0643:1, L0773:1, L0648:1, L0766:1, L0381:1, L0806:1, L0655:1, |
| | | | | L0606:1, L0663:1, H0144:1, H0520:1, H0651:1, L0743:1, L0731:1, L0605:1, L0591:1, |
| | | | | L0592:1 and H0542:1. |
| 158 | HJMAA03 | 824062 | 168 | AR207:12, AR309:11, AR192:11, AR252:10, AR053:9, AR212:9, AR242:9, AR235:9, |
| | | | | AR213:8, AR215:8, AR198:8, AR170:8, AR169:8, AR161:8, AR162:8, AR253:8, AR223:8, |
| | | | | AR165:8, AR166:8, AR263:7, AR163:7, AR164:7, AR274:7, AR224:7, AR245:7, AR264:7, |
| | | | | AR214:7, AR195:7, AR217:7, AR174:7, AR197:7, AR261:7, AR311:7, AR221:7, AR282:6, |
| | | | | AR308:6, AR222:6, AR240:6, AR312:6, AR205:6, AR171:6, AR168:6, AR193:6, AR313:6, |
| | | | | AR246:6, AR177:6, AR173:6, AR277:6, AR216:6, AR247:6, AR180:6, AR225:6, AR283:5, |
| | | | | AR269:5, AR300:5, AR089:5, AR201:5, AR272:5, AR297:5, AR189:5, AR204:5, AR183:5, |
| | | | | AR299:5, AR175:5, AR288:5, AR176:5, AR295:5, AR271:5, AR250:5, AR096:5, AR275:5, |
| | | | | AR270:4, AR316:4, AR196:4, AR191:4, AR286:4, AR178:4, AR290:4, AR185:4, AR268:4, |
| | | | | AR296:4, AR291:4, AR257:4, AR033:4, AR199:4, AR181:4, AR039:4, AR236:4, AR229:4, |
| | | | | AR243:4, AR285:4, AR254:4, AR289:4, AR238:3, AR172:3, AR293:3, AR262:3, AR190:3, |
| | | | | AR287:3, AR179:3, AR200:3, AR055:3, AR104:3, AR060:3, AR188:3, AR239:3, AR182:3, |
| | | | | AR233:3, AR258:3, AR294:3, AR061:3, AR237:3, AR231:3, AR234:3, AR226:3, AR203:3, |
| | | | | AR255:3, AR232:3, AR230:2, AR211:2, AR227:2, AR228:2, AR267:2, AR210:2, AR266:2, |
| | | | | AR219:2, AR260:1, AR218:1, AR256:1 L0749:8, L0803:5, L0748:5, L0777:5, L0794:4, |
| | | | | L0766:4, L0804:4, H0135:3, H0551:3, L0754:3, L0599:3, H0542:3, H0556:2, H0545:2, |
| | | | | H0674:2, L0764:2, L0774:2, L0776:2, L0655:2, H0521:2, L0439:2, L0752:2, L0731:2, |
| | | | | L0596:2, H0395:1, H0713:1, H0483:1, H0663:1, S0358:1, H0580:1, H0329:1, S0045:1, |
| | | | | H0453:1, H0427:1, H0599:1, H0706:1, H0150:1, H0123:1, L0471:1, L0163:1, H0051:1, |
| | | | | H0275:1, S0003:1, S0214:1, H0628:1, H0090:1, H0040:1, H0087:1, T0067:1, H0412:1, |
| | | | | H0494:1, H0509:1, H0633:1, H0647:1, S0344:1, L0769:1, L0637:1, L0761:1, L0772:1, |
| | | | | L0800:1, L0374:1, L0771:1, L0363:1, L0768:1, L0806:1, L0659:1, L0382:1, L0809:1, |
| | | | | L0545:1, L0789:1, L0666:1, H0519:1, H0659:1, S0152:1, S0404:1, L0751:1, L0747:1, |
| | | | | L0750:1, L0779:1, S0436:1, L0608:1, S0276:1, H0543:1, H0506:1 and H0352:1. |
| 159 | HJMAV41 | 862029 | 169 | AR104:44, AR277:28, AR283:16, AR219:12, AR316:12, AR299:10, AR240:10, AR055:9, |
| | | | | AR089:9, AR218:9, AR185:9, AR039:9, AR300:8, AR313:8, AR282:8, AR096:8, AR060:7 |
| | | | | L0742:15, L0439:7, S0007:5, L0741:4, H0135:3, L0516:2, H0052:2, L0438:2, |
| | | | | L0426:1, H0402:1, H0351:1, S0222:1, H0441:1, H0333:1, H0545:1, S0388:1, S0038:1, |
| | | | | L0351:1, L0370:1, L0770:1, L0769:1, L5566:1, L0805:1, L0659:1, L0792:1, L0793:1, |
| | | | | H0547:1, L0750:1, L0759:1, L0366:1, H0008:1, H0721:1 and H0352:1. |
| 160 | HJMAY90 | 793678 | 170 | AR283:23, A11277:22, AR089:21, AR313:18, AR316:18, AR282:18, AR240:17, AR300:17, |
| | | | | AR185:16, AR096:14, AR219:14, AR299:14, AR218:14, AR104:13, AR055:13, AR039:12, |
| | | | | AR060:11 L0777:9, L0757:9, L0764:8, L0809:6, L0747:6, H0674:4, L0783:4, L0666:4, |
| | | | | L0748:4, L0751:4, L0731:4, L0591:4, L0770:3, L0372:3, L0662:3, L0775:3, L0518:3, |
| | | | | H0658:3, L0604:3, H0638:2, S0360:2, L0769:2, L0761:2, L0766:2, L0804:2, L0663:2, |
| | | | | H0520:2, S3012:2, S0027:2, S0206:2, L0439:2, L0750:2, L0779:2, L0759:2, L0600:2, |
| | | | | S6024:1, H0295:1, H0341:1, S0001:1, S0356:1, S0376:1, H0580:1, H0735:1, S0222:1, |
| | | | | H0455:1, H0574:1, H0632:1, H0427:1, H0599:1, H0318:1, H0052:1, H0263:1, H0231:1, |
| | | | | H0546:1, H0545:1, H0009:1, H0620:1, H0083:1, H0687:1, H0252:1, H0615:1, H0029:1, |
| | | | | H0032:1, H0673:1, H0135:1, H0100:1, L0564:1, H0641:1, H0646:1, H0652:1, S0426:1, |
| | | | | L0640:1, L0638:1, L0667:1, L0772:1, L0800:1, L0768:1, L0784:1, L0805:1, L0655:1, |
| | | | | L0659:1, L0517:1, L0526:1, S0052:1, L0438:1, H0682:1, S0330:1, S0380:1, H0521:1, |
| | | | | L0740:1, L0786:1, L0780:1, L0752:1, S0436:1, L0605:1, L0599:1, S0026:1 and :1. |
| 161 | HJPBE39 | 801960 | 171 | AR214:33, AR171:25, AR217:24, AR223:24, AR225:23, AR168:21, AR170:21, AR172:20, |
| | | | | AR215:19, AR216:18, AR169:16, AR237:13, AR224:13, AR222:10, AR233:10, AR238:10, |
| | | | | AR239:10, AR221:9, AR061:8, AR228:7, AR231:7, AR257:7, AR165:7, AR089:6, |
| | | | | AR218:6, AR164:6, AR163:6, AR162:6, AR285:6, AR161:6, AR166:6, AR210:6, AR286:6, |
| | | | | AR269:6, AR294:5, AR247:5, AR055:5, AR309:5, AR297:5, AR234:5, AR316:5, AR275:5, |
| | | | | AR229:5, AR312:5, AR287:5, AR181:5, AR190:4, AR179:4, AR270:4, AR240:4, AR282:4, |
| | | | | AR104:4, AR175:4, AR199:4, AR300:4, AR060:4, AR258:4, AR173:4, AR293:4, AR180:4, |
| | | | | AR291:4, AR219:4, AR189:4, AR205:4, AR299:4, AR182:4, AR193:4, AR243:4, AR255:4, |
| | | | | AR283:4, AR200:4, AR204:4, AR311:4, AR295:4, AR203:4, AR289:4, AR290:4, AR242:4, |
| | | | | AR262:4, AR185:4, AR176:4, AR254:3, AR250:3, AR188:3, AR227:3, AR288:3, AR296:3, |
| | | | | AR313:3, AR264:3, AR268:3, AR174:3, AR201:3, AR053:3, AR096:3, AR177:3, AR261:3, |
| | | | | AR178:3, AR232:3, AR236:3, AR308:3, AR260:3, AR235:3, AR277:3, AR191:3, AR197:3, |
| | | | | AR213:3, AR226:3, AR183:3, AR253:3, AR263:3, AR267:3, AR211:3, AR246:3, AR033:3, |
| | | | | AR212:3, AR195:2, AR196:2, AR039:2, AR256:2, AR266:2, AR271:2, AR230:2, AR192:2, |
| | | | | AR207:2, AR272:2, AR198:1 L0375:8, L0809:7, L0794:6, S0410:5, L0803:5, H0309:4, |
| | | | | S0003:4, S0422:4, L0592:4, S0358:3, H0747:3, H0251:3, H0494:3, L0065:3, S0438:3, |
| | | | | H0529:3, S0378:3, S0044:3, S0406:3, L0439:3, L0751:3, L0747:3, L0731:3, S0436:3, |
| | | | | L0608:3, H0685:2, S0114:2, S0408:2, T0008:2, S0278:2, H0497:2, L0622:2, H0046:2, |
| | | | | S0050:2, H0083:2, T0006:2, H0166:2, H0413:2, H0625:2, S0144:2, S0344:2, L0369:2, |
| | | | | L0763:2, L0800:2, L0764:2, L0768:2, L0499:2, L0804:2, L0775:2, L0376:2, L0518:2, |
| | | | | L4508:2, L0666:2, L0663:2, L0438:2, H0518:2, L0750:2, L0777:2, L0753:2, L0755:2, |
| | | | | L0758:2, L0759:2, H0445:2, L0591:2, L0599:2, H0624:1, H0170:1, L0615:1, S0134:1, |
| | | | | H0650:1, S0116:1, H0306:1, H0402:1, S0420:1, S0356:1, S0376:1, S0444:1, S0360:1, |
| | | | | H0580:1, S0007:1, S0046:1, H0393:1, L0717:1, H0351:1, H0453:1, H0592:1, H0586:1, |
| | | | | S0005:1, H0559:1, L0586:1, H0013:1, S0280:1, H0618:1, T0048:1, H0318:1, H0052:1, |
| | | | | H0085:1, H0231:1, H0544:1, H0081:1, S0388:1, S0051:1, H0071:1, H0375:1, H0266:1, |
| | | | | H0188:1, S0214:1, L0055:1, H0674:1, L0455:1, H0124:1, H0040:1, T0042:1, H0429:1, |
| | | | | S0352:1, S0440:1, S0142:1, H0538:1, S0002:1, L0520:1, L0371:1, L0770:1, L3904:1, |
| | | | | L0761:1, L0667:1, L0772:1, L0646:1, L0642:1, L0374:1, L0648:1, L0662:1, L0381:1, |
| | | | | L0650:1, L0774:1, L0805:1, L0653:1, L0776:1, L0606:1, L0657:1, L0659:1, L0517:1, |
| | | | | L0542:1, L0384:1, L0382:1, L0543:1, L5622:1, L5623:1, L0791:1, L5286:1, L0665:1, |
| | | | | L2257:1, L2263:1, L0710:1, L2264:1, T0068:1, H0684:1, H0435:1, H0670:1, H0648:1, |
| | | | | H0672:1, H0539:1, H0754:1, H0710:1, S0152:1, H0555:1, H0626:1, S3012:1, L0742:1, |
| | | | | L0748:1, L0779:1, S0434:1, L0596:1, L0361:1, S0192:1, H0542:1, H0543:1, H0422:1, |
| | | | | S0424:1, L3563:1, H0775:1 and H0352:1. |
| 162 | HJPBK28 | 638191 | 172 | L0794:6, L0439:5, L0759:5, H0556:4, L0771:4, L0770:3, L0643:3, H0144:3, H0156:2, |
| | | | | H0188:2, H0090:2, H0641:2, L0662:2, L0766:2, L0803:2, L0776:2, L0661:2, L0659:2, |
| | | | | L0790:2, H0522:2, S0436:2, H0295:1, T0049:1, H0583:1, S0116:1, H0663:1, H0662:1, |
| | | | | S0356:1, S0376:1, S0132:1, H0586:1, H0587:1, H0486:1, H0575:1, H0748:1, H0744:1, |
| | | | | H0309:1, H0231:1, H0083:1, H0271:1, H0286:1, H0622:1, H0031:1, L0455:1, H0068:1, |
| | | | | H0063:1, H0551:1, H0264:1, H0268:1, T0041:1, H0494:1, H0633:1, L0637:1, L3905:1, |
| | | | | L0800:1, L0775:1, L0806:1, L0383:1, L0809:1, L0666:1, L0663:1, L0664:1, L2264:1, |
| | | | | L3827:1, L3828:1, H0519:1, H0593:1, H0435:1, H0672:1, H0436:1, S0027:1, L0740:1, |
| | | | | L0749:1, L0731:1, L0757:1, L0758:1, H0136:1, H0423:1 and S0446:1. |
| 163 | HJPCH08 | 840365 | 173 | AR277:9, AR055:9, AR218:8, AR060:6, AR219:6, AR283:5, AR300:5, AR104:5, AR240:5, |
| | | | | AR316:5, AR185:5, AR313:5, AR299:4, AR089:3, AR096:3, AR039:3, AR282:2 L0758:9, |
| | | | | L0777:8, H0618:6, L0794:6, L0749:6, L0774:4, L0748:4, L0750:4, S0418:3, S0358:3, |
| | | | | H0266:3, L0770:3, L0766:3, L0759:3, S0360:2, H0150:2, H0087:2, L0369:2, L0769:2, |
| | | | | L0771:2, L0789:2, L0663:2, L0665:2, H0422:2, H0556:1, H0295:1, H0370:1, H0331:1, |
| | | | | H0013:1, L0021:1, L0022:1, H0253:1, H0052:1, H0204:1, H0544:1, H0012:1, H0620:1, |
| | | | | H0024:1, H0083:1, H0510:1, H0416:1, H0252:1, H0424:1, H0617:1, L0564:1, H0494:1, |
| | | | | S0144:1, L0372:1, L0646:1, L0800:1, L0641:1, L0764:1, L0649:1, L0803:1, L0650:1, |
| | | | | L0775:1, L0776:1, L0655:1, L0659:1, L0809:1, L0666:1, L0664:1, H0144:1, H0521:1, |
| | | | | H0436:1, S3012:1, L0747:1, L0786:1, L0757:1, L0608:1 and L0595:1. |
| 164 | HKABU43 | 838573 | 174 | AR219:2, AR282:1, AR300:1, AR316:1 L0794:7, L0803:3, H0052:2, S0250:2, H0032:2, |
| | | | | H0494:2, H0529:2, L0666:2, L0663:2, L0747:2, L0759:2, H0657:1, H0664:1, H0662:1, |
| | | | | S0442:1, H0741:1, H0735:1, H0733:1, S0046:1, H0640:1, H0331:1, H0559:1, T0039:1, |
| | | | | H0013:1, S0280:1, H0318:1, T0110:1, H0024:1, S0364:1, H0591:1, H0038:1, H0040:1, |
| | | | | S0142:1, L0640:1, L0667:1, L0764:1, L0662:1, L0804:1, L0659:1, L0517:1, L0789:1, |
| | | | | L4559:1, L0664:1, S0126:1, H0435:1, H0539:1, S0152:1, H0521:1, H0522:1, S0027:1, |
| | | | | L0779:1, L0758:1, L0485:1, L0601:1, S0026:1, H0667:1, S0192:1, H0542:1 and |
| | | | | H0506:1. |
| 165 | HKACI79 | 853361 | 175 | AR313:63, AR039:48, AR300:33, AR096:31, AR089:31, AR277:26, AR185:25, AR299:24, |
| | | | | AR316:20, AR240:19, AR218:15, AR219:14, AR282:12, AR104:12, AR060:9, AR055:6, |
| | | | | AR283:3 H0659:2, S0418:1, L0004:1, H0041:1, H0087:1, H0494:1, H0646:1, S0422:1, |
| | | | | L0373:1, L0766:1, L0665:1, S0380:1, L0748:1, L0740:1 and L0589:1. |
| 166 | HXAFF50 | 790192 | 176 | AR281:19, AR271:17, AR313:15, AR205:15, AR263:15, AR275:15, AR315:15, AR039:14, |
| | | | | AR265:14, AR280:13, AR194:13, AR247:12, AR274:12, AR273:12, AR310:12, AR282:12, |
| | | | | AR213:11, AR202:11, AR053:11, AR052:11, AR314:11, AR089:11, AR283:10, AR299:10, |
| | | | | AR277:10, AR312:10, AR246:10, AR240:10, AR316:10, AR033:10, AR300:10, AR266:10, |
| | | | | AR241:9, AR251:9, AR096:9, AR104:9, AR243:9, AR183:8, AR185:8, AR206:8, AR309:8, |
| | | | | AR289:7, AR219:7, AR238:7, AR295:7, AR285:7, AR182:7, AR292:7, AR184:7, AR284:7, |
| | | | | AR218:7, AR192:7, AR232:7, AR270:7, AR249:6, AR296:6, AR229:6, AR231:6, AR294:6, |
| | | | | AR286:6, AR248:6, AR269:6, AR244:6, AR175:6, AR291:6, AR177:6, AR198:6, AR226:6, |
| | | | | AR268:6, AR055:6, AR258:5, AR060:5, AR204:5, AR298:5, AR186:5, AR253:5, AR234:5, |
| | | | | AR293:5, AR290:5, AR267:4, AR256:4, AR237:4, AR227:4, AR061:4, AR233:4, AR259:3, |
| | | | | AR179:3 S0114:1, S0354:1, S0046:1, H0392:1, T0010:1, H0038:1, H0616:1, H0494:1, |
| | | | | H0561:1, L0790:1, H0539:1, L0602:1, S0332:1, L0740:1, L0749:1, L0779:1, L0731:1 |
| | | | | and S0424:1. |
| 167 | HKGBF25 | 738797 | 177 | AR313:16, AR039:12, AR300:10, AR299:9, AR096:9, AR218:8, AR277:8, AR089:6, |
| | | | | AR185:5, AR316:5, AR219:5, AR104:4, AR282:3, AR240:3, AR055:3, AR060:2 H0538:1 |
| 168 | HKMLM95 | 840367 | 178 | AR283:49, AR218:46, AR039:42, AR219:42, AR055:36, AR316:19, AR313:19, AR240:16, |
| | | | | AR096:16, AR299:14, AR060:13, AR089:13, AR185:12, AR300:12, AR282:11, AR104:10, |
| | | | | AR277:8 S0474:13, L0748:7, H0734:6, L0740:6, L0754:6, L0439:5, L0747:5, S0003:4, |
| | | | | L0770:4, L0662:4, L0805:4, S0134:3, H0638:3, H0735:3, S0222:3, L0764:3, L0783:3, |
| | | | | L0731:3, L0758:3, S0358:2, H0050:2, L0471:2, S0364:2, H0591:2, H0264:2, L0763:2, |
| | | | | L0794:2, L0766:2, L0657:2, L0517:2, L5622:2, H0723:2, H0521:2, L0756:2, L0757:2, |
| | | | | L0485:2, L0604:2, L0595:2, H0739:1, T0002:1, H0222:1, S0040:1, S0114:1, H0583:1, |
| | | | | S0282:1, S0418:1, S0420:1, L0534:1, L0539:1, S0356:1, S0444:1, S0360:1, H0730:1, |
| | | | | H0733:1, S0007:1, S0045:1, S0046:1, S0132:1, L0717:1, H0431:1, H0461:1, H0586:1, |
| | | | | H0559:1, L0622:1, L0623:1, H0013:1, H0250:1, H0575:1, H0706:1, H0036:1, T0071:1, |
| | | | | H0581:1, H0421:1, H0596:1, L0040:1, H0057:1, S0051:1, H0083:1, H0060:1, H0039:1, |
| | | | | H0628:1, H0674:1, H0708:1, H0068:1, H0038:1, H0634:1, H0056:1, H0561:1, H0641:1, |
| | | | | S0472:1, S0144:1, S0422:1, H0743:1, H0529:1, L0769:1, L0639:1, L0380:1, L0803:1, |
| | | | | L0378:1, L0633:1, L0807:1, L0659:1, L0367:1, L0791:1, L0666:1, L0664:1, L0665:1, |
| | | | | S0428:1, H0593:1, H0689:1, H0711:1, H0682:1, H0658:1, H0539:1, S0378:1, S0406:1, |
| | | | | H0631:1, L0743:1, L0744:1, L0779:1, L0759:1, S0031:1, H0444:1, S0436:1, L0596:1, |
| | | | | L0590:1, L0608:1, L0593:1, L0361:1, L0601:1, S0106:1, H0668:1, S0026:1, H0665:1, |
| | | | | S0242:1, H0543:1, H0422:1 and H0506:1. |
| 169 | HLDBG17 | 855953 | 179 | AR313:205, AR096:153, AR240:136, AR282:133, AR219;128, AR218:116, AR299:111, |
| | | | | AR316:101, AR277:94, AR089:89, AR039:84, AR300:83, AR283:82, AR185:77, AR060:59, |
| | | | | AR104:50, AR055:37 L0581:185, H0509:97, H0510:36, H0014:25, H0355:18, H0393:14, |
| | | | | L0748:13, H0574:12, H0331:9, H0057:5, H0144:5, H0015:3, L0605:3, H0357:2, |
| | | | | H0427:2, L0663:2, L0749:2, L0756:2, H0662:1, H0351:1, H0349:1, H0047:1, H0038:1, |
| | | | | L0521:1, L0518:1, L0809:1, L0787:1, L0438:1, L0439:1, L0747:1, L0759:1 and |
| | | | | S0412:1. |
| 170 | HLDQU79 | 740755 | 180 | AR253:8, AR171:7, AR245:6, AR243:5, AR183:5, AR263:5, AR264:4, AR250:4, AR269:4, |
| | | | | AR060:4, AR180:4, AR270:4, AR309:4, AR162:4, AR268:4, AR161:4, AR165:4, AR192:4, |
| | | | | AR176:4, AR164:4, AR055:4, AR163:4, AR213:4, AR195:4, AR271:4, AR166:3, AR275:3, |
| | | | | AR240:3, AR282:3, AR312:3, AR246:3, AR178:3, AR181:3, AR311:3, AR168:3, AR289:3, |
| | | | | AR182:3, AR193:3, AR217:3, AR179:3, AR212:3, AR237:3, AR238:3, AR299:3, AR199:3, |
| | | | | AR252:3, AR229:3, AR242:2, AR185:2, AR300:2, AR277:2, AR175:2, AR293:2, AR257:2, |
| | | | | AR308:2, AR177:2, AR198:2, AR061:2, AR214:2, AR174:2, AR104:2, AR231:2, AR316:2, |
| | | | | AR201:2, AR233:2, AR230:2, AR224:2, AR236:2, AR239:2, AR228:2, AR188:2, AR223:2, |
| | | | | AR189:2, AR247:2, AR294:2, AR226:2, AR266:2, AR221:2, AR285:2, AR191:2, AR089:2, |
| | | | | AR216:2, AR200:2, AR207:2, AR272:2, AR232:2, AR190:2, AR290:2, AR283:2, AR096:2, |
| | | | | AR222:2, AR296:2, AR039:2, AR267:2, AR205:2, AR211:1, AR196:1, AR173:1, AR033:1, |
| | | | | AR218:1, AR295:1, AR255:1, AR262:1, AR215:1, AR227:1, AR254:1, AR234:1, AR313:1, |
| | | | | AR203:1, AR256:1, AR169:1, AR225:1, AR210:1, AR170:1 L0748:9, L0731:7, L0771:6, |
| | | | | L0759:6, H0013:5, L0764:4, L0747:4, L0758:4, H0265:3, H0039:3, H0038:3, L0769:3, |
| | | | | L0766:3, L0775:3, H0144:3, L0755:3, S0444:2, S0476:2, H0318:2, H0050:2, L0471:2, |
| | | | | H0266:2, L0374:2, L0649:2, L0805:2, L0663:2, L0664:2, H0547:2, S0126:2, H0670:2, |
| | | | | L0740:2, L0754:2, L0750:2, L0593:2, H0667:2, H0170:1, H0171:1, H0685:1, H0662:1, |
| | | | | S0354:1, S0360:1, H0580:1, H0728:1, H0151:1, H0747:1, L3388:1, H0357:1, H0586:1, |
| | | | | H0331:1, H0574:1, H0635:1, H0575:1, H0263:1, H0596:1, H0545:1, H0012:1, H0620:1, |
| | | | | H0350:1, H0355:1, H0510:1, H0428:1, H0604:1, H0031:1, H0553:1, S0366:1, H0040:1, |
| | | | | H0063:1, H0059:1, H0560:1, H0561:1, S0440:1, S0422:1, H0529:1, L0640:1, L0637:1, |
| | | | | L0761:1, L0772:1, L0646:1, L4556:1, L0774:1, L0375:1, L0653:1, L0382:1, L5622:1, |
| | | | | L0793:1, L4501:1, H0723:1, L0352:1, S0152:1, S0350:1, H0521:1, H0696:1, S0044:1, |
| | | | | H0627:1, S0027:1, L0749:1, L0752:1, H0595:1, S0436:1, L0591:1, L0595:1, L0361:1, |
| | | | | S0011:1, S0194:1, S0276:1 and H0423:1. |
| 171 | HLDRT09 | 830544 | 181 | AR283:10, AR277:8, AR104:8, AR282:7, AR185:7, AR039:7, AR313:6, AR089:6, |
| | | | | AR316:6, AR060:5, AR299:5, AR300:5, AR096:5, AR055:5, AR240:4, AR219:4, AR218:3 |
| | | | | L0493:15, L0511:11, L0500:7, L0508:6, L0514:6, L0510:6, L0504:4, L0794:4, |
| | | | | L0499:4, L0758:4, L0507:3, L0497:3, L0439:3, H0509:2, L0505:2, L0502:2, L0503:2, |
| | | | | L0501:2, L0509:2, L0779:2, H0265:1, H0717:1, H0656:1, S0116:1, H0483:1, S0360:1, |
| | | | | H0431:1, H0370:1, L0015:1, L0021:1, H0744:1, H0510:1, H0181:1, H0617:1, H0708:1, |
| | | | | H0040:1, H0633:1, L0769:1, L0639:1, L3905:1, L0667:1, L0521:1, L0662:1, L0768:1, |
| | | | | L0649:1, L0803:1, L0804:1, L0775:1, L0515:1, L0809:1, L5622:1, L0789:1, L0791:1, |
| | | | | L0666:1, H0144:1, H0682:1, H0659:1, H0660:1, H0672:1, H0696:1, L0748:1, L0750:1, |
| | | | | S0192:1 and L0697:1. |
| 172 | HLHBS54 | 837S03 | 182 | AR313:24, AR039:20, AR219:18, AR277:17, AR089:17, AR185:16, AR218:16, AR096:15, |
| | | | | AR299:14, AR240:12, AR104:11, AR316:10, AR300:10, AR282:9, AR060:9, AR055:8, |
| | | | | AR283:7 L0751:11, L0757:9, L0595:8, H0024:6, S0002:6, H0545:5, L0740:5, S0434:5, |
| | | | | H0620:4, H0135:4, S0426:4, L0776:4, L0659:4, L0747:4, L0750:4, S0436:4, H0333:3, |
| | | | | H0046:3, H0012:3, H0622:3, H0087:3, S0144:3, L0770:3, L0809:3, S0152:3, S0037:3, |
| | | | | L0754:3, L0752:3, S0001:2, S0360:2, S0007:2, H0549:2, S0222:2, H0587:2, H0632:2, |
| | | | | H0618:2, H0309:2, H0050:2, H0266:2, H0124:2, H0413:2, S0344:2, L0769:2, L3905:2, |
| | | | | L0772:2, L0648:2, L0662:2, L0517:2, L0666:2, L0664:2, H0689:2, H0521:2, H0522:2, |
| | | | | H0696:2, S0406:2, L0743:2, L0744:2, L0749:2, L0731:2, L0589:2, L0592:2, L0593:2, |
| | | | | H0149:1, H0717:1, S0116:1, H0484:1, H0255:1, H0661:1, H0662:1, S0410:1, H0729:1, |
| | | | | H0728:1, S0045:1, S0046:1, H0619:1, S0278:1, H0437:1, H0550:1, H0441:1, H0249:1, |
| | | | | L3653:1, H0427:1, H0253:1, H0052:1, H0251:1, H0597:1, H0544:1, H0546:1, L0041:1, |
| | | | | H0041:1, H0009:1, H0172:1, H0566:1, H0399:1, H0239:1, H0687:1, H0288:1, H0292:1, |
| | | | | T0023:1, H0424:1, H0213:1, H0617:1, H0673:1, H0169:1, H0376:1, H0623:1, S0210:1, |
| | | | | L0369:1, L0762:1, L0763:1, L5565:1, L0767:1, L0803:1, L0775:1, L0523:1, L0806:1, |
| | | | | L0655:1, L0518:1, L0783:1, L0519:1, L0790:1, L0663:1, S0148:1, S0310:1, L3811:1, |
| | | | | H0547:1, H0659:1, H0651:1, H0626:1, S3014:1, S0027:1, L0748:1, L0439:1, L0777:1, |
| | | | | L0755:1, L0758:1, L0759:1, L0603:1, H0668:1, S0196:1, S0424:1 and H0352:1. |
| 173 | HLHCS23 | 560663 | 183 | AR055:5, AR060:4, AR185:3, AR218:3, AR240:3, AR300:3, AR282:3, AR299:2, AR039:2, |
| | | | | AR283:2, AR089:2, AR219:2, AR316:2, AR104:2, AR096:1, AR277:1 H0024:1 |
| 174 | HLIBO72 | 883431 | 184 | AR313:63, AR241:58, AR039:49, AR192:37, AR218:35, AR183:34, AR229:32, AR096:31, |
| | | | | AR280:31, AR299:31, AR258:30, AR219:28, AR226:28, AR300:27, AR177:27, AR293:27, |
| | | | | AR198:27, AR240:26, AR312:26, AR238:26, AR185:25, AR275:24, AR089:24, AR175:24, |
| | | | | AR247:23, AR249:23, AR292:23, AR259:22, AR314:21, AR316:21, AR233:20, AR243:20, |
| | | | | AR053:20, AR179:19, AR052:18, AR231:18, AR315:18, AR237:18, AR294:18, AR104:17, |
| | | | | AR256:17, AR265:17, AR248:17, AR281:17, AR234:17, AR213:16, AR309:15, AR271:15, |
| | | | | AR277:15, AR251:15, AR282:14, AR033:14, AR295:13, AR204:13, AR186:13, AR244:13, |
| | | | | AR263:13, AR227:13, AR253:12, AR310:12, AR194:11, AR267:11, AR273:11, AR274:11, |
| | | | | AR060:11, AR269:10, AR270:10, AR268:9, AR232:8, AR184:7, AR246:7, AR206:7, |
| | | | | AR205:7, AR182:7, AR266:6, AR290:6, AR055:5, AR202:5, AR296:4, AR291:4, AR283:4, |
| | | | | AR289:3, AR061:3, AR285:3, AR284:3, AR298:3, AR286:3 L0764:2, L0662:2, L0748:2, |
| | | | | L0731:2, L0758:2, S0212:1, S0442:1, S0376:1, S0444:1, S0360:1, T0039:1, H0545:1, |
| | | | | H0355:1, S0214:1, H0553:1, L0055:1, H0090:1, H0551:1, H0412:1, H0413:1, H0494:1, |
| | | | | S0438:1, H0509:1, H0652:1, S0142:1, L0772:1, L0767:1, L0794:1, L0803:1, L0659:1, |
| | | | | L0383:1, L0545:1, L0664:1, H0682:1, H0670:1, S0380:1, H0521:1, H0522:1, H0436:1, |
| | | | | S3014:1, S0027:1, L0754:1, L0752:1, S0434:1, L0593:1, H0653:1, H0665:1 and |
| | | | | S0196:1. |
| 175 | HLICE88 | 840321 | 185 | AR185:21, AR240:19, AR104:13, AR039:13, AR060:13, AR089:13, AR300:12, AR282:11, |
| | | | | AR096:11, AR055:10, AR316:10, AR219:10, AR218:9, AR299:7, AR283:7, AR313:7, |
| | | | | AR277:4 H0014:72, L3388:60, H0509:49, L0581:44, H0355:43, H0574:32, H0393:30, |
| | | | | H0632:21, H0510:18, S0438:18, H0098:15, H0144:14, H0331:13, H0015:8, L0748:8, |
| | | | | H0722:7, L3387:7, H0741:5, H0013:5, H0147:4, T0078:4, L0615:3, H0357:3, S0440:3, |
| | | | | H0730:2, H0349:2, H0350:2, H0057:2, H0644:2, H0647:2, L0605:2, L0599:2, H0170:1, |
| | | | | L0448:1, H0149:1, L0393:1, S0444:1, L3645:1, H0749:1, L2255:1, H0351:1, H0642:1, |
| | | | | H0427:1, H0003:1, H0575:1, H0199:1, H0040:1, H0745:1, L0787:1, L0747:1 and |
| | | | | S0436:1. |
| 176 | HLICO10 | 658740 | 186 | AR096:23, AR313:20, AR299:19, AR219:19, AR089:17, AR240:17, AR218:16, AR316:15, |
| | | | | AR060:13, AR282:12, AR039:11, AR185:11, AR104:10, AR283:9, AR277:9, AR300:7, |
| | | | | AR055:7 L0766:9, L0758:8, L0747:7, L0749:7, L0771:6, L0776:6, L0439:6, L0748:5, |
| | | | | L0596:5, L0770:4, L0740:4, H0622:3, L0483:3, L0662:3, L0666:3, S0418:2, S0376:2, |
| | | | | S0360:2, S0408:2, H0747:2, H0251:2, L0646:2, L0764:2, L0768:2, L0774:2, L0806:2, |
| | | | | L0517:2, L0663:2, L0664:2, L0744:2, L0750:2, L0756:2, L0752:2, L0731:2, L0757:2, |
| | | | | L0759:2, H0265:1, L3643:1, L0002:1, L0785:1, S0001:1, H0661:1, H0662:1, S0420:1, |
| | | | | S0354:1, S0222:1, H0333:1, H0635:1, H0156:1, H0002:1, H0042:1, H0575:1, L0105:1, |
| | | | | H0374:1, H0052:1, H0085:1, L0471:1, T0010:1, H0355:1, H0060:1, T0006:1, H0111:1, |
| | | | | H0561:1, S0440:1, S0142:1, L0763:1, L0769:1, L4747:1, L0796:1, L5565:1, L0761:1, |
| | | | | L0372:1, L0377:1, L0381:1, L0375:1, L0655:1, L0657:1, L0793:1, L0532:1, L0665:1, |
| | | | | L0438:1, H0519:1, H0690:1, S0330:1, S0380:1, S0152:1, S0406:1, H0555:1, L0754:1, |
| | | | | L0745:1, L0755:1, H0444:1, S0434:1, S0436:1, L0599:1, L0362:1, L0601:1, H0543:1 |
| | | | | and L0600:1. |
| 177 | HLJBS28 | 658742 | 187 | AR313:15, AR316:9, AR096:9, AR218:7, AR299:7, AR039:7, AR300:7, AR089:5, |
| | | | | AR219:5, AR282:5, AR055:5, AR104:4, AR185:4, AR277:4, AR060:3, AR283:2 L0766:8, |
| | | | | L0803:3, H0659:3, L0758:3, L0598:2, L0649:2, L0805:2, L0655:2, L0731:2, L0759:2, |
| | | | | S0342:1, H0657:1, L3388:1, L0021:1, H0375:1, H0615:1, H0428:1, L0638:1, L0637:1, |
| | | | | L0651:1, L0659:1, L0791:1, H0648:1, S0328:1, H0752:1, L0744:1, L0747:1, L0756:1, |
| | | | | L0752:1, H0423:1 and H0422:1. |
| 178 | HLMJB64 | 658699 | 188 | H0521:11, L0751:9, L0777:9, H0255:8, L0747:8, S0360:7, L0766:7, H0542:7, |
| | | | | L0754:6, L0749:6, L0757:6, H0265:5, H0052:5, L0659:5, L0665:5, S0126:5, H0539:5, |
| | | | | L0748:5, L0439:5, L0740:5, L0758:5, L0759:5, H0624:4, H0717:4, H0046:4, H0024:4, |
| | | | | H0551:4, L0776:4, L0438:4, L0602:4, L0743:4, L0779:4, H0575:3, H0253:3, H0545:3, |
| | | | | H0266:3, H0284:3, H0039:3, H0068:3, H0509:3, L0770:3, L0769:3, L0662:3, L0774:3, |
| | | | | L0809:3, L0666:3, L0663:3, H0435:3, H0672:3, H0522:3, S0406:3, S0028:3, L0752:3, |
| | | | | L0731:3, H0543:3, H0171:2, H0556:2, H0716:2, S0212:2, H0638:2, S0376:2, H0586:2, |
| | | | | H0333:2, L0021:2, H0599:2, H0036:2, H0618:2, H0581:2, H0050:2, L0163:2, H0644:2, |
| | | | | H0040:2, H0087:2, S0038:2, H0494:2, S0144:2, S0002:2, L0369:2, L0763:2, L0637:2, |
| | | | | L0800:2, L0773:2, L0803:2, L0375:2, L0806:2, L0655:2, L0657:2, H0144:2, L0565:2, |
| | | | | H0689:2, H0660:2, H0436:2, L0750:2, S0436:2, L0596:2, L0589:2, L0485:2, L0604:2, |
| | | | | S0192:2, S0242:2, L0718:2, S0040:1, H0713:1, S0134:1, S0430:1, H0341:1, H0483:1, |
| | | | | H0671:1, S0418:1, S0420:1, L0005:1, S0442:1, S0354:1, S0358:1, H0637:1, S0045:1, |
| | | | | S0046:1, S0140:1, S0132:1, S0476:1, H0645:1, H0351:1, H0549:1, H0550:1, S0222:1, |
| | | | | H0441:1, H0370:1, L0468:1, H0592:1, H0587:1, H0497:1, H0559:1, L0622:1, T0114:1, |
| | | | | H0013:1, H0069:1, H0635:1, H0427:1, H0097:1, H0042:1, T0082:1, H0318:1, H0546:1, |
| | | | | H0123:1, L0471:1, H0620:1, H0014:1, H0051:1, H0201:1, S0051:1, H0510:1, H0286:1, |
| | | | | H0428:1, T0006:1, H0424:1, H0628:1, H0606:1, H0673:1, H0124:1, H0038:1, H0634:1, |
| | | | | H0063:1, H0379:1, H0272:1, H0488:1, H0412:1, H0413:1, S0382:1, S0438:1, S0142:1, |
| | | | | S0344:1, S0210:1, S0426:1, L0506:1, L0639:1, L0761:1, L0772:1, L0646:1, L0643:1, |
| | | | | L0644:1, L0771:1, L0648:1, L0521:1, L0794:1, L0649:1, L0775:1, L0651:1, L0378:1, |
| | | | | L0805:1, L0807:1, L0518:1, L0783:1, L0791:1, L0664:1, S0052:1, S0216:1, H0702:1, |
| | | | | H0701:1, S0374:1, H0520:1, H0682:1, H0683:1, H0658:1, H0670:1, H0666:1, S0328:1, |
| | | | | S0380:1, S0404:1, H0555:1, H0576:1, H0627:1, L0612:1, S3012:1, S0037:1, L0780:1, |
| | | | | S0031:1, H0444:1, H0445:1, S0434:1, L0588:1, L0593:1, S0011:1, S0026:1, H0667:1, |
| | | | | S0194:1, S0196:1, H0423:1, H0422:1, S0042:1 and H0506:1. |
| 179 | HLMMX62 | 688051 | 189 | AR060:7, AR055:7, AR313:7, AR299:7, AR089:7, AR218:6, AR185:6, AR240:6, AR039:5, |
| | | | | AR300:5, AR277:5, AR096:4, AR219:4, AR283:4, AR104:4, AR316:4, AR282:3 H0255:2, |
| | | | | S0410:2, H0052:1 and H0673:1. |
| 180 | HLQAS12 | 886180 | 190 | AR240:8, AR218:5, AR316:4, AR060:4, AR104:4, AR055:3, AR300:3, AR282:2, AR185:2, |
| | | | | AR039:2, AR283:2, AR299:2, AR089:1, AR277:1, AR313:1, AR096:1 H0521:109, |
| | | | | H0271:18, L0659:17, L0757:16, H0494:15, H0522:14, S0027:14, L0740:12, L0754:12, |
| | | | | L0747:12, H0556:11, H0638:9, S0045:8, H0250:8, H0599:8, S0126:8, H0265:7, |
| | | | | S0360:7, S0140:7, T0040:7, H0581:7, S0002:7, L0666:7, S0028:7, S0358:6, H0635:6, |
| | | | | H0545:6, H0056:6, L0663:6, H0539:6, L0731:6, S0132:5, H0190:5, H0052:5, H0266:5, |
| | | | | L0770:5, S3014:5, L0590:5, H0294:4, S0354:4, S0278:4, H0433:4, H0413:4, H0100:4, |
| | | | | L0764:4, L0662:4, L0776:4, L0758:4, H0222:3, H0295:3, S0212:3, H0427:3, H0575:3, |
| | | | | H0590:3, S0049:3, H0544:3, H0051:3, S0250:3, H0622:3, H0163:3, H0634:3, H0412:3, |
| | | | | H0641:3, S0142:3, S0344:3, S0426:3, L0769:3, L0771:3, L0794:3, L0804:3, L0655:3, |
| | | | | H0672:3, L0602:3, H0555:3, H0436:3, S0390:3, L0751:3, L0756:3, S0192:3, H0506:3, |
| | | | | L0600:3, H0341:2, S0418:2, S0420:2, S0376:2, S0468:2, H0208:2, S0046:2, H0392:2, |
| | | | | T0039:2, T0060:2, H0191:2, H0156:2, H0546:2, H0247:2, H0416:2, H0615:2, H0039:2, |
| | | | | L0483:2, H0628:2, H0032:2, H0211:2, H0124:2, H0087:2, H0623:2, S0144:2, L0598:2, |
| | | | | L0763:2, L0646:2, L0773:2, L0774:2, L0775:2, L0806:2, S0428:2, S0328:2, S0037:2, |
| | | | | S0032:2, L0741:2, L0743:2, L0752:2, L0591:2, L0608:2, L0601:2, L0603:2, S0194:2, |
| | | | | H0542:2, H0170:1, H0171:1, L3644:1, H0650:1, S0116:1, H0255:1, H0661:1, H0580:1, |
| | | | | H0411:1, S0220:1, H0331:1, H0486:1, L3655:1, H0069:1, H0075:1, L0021:1, H0002:1, |
| | | | | H0036:1, H0253:1, T0048:1, H0505:1, H0318:1, H0023:1, H0083:1, S6028:1, L0669:1, |
| | | | | S0314:1, H0417:1, H0316:1, H0598:1, H0135:1, H0063:1, H0551:1, H0379:1, H0268:1, |
| | | | | H0059:1, T0004:1, H0561:1, S0450:1, H0509:1, H0649:1, H0538:1, S0210:1, L0761:1, |
| | | | | L0667:1, L0372:1, L0648:1, L0363:1, L0768:1, L0381:1, L0388:1, L0522:1, L0784:1, |
| | | | | L0632:1, L0378:1, L0656:1, L0783:1, L0382:1, L0532:1, L0664:1, L0665:1, S0052:1, |
| | | | | L0565:1, H0547:1, H0519:1, H0689:1, H0682:1, H0670:1, H0518:1, S0044:1, H0576:1, |
| | | | | L0439:1, L0746:1, L0755:1, H0595:1, S0436:1, L0581:1, H0667:1 and H0352:1. |
| 181 | HLQCX36 | 584786 | 191 | AR313:27, AR226:23, AR039:23, AR251:21, AR089:17, AR238:15, AR241:14, AR096:14, |
| | | | | AR185:14, AR299:14, AR104:13, AR258:13, AR300:13, AR316:12, AR293:12, AR253:12, |
| | | | | AR240:12, AR198:11, AR060:11, AR219:11, AR248:11, AR249:10, AR218:10, AR237:10, |
| | | | | AR231:10, AR232:10, AR282:10, AR227:10, AR275:10, AR192:10, AR186:9, AR234:9, |
| | | | | AR229:8, AR271:8, AR312:8, AR277:8, AR204:8, AR274:7, AR292:7, AR243:7, AR294:7, |
| | | | | AR233:7, AR244:7, AR177:7, AR183:7, AR055:7, AR259:6, AR053:6, AR175:6, AR033:6, |
| | | | | AR052:6, AR269:6, AR273:5, AR202:5, AR247:5, AR206:5, AR061:5, AR309:5, AR267:5, |
| | | | | AR213:5, AR265:5, AR256:4, AR295:4, AR184:4, AR205:4, AR179:4, AR283:3, AR268:3, |
| | | | | AR182:3, AR246:3, AR270:3, AR310:3, AR296:2, AR298:2, AR281:2, AR290:2, AR286:2, |
| | | | | AR263:2, AR315:2, AR266:2, AR284:1, AR280:1, AR289:1, AR291:1, AR285:1 L0459:1 |
| | | | | and H0574:1. |
| 182 | HLWAF06 | 658701 | 192 | AR277:1 L0664:2, L0438:2, L0439:2, L0751:2, L0755:2, H0553:1, S0002:1, L0775:1 |
| | | | | and L0752:1. |
| 183 | HLWAV47 | 897769 | 193 | AR277:35, AR283:29, AR282:27, AR316:23, AR313:20, AR219:19, AR089:18, AR104:17, |
| | | | | AR240:17, AR299:16, AR055:16, AR218:16, AR300:16, AR185:15, AR096:15, AR039:11, |
| | | | | AR060:10 L0754:7, L0803:4, H0553:3, H0478:2, L0745:2, L0753:2, H0170:1, H0057:1, |
| | | | | L0163:1, S6028:1, L0598:1, L0666:1, L0663:1 and H0144:1. |
| 184 | HLWBB73 | 740757 | 194 | AR296:99, AR284:86, AR295:63, AR291:55, AR298:55, AR285:50, AR292:38, AR293:36, |
| | | | | AR266:30, AR286:29, AR294:21, AR289:20, AR256:18, AR259:17, AR258:16, AR104:11, |
| | | | | AR270:10, AR184:9, AR055:9, AR269:8, AR219:8, AR183:8, AR218:8, AR039:7, |
| | | | | AR182:7, AR316:7, AR283:7, AR290:7, AR268:6, AR096:6, AR267:6, AR299:6, AR238:6, |
| | | | | AR231:5, AR175:5, AR060:5, AR089:5, AR185:5, AR313:4, AR033:4, AR179:4, AR282:4, |
| | | | | AR237:3, AR177:3, AR280:3, AR247:3, AR277:3, AR300:3, AR232:3, AR226:3, AR234:2, |
| | | | | AR052:2, AR248:2, AR310:2, AR233:2, AR229:2, AR240:2, AR227:2, AR204:2, AR315:1, |
| | | | | AR263:1, AR241:1 L0749:16, L0439:14, L0748:12, L0759:7, L0483:6, L0803:6, |
| | | | | H0734:5, L0758:5, H0052:4, H0729:3, H0733:3, L0740:3, L0731:3, H0556:2, S0132:2, |
| | | | | H0455:2, H0546:2, S0003:2, S0366:2, H0561:2, L0766:2, L0804:2, L0774:2, L0606:2, |
| | | | | L0438:2, H0539:2, L0751:2, L0779:2, H0170:1, H0394:1, S6024:1, H0661:1, L3659:1, |
| | | | | H0638:1, L0005:1, S0356:1, S0442:1, S0358:1, S0360:1, H0730:1, H0741:1, H0728:1, |
| | | | | H0735:1, S0045:1, S6026:1, H0411:1, H0331:1, H0486:1, H0253:1, H0581:1, S0049:1, |
| | | | | S0388:1, S0051:1, T0010:1, H0687:1, H0328:1, H0553:1, L0055:1, H0032:1, H0400:1, |
| | | | | S0036:1, H0591:1, H0551:1, H0264:1, H0413:1, S0438:1, L0369:1, L0637:1, L0646:1, |
| | | | | L0521:1, L0806:1, L0655:1, L0809:1, L5623:1, L0663:1, L0665:1, H0691:1, L0352:1, |
| | | | | L3811:1, H0682:1, H0659:1, H0648:1, S0380:1, H0521:1, H0696:1, H0134:1, S0404:1, |
| | | | | L0756:1, L0777:1, L0752:1, S0031:1, S0260:1, L0480:1, L0485:1, L0608:1, L0595:1, |
| | | | | S0242:1, H0543:1 and S0424:1. |
| 185 | HLWCN37 | 827294 | 195 | AR240:79, AR104:58, AR316:13, AR055:12, AR185:9, AR096:8, AR282:7, AR299:7, |
| | | | | AR313:6, AR039:6, AR089:6, AR300:6, AR219:5, AR218:5, AR283:5, AR060:4, AR277:3 |
| | | | | L0766:11, L0439:7, L0758:7, H0556:5, H0644:5, H0650:4, H0553:4, H0616:4, |
| | | | | L3815:4, L0771:4, L0805:4, S0328:4, L0756:4, L0731:4, S0222:3, H0169:3, S0422:3, |
| | | | | L0770:3, L0508:3, L0776:3, L0438:3, S0330:3, L0748:3, L0747:3, L0599:3, H0494:2, |
| | | | | L0768:2, L0794:2, L0783:2, L0666:2, L0754:2, S0031:2, H0423:2, H0171:1, S6024:1, |
| | | | | S0114:1, S0110:1, S0001:1, S0400:1, H0661:1, S0360:1, S0410:1, H0728:1, H0549:1, |
| | | | | H0610:1, H0592:1, H0586:1, H0587:1, L3653:1, H0599:1, H0706:1, H0123:1, H0373:1, |
| | | | | H0375:1, S6028:1, H0031:1, L0143:1, H0264:1, S0372:1, S0448:1, H0647:1, L0506:1, |
| | | | | L0769:1, L0638:1, L0764:1, L0773:1, L0767:1, L0499:1, L0497:1, L0659:1, L0809:1, |
| | | | | L5623:1, L0665:1, H0701:1, H0703:1, S0454:1, H0696:1, S0146:1, H0555:1, L0742:1, |
| | | | | L0740:1, L0750:1, L0786:1 and L0777:1. |
| 186 | HLWDB73 | 838453 | 196 | L0777:13, L0803:9, L0748:9, L0731:6, H0423:5, L0794:4, L0766:4, L0740:4, |
| | | | | L0754:4, L0779:4, H0171:3, S0408:3, H0580:3, S0003:3, H0553:3, H0616:3, L0804:3, |
| | | | | H0519:3, L0439:3, L0751:3, S0026:3, H0422:3, H0170:2, H0717:2, S0356:2, H0486:2, |
| | | | | H0318:2, H0644:2, H0068:2, H0038:2, H0551:2, H0413:2, L0598:2, L0646:2, L0662:2, |
| | | | | L0388:2, L0784:2, L0805:2, L0776:2, L0790:2, H0547:2, H0710:2, H0521:2, L0745:2, |
| | | | | L0747:2, L0756:2, L0752:2, H0624:1, S0342:1, S0114:1, S0134:1, H0650:1, L808:1, |
| | | | | S0354:1, S0444:1, S0360:1, S0046:1, H0411:1, H0438:1, H0600:1, H0632:1, T0039:1, |
| | | | | H0013:1, H0427:1, H0581:1, H0421:1, H0544:1, H0046:1, H0457:1, H0150:1, H0563:1, |
| | | | | H0123:1, H0019:1, L0471:1, H0024:1, H0271:1, H0416:1, H0428:1, H0039:1, L0055:1, |
| | | | | H0361:1, H0598:1, H0090:1, H0591:1, H0268:1, H0623:1, H0560:1, S0440:1, H0647:1, |
| | | | | H0646:1, S0344:1, UNKWN:1, L0763:1, L0770:1, L0769:1, L0637:1, L0667:1, L0764:1, |
| | | | | L0767:1, L0768:1, L0649:1, L0775:1, L0375:1, L0806:1, L0807:1, L0659:1, L0783:1, |
| | | | | L0791:1, L0792:1, L0663:1, L0664:1, H0144:1, S0374:1, L0438:1, H0520:1, S0126:1, |
| | | | | H0658:1, H0648:1, S0330:1, S0152:1, H0696:1, S0406:1, H0576:1, S0028:1, L0749:1, |
| | | | | L0780:1, L0755:1, L0758:1, S0031:1, H0595:1, L0596:1, L0581:1, L0604:1, H0665:1 |
| | | | | and S0194:1. |
| 187 | HLYAR30 | 781249 | 197 | AR277:25, AR313:24, AR283:17, AR316:15, AR089:14, AR299:14, AR282:13, AR104:12, |
| | | | | AR096:11, AR219:11, AR218:10, AR039:10, AR185:10, AR240:10, AR300:10, AR055:9, |
| | | | | AR060:7 L0759:4, L0657:3, L0789:3, L0439:3, L0752:3, L0758:3, S0360:2, L0805:2, |
| | | | | L0438:2, L0750:2, L0777:2, H0423:2, H0171:1, H0638:1, H0351:1, H0178:1, H0606:1, |
| | | | | L0625:1, L0769:1, L0771:1, L0662:1, L0794:1, L0803:1, L0804:1, L0650:1, L0774:1, |
| | | | | L0659:1, L0809:1, L0663:1, H0436:1, L0748:1, L0740:1, H0445:1, L0604:1 and |
| | | | | H0422:1. |
| 188 | HLYDO73 | 584787 | 198 | H0445:1 |
| 189 | HLYEU59 | 582084 | 199 | H0445:3 and H0749:1. |
| 190 | HLYGB19 | 838083 | 200 | A240:33, AR096:27, AR313:22, AR055:15, AR282:15, AR316:13, AR060:10, AR089:9, |
| | | | | AR039:9, AR300:7, AR277:7, AR299:7, AR104:5, AR219:4, AR185:4, AR283:4, AR218:1 |
| | | | | L0752:10, L0471:9, L0731:8, H0422:8, H0040:5, L0641:5, L0662:4, L0439:4, |
| | | | | L0755:4, S0114:3, S0360:3, L0766:3, L0747:3, L0749:3, L0757:3, H0445:3, H0543:3, |
| | | | | H0265:2, H0556:2, S0116:2, H0013:2, H0244:2, H0135:2, H0264:2, L0769:2, L0639:2, |
| | | | | L0761:2, L0774:2, L0775:2, L0776:2, L0384:2, L0663:2, L0665:2, L0565:2, H0658:2, |
| | | | | H0539:2, L3832:2, L0744:2, L0748:2, L0750:2, L0779:2, L0758:2, L0759:2, S0134:1, |
| | | | | H0657:1, S0212:1, S0400:1, S0420:1, L3645:1, S0046:1, S0476:1, L0717:1, S0220:1, |
| | | | | L2491:1, H0599:1, H0706:1, L0563:1, H0545:1, H0150:1, H0009:1, H0024:1, T0010:1, |
| | | | | H0354:1, H0028:1, H0553:1, L0456:1, H0616:1, H0413:1, L0351:1, S0438:1, H0646:1, |
| | | | | L3818:1, S0208:1, L0796:1, L3904:1, L0667:1, L0644:1, L0764:1, L0768:1, L0649:1, |
| | | | | L0655:1, L0606:1, L0634:1, L0659:1, L0809:1, L0367:1, L0793:1, L0666:1, H0144:1, |
| | | | | L0438:1, L2670:1, H0689:1, H0666:1, H0672:1, S0378:1, H0436:1, L0756:1, L0599:1, |
| | | | | L0595:1, S0242:1, H0542:1, H0423:1 and L3796:1. |
| 191 | HLYGE16 | 651339 | 201 | AR055:2, AR185:2, AR316:1, AR060:1, AR283:1 H0255:5, H0144:3, H0429:2, L0662:2, |
| | | | | L0794:2, L0803:2, L0809:2, L0758:2, L0599:2, H0542:2, S0040:1, H0650:1, S0442:1, |
| | | | | H0642:1, L0157:1, H0571:1, H0673:1, H0494:1, L0771:1, L0766:1, L0776:1, L0629:1, |
| | | | | L0657:1, L0659:1, L0792:1, L0565:1, H0345:1, L0748:1, L0754:1, L0747:1, L0749:1, |
| | | | | H0445:1 and S0242:1. |
| 192 | HMCFH60 | 654853 | 202 | AR104:113, AR219:90, AR218:87, AR089:82, AR283:79, AR277:79, AR313:78, AR055:75, |
| | | | | AR240:71, AR316:70, AR185:63, AR282:60, AR299:59, AR096:54, AR039:50, AR060:48, |
| | | | | AR300:38 L0659:10, T0040:9, L0665:9, L0759:9, L0519:8, L0776:7, S0436:7, |
| | | | | L0744:6, L0747:6, L0749:6, L0758:6, S0418:5, H0052:5, H0457:5, H0150:5, L0769:5, |
| | | | | L0766:5, L0748:5, H0265:4, S0420:4, S0356:4, S0360:4, S0046:4, S0010:4, H0545:4, |
| | | | | H0687:4, H0494:4, S0440:4, L0662:4, L0768:4, L0774:4, L0775:4, L0751:4, L0754:4, |
| | | | | L0779:4, H0484:3, H0734:3, H0549:3, H0599:3, H0421:3, H0620:3, S0051:3, L0764:3, |
| | | | | L0666:3, H0435:3, H0648:3, H0539:3, L0596:3, H0543:3, H0624:2, H0171:2, H0556:2, |
| | | | | H0295:2, H0657:2, H0656:2, S0354:2, S0358:2, S0376:2, S0408:2, S0007:2, S0132:2, |
| | | | | S0476:2, S0222:2, H0486:2, T0039:2, H0635:2, H0156:2, H0618:2, T0048:2, H0581:2, |
| | | | | H0544:2, H0373:2, H0428:2, T0006:2, H0604:2, H0031:2, H0551:2, T0067:2, H0264:2, |
| | | | | H0647:2, S0344:2, L0638:2, L0372:2, L0641:2, L0806:2, L0653:2, L0527:2, L0809:2, |
| | | | | L0565:2, L0438:2, H0519:2, H0689:2, H0658:2, H0672:2, S0330:2, S0406:2, H0436:2, |
| | | | | S0027:2, L0750:2, S0434:2, L0605:2, S0194:2, H0506:2, H0685:1, H0713:1, H0717:1, |
| | | | | H0740:1, H0294:1, S0212:1, S0110:1, S0282:1, H0483:1, S0442:1, H0637:1, H0733:1, |
| | | | | S0468:1, H0747:1, L3388:1, H0351:1, H0550:1, H0587:1, H0642:1, H0559:1, L0622:1, |
| | | | | L3653:1, H0013:1, H0250:1, H0069:1, S0280:1, H0706:1, S0346:1, H0705:1, H0318:1, |
| | | | | S0049:1, H0748:1, L0040:1, H0597:1, L0738:1, H0009:1, H0563:1, H0123:1, H0050:1, |
| | | | | L0471:1, H0012:1, H0024:1, H0014:1, S0388:1, H0239:1, H0594:1, S6028:1, H0271:1, |
| | | | | H0292:1, H0213:1, H0628:1, H0673:1, H0068:1, S0036:1, H0135:1, H0090:1, H0038:1, |
| | | | | H0634:1, H0087:1, H0488:1, H0268:1, H0412:1, H0413:1, S0038:1, T0042:1, H0560:1, |
| | | | | H0641:1, S0210:1, S0422:1, S0002:1, H0529:1, L0770:1, L0637:1, L3905:1, L5566:1, |
| | | | | L0761:1, L0772:1, L0646:1, L0374:1, L0771:1, L4500:1, L0651:1, L0784:1, L0807:1, |
| | | | | L0657:1, L0658:1, L0656:1, L0782:1, L0783:1, L0530:1, L0647:1, L0788:1, L0663:1, |
| | | | | L0664:1, S0216:1, H0693:1, L3826:1, H0520:1, H0547:1, S0126:1, H0682:1, H0659:1, |
| | | | | S0328:1, S0380:1, H0710:1, H0521:1, H0522:1, H0627:1, S0028:1, L0741:1, L0742:1, |
| | | | | L0439:1, L0740:1, L0756:1, L0786:1, L0780:1, L0755:1, L0581:1, L0595:1, L0601:1, |
| | | | | H0667:1, S0192:1, H0542:1, L0718:1, and S0424:1. |
| 193 | HMDAB29 | 584789 | 203 | AR313:127, AR039:86, AR299:64, AR089:56, AR185:51, AR096:50, AR277:50, AR300:42, |
| | | | | AR316:37, AR240:33, AR218:27, AR219:25, AR104:22, AR060:22, AR282:20, AR055:16, |
| | | | | AR283:9 H0346:1, H0598:1 and S0330:1. |
| 194 | HMDAD44 | 566854 | 204 | AR277:44, AR283:35, AR219:28, AR316:26, AR089:24, AR218:23, AR313:22, AR282:22, |
| | | | | AR055:22, AR104:21, AR299:20, AR185:19, AR240:19, AR096:17, AR039:16, AR060:14, |
| | | | | AR300:14 L0749:3, H0346:1, H0370:1, H0427:1 and L0439:1. |
| 195 | HMEDE24 | 837027 | 205 | AR219:112, AR218:102, AR268:66, AR299:42, AR210:37, AR173:37, AR269:36, |
| | | | | AR270:33, AR039:33, AR290:29, AR275:28, AR300:28, AR096:28, AR188:27, AR183:26, |
| | | | | AR175:25, AR053:25, AR191:25, AR189:25, AR198:23, AR267:23, AR211:23, AR196:22, |
| | | | | AR192:22, AR162:22, AR174:22, AR163:21, AR161:21, AR180:21, AR313:21, AR274:20, |
| | | | | AR165:20, AR231:20, AR271:20, AR243:20, AR181:20, AR247:20, AR182:19, AR164:19, |
| | | | | AR089:19, AR166:19, AR178:19, AR199:18, AR200:18, AR282:18, AR238:18, AR213:18, |
| | | | | AR242:18, AR240:17, AR177:17, AR205:17, AR195:17, AR316:16, AR309:16, AR246:16, |
| | | | | AR203:16, AR190:16, AR212:15, AR176:15, AR197:15, AR308:15, AR312:15, AR234:15, |
| | | | | AR272:14, AR311:14, AR201:14, AR245:14, AR193:14, AR207:13, AR179:13, AR264:13, |
| | | | | AR296:13, AR185:13, AR226:13, AR239:13, AR263:13, AR291:13, AR254:12, AR233:12, |
| | | | | AR257:12, AR258:12, AR255:12, AR262:12, AR060:12, AR285:12, AR256:12, AR229:11, |
| | | | | AR232:11, AR261:11, AR230:11, AR293:11, AR266:11, AR237:11, AR236:11, AR104:10, |
| | | | | AR289:10, AR253:9, AR297:9, AR288:9, AR287:9, AR277:9, AR252:9, AR260:9, |
| | | | | AR250:9, AR061:8, AR204:8, AR294:8, AR295:8, AR283:8, AR228:8, AR227:8, AR033:7, |
| | | | | AR286:7, AR171:7, AR235:7, AR215:7, AR225:7, AR170:6, AR223:6, AR217:6, AR221:5, |
| | | | | AR055:5, AR216:5, AR169:5, AR214:4, AR172:4, AR168:4, AR222:4, AR224:4 H0266:1 |
| 196 | HMIAK10 | 562774 | 206 | AR055:7, AR218:7, AR060:6, AR219:6, AR185:4, AR283:4, AR240:4, AR300:4, AR104:3, |
| | | | | AR089:3, AR299:3, AR039:3, AR316:2, AR277:2, AR096:2, AR313:2, AR282:2 S6028:1 |
| 197 | HMICI80 | 827318 | 207 | AR104:21, AR316:11, AR055:6, AR060:6, AR282:5, AR218:5, AR299:4, AR185:4, |
| | | | | AR300:4, AR240:3, AR089:3, AR039:3, AR283:3, AR096:2, AR313:2, AR277:2, AR219:1 |
| | | | | L0439:17, H0569:3, L0438:3, L0415:2, H0156:2, S0049:2, H0052:2, S0388:2, |
| | | | | L0805:2, L0809:2, L0748:2, L0777:2, L0592:2, S0045:1, S0222:1, S0346:1, H0563:1, |
| | | | | S0051:1, S6028:1, S0036:1, L0789:1, L0756:1 and L0755:1. |
| 198 | HMICP65 | 847403 | 208 | AR313:25, AR039:24, AR277:13, AR104:13, AR300:11, AR096:11, AR299:10, AR185:10, |
| | | | | AR089:9, AR219:9, AR316:8, AR218:8, AR240:6, AR060:6, AR282:5, AR055:3, AR283:2 |
| | | | | S0474:12, H0156:5, H0650:3, L0666:3, H0341:2, H0393:2, H0486:2, H0052:2, |
| | | | | H0039:2, H0135:2, S0330:2, L0748:2, L0439:2, L0757:2, L0601:2, H0224:1, H0225:1, |
| | | | | S0134:1, H0583:1, H0657:1, S0212:1, S0282:1, H0735:1, S0046:1, H0550:1, H0431:1, |
| | | | | L3653:1, H0013:1, H0042:1, H0590:1, S0010:1, H0318:1, H0046:1, H0009:1, H0050:1, |
| | | | | H0242:1, S0388:1, S6028:1, H0271:1, H0031:1, H0644:1, L0455:1, L0370:1, T0042:1, |
| | | | | H0560:1, H0538:1, L3904:1, L0804:1, L0805:1, L0653:1, L0776:1, L0659:1, L0787:1, |
| | | | | L2264:1, H0547:1, H0648:1, H0539:1, L0745:1, S0436:1 and S0242:1. |
| 199 | HMJAK70 | 610099 | 209 | AR251:4, AR052:3, AR263:3, AR269:3, AR265:2, AR282:2, AR253:2, AR309:2, AR238:2, |
| | | | | AR271:2, AR186:2, AR247:2, AR270:2, AR266:1, AR277:1, AR312:1, AR053:1, AR295:1, |
| | | | | AR241:1, AR237:1, AR310:1, AR213:1, AR182:1, AR175:1, AR313:1, AR268:1, AR226:1, |
| | | | | AR096:1 H0391:1 |
| 200 | HMQAI38 | 589964 | 210 | AR277:1 L0794:3, H0634:2, H0220:1, S0476:1,H02S0:1 and H0635:1. |
| 201 | HMSBE04 | 709672 | 211 | AR055:6, AR060:5, AR240:4, AR185:4, AR299:4, AR300:3, AR283:3, AR089:2, AR316:2, |
| | | | | AR219:2, AR218:2, AR277:2, AR096:2, AR039:2, AR282:2, AR104:1, AR313:1 S0002:1 |
| 202 | HMSCL38 | 801919 | 212 | AR313:22, AR283:22, AR039:16, AR096:15, AR282:15, AR277:14, AR299:14, AR218:13, |
| | | | | AR089:13, AR300:12, AR185:11, AR316:9, AR219:9, AR240:8, AR060:7, AR055:6, |
| | | | | AR104:5 H0009:1 and S0002:1. |
| 203 | HMSHC86 | 840402 | 213 | S0002:4 and H0695:1. |
| 204 | HMSHU20 | 847410 | 214 | AR248:12, AR313:11, AR240:11, AR253:10, AR039:9, AR089:9, AR299:8, AR096:8, |
| | | | | AR249:8, AR310:7, AR251:7, AR312:7, AR060:7, AR316:7, AR274:6, AR183:6, AR265:6, |
| | | | | AR184:6, AR309:6, AR277:6, AR270:6, AR185:6, AR282:6, AR182:6, AR271:6, AR269:6, |
| | | | | AR219:6, AR273:6, AR300:5, AR229:5, AR284:5, AR055:5, AR104:5, AR290:5, AR241:5, |
| | | | | AR268:5, AR275:5, AR292:5, AR218:4, AR213:4, AR052:4, AR293:4, AR267:4, AR053:4, |
| | | | | AR061:4, AR291:4, AR033:4, AR186:4, AR286:4, AR285:4, AR238:4, AR289:4, AR247:4, |
| | | | | AR226:4, AR298:4, AR296:4, AR233:4, AR175:4, AR234:4, AR280:4, AR231:4, AR266:3, |
| | | | | AR177:3, AR258:3, AR205:3, AR243:3, AR315:3, AR295:3, AR237:3, AR192:3, AR246:3, |
| | | | | AR294:3, AR259:3, AR202:3, AR283:2, AR232:2, AR314:2, AR227:2, AR179:2, AR256:2, |
| | | | | AR206:1, AR263:1, AR281:1, AR194:1 S0278:4, L0740:4, H0250:2, H0581:2, S0344:2, |
| | | | | S0002:2, L0774:2, S0116:1, H0457:1, H0031:1, H0063:1, S0142:1, L0800:1, S0216:1, |
| | | | | H0521:1, L0744:1, L0777:1 and H0653:1. |
| 205 | HMSHY25 | 886183 | 215 | AR055:5, AR060:4, AR282:4, AR104:3, AR283:3, AR300:3, AR185:3, AR277:2, AR039:2, |
| | | | | AR316:2, AR096:2, AR089:2, AR299:2, AR218:2, AR219:2, AR240:1 S0002:1 and |
| | | | | S0426:1. |
| 206 | HMTAB77 | 847411 | 216 | AR297:10, AR287:9, AR288:9, AR225:9, AR291:7, AR171:5, AR221:5, AR296:5, |
| | | | | AR285:5, AR255:5, AR193:4, AR178:4, AR294:4, AR168:4, AR169:4, AR217:4, AR295:4, |
| | | | | AR170:4, AR235:4, AR224:4, AR223:4, AR216:4, AR180:4, AR261:4, AR245:4, AR293:3, |
| | | | | AR222:3, AR308:3, AR262:3, AR243:3, AR289:3, AR257:3, AR195:3, AR270:3, AR253:3, |
| | | | | AR162:3, AR163:3, AR205:3, AR286:3, AR161:3, AR173:3, AR290:3, AR184:3, AR254:3, |
| | | | | AR165:3, AR192:3, AR236:3, AR172:3, AR164:3, AR179:2, AR269:2, AR181:2, AR183:2, |
| | | | | AR166:2, AR267:2, AR260:2, AR190:2, AR312:2, AR201:2, AR175:2, AR258:2, AR039:2, |
| | | | | AR212:2, AR247:2, AR096:2, AR174:2, AR282:2, AR292:2, AR191:2, AR268:2, AR189:2, |
| | | | | AR266:2, AR313:2, AR316:1, AR089:1, AR213:1, AR264:1, AR277:1, AR219:1, AR060:1, |
| | | | | AR299:1, AR263:1, AR188:1, AR182:1, AR200:1, AR300:1, AR196:1, AR226:1, AR240:1, |
| | | | | AR210:1, AR177:1, AR234:1 H0436:65, L0747:25, H0521:12, L0754:11, L0471:7, |
| | | | | L0439:7, S0358:6, S0360:5, L0809:5, H0520:5, L0731:5, L0757:5, L0599:5, H0580:4, |
| | | | | H0581:4, S0003:4, H0551:4, S0440:4, L0803:4, L0775:4, L0517:4, H0547:4, H0519:4, |
| | | | | H0539:4, L0750:4, S0436:4, H0624:3, H0717:3, L3001:3, L2491:3, H0575:3, S0474:3, |
| | | | | H0373:3, H0428:3, H0090:3, H0616:3, H0529:3, L2654:3, H0144:3, H0518:3, L0744:3, |
| | | | | L0752:3, L0758:3, S0192:3, H0171:2, H0716:2, S0001:2, H0669:2, S0418:2, S0420:2, |
| | | | | L0562:2, S0356:2, S0442:2, S0354:2, S0444:2, H0393:2, S0222:2, H0592:2, H0586:2, |
| | | | | H0333:2, L3816:2, T0040:2, H0156:2, S0049:2, H0052:2, H0046:2, H0457:2, H0687:2, |
| | | | | L0455:2, H0040:2, H0412:2, H0560:2, S0208:2, S0422:2, L0520:2, L0770:2, L0769:2, |
| | | | | L3905:2, L0764:2, L0648:2, L0662:2, L0794:2, L0805:2, L0518:2, L0783:2, L0789:2, |
| | | | | L2264:2, L2675:2, L3829:2, H0658:2, S0152:2, S0406:2, H0555:2, L0748:2, L0740:2, |
| | | | | L0759:2, H0445:2, S0434:2, L0362:2, S0026:2, S0194:2, H0542:2, H0543:2, S0424:2, |
| | | | | H0352:2, H0149:1, S0040:1, H0583:1, L0453:1, L3814:1, L2910:1, H0341:1, S0212:1, |
| | | | | H0671:1, H0663:1, L2289:1, L3659:1, H0638:1, L0005:1, H0735:1, S0045:1, H0749:1, |
| | | | | H0619:1, H0411:1, H0175:1, H0369:1, H0431:1, H0392:1, H0455:1, H0612:1, H0587:1, |
| | | | | H0331:1, L0622:1, H0486:1, H0635:1, H0599:1, H0098:1, S0010:1, H0318:1, H0310:1, |
| | | | | H0263:1, T0110:1, H0545:1, N0006:1, H0123:1, H0050:1, H0011:1, H0620:1, L0163:1, |
| | | | | T0010:1, H0083:1, H0375:1, S6028:1, H0028:1, S0250:1, S0214:1, H0328:1, H0039:1, |
| | | | | H0031:1, H0553:1, H0124:1, H0598:1, S0036:1, H0038:1, H0063:1, T0067:1, H0264:1, |
| | | | | H0413:1, H0623:1, S0038:1, H0100:1, L0564:1, T0042:1, H0494:1, H0625:1, H0561:1, |
| | | | | S0150:1, L0598:1, L0763:1, L0761:1, L0667:1, L0641:1, L0650:1, L0375:1, L0523:1, |
| | | | | L0654:1, L0776:1, L0807:1, L0647:1, L0792:1, L0793:1, L0666:1, L0664:1, L0665:1, |
| | | | | L2657:1, L2260:1, H0699:1, L2439:1, S0374:1, L0438:1, L3827:1, L3210:1, H0689:1, |
| | | | | H0435:1, H0659:1, H0670:1, H0660:1, L0602:1, L3832:1, H0627:1, S0037:1, S0027:1, |
| | | | | L3327:1, L0743:1, L0749:1, L0779:1, L2138:1, H0595:1, L0605:1, L0485:1, L0604:1, |
| | | | | L0593:1, L0594:1, S0196:1, S0412:1, L3566:1 and L3378:1. |
| 207 | HMUAE26 | 747403 | 217 | AR277:29, AR283:26, AR282:19, AR316:17, AR240:16, AR219:15, AR313:14, AR300:14, |
| | | | | AR089:14, AR096:13, AR218:13, AR104:13, AR299:13, AR185:11, AR055:11, AR039:10, |
| | | | | AR060:9 S0406:5, H0305:3, S0422:3, L0743:3, H0617:2, L0770:2, L0794:2, L0384:2, |
| | | | | L0666:2, L0777:2, L0591:2, L0595:2, H0556:1, H0717:1, S0418:1, S0358:1, S0410:1, |
| | | | | H0734:1, S0045:1, H0497:1, H0493:1, H0618:1, H0318:1, H0581:1, H0012:1, H0620:1, |
| | | | | H0014:1, T0010:1, H0292:1, S0250:1, H0615:1, H0428:1, H0087:1, H0551:1, L0351:1, |
| | | | | H0560:1, H0132:1, H0529:1, L5565:1, L3905:1, L0761:1, L0644:1, L0375:1, L0524:1, |
| | | | | L0653:1, L0655:1, L0656:1, L0809:1, L0791:1, H0520:1, H0547:1, H0690:1, H0682:1, |
| | | | | H0670:1, H0672:1, S0404:1, H0555:1, L0749:1, L0779:1, L0780:1, L0731:1, H0445:1, |
| | | | | H0653:1, S0192:1 and H0542:1. |
| 208 | HMVDU15 | 801969 | 218 | AR316:19, AR277:18, AR218:16, AR283:16, AR313:16, AR219:16, AR089:14, AR096:13, |
| | | | | AR282:13, AR185:12, AR299:12, AR055:11, AR039:11, AR104:11, AR300:11, AR240:10, |
| | | | | AR060:9 H0436:20, L0748:6, L0750:6, S0408:3, H0100:3, L0755:3, H0657:2, L0804:2, |
| | | | | L0666:2, S0380:2, L0752:2, L0759:2, H0713:1, S0212:1, L3659:1, H0742:1, S0046:1, |
| | | | | S0222:1, H0746:1, H0545:1, H0009:1, H0024:1, T0023:1, H0032:1, T0067:1, S0422:1, |
| | | | | L0763:1, L0638:1, L0772:1, L0764:1, L0765:1, L0771:1, L0794:1, L0803:1, L0774:1, |
| | | | | L0655:1, L0382:1, L3811:1, H0689:1, H0435:1, S0330:1, H0696:1, L0740:1, L0747:1, |
| | | | | L0731:1, L0758:1, S0436:1 and L0608:1. |
| 209 | HMWCG28 | 847413 | 219 | L0439:19, L0740:16, L0748:15, L0766:12, H0052:7, L0761:7, L0741:7, L0747:7, |
| | | | | H0135:6, L0769:6, L0438:6, S0036:4, L0770:4, L0806:4, L0752:4, L0731:4, H0327:3, |
| | | | | H0012:3, T0010:3, L0794:3, L0803:3, L0783:3, L0809:3, L0744:3, L0758:3, L0601:3, |
| | | | | H0341:2, H0550:2, H0333:2, L0622:2, H0599:2, H0618:2, H0318:2, H0051:2, S0388:2, |
| | | | | S0051:2, H0100:2, L0772:2, L0774:2, L0664:2, S0380:2, L0751:2, L0745:2, L0779:2, |
| | | | | L0777:2, L0753:2, L0485:2, H0265:1, H0381:1, H0483:1, S0418:1, S0354:1, S0444:1, |
| | | | | S0360:1, S0046:1, S0278:1, H0261:1, H0455:1, H0438:1, H0574:1, H0559:1, L0623:1, |
| | | | | H0706:1, T0048:1, H0581:1, H0251:1, H0597:1, H0544:1, H0046:1, H0457:1, H0009:1, |
| | | | | H0081:1, H0620:1, H0200:1, H0095:1, H0275:1, H0083:1, H0354:1, H0266:1, H0328:1, |
| | | | | H0428:1, H0070:1, T0023:1, H0673:1, H0124:1, H0038:1, H0087:1, L0351:1, L0564:1, |
| | | | | H0560:1, H0130:1, S0344:1, L0369:1, L0763:1, L0637:1, L5575:1, L5565:1, L3905:1, |
| | | | | L0667:1, L0641:1, L0645:1, L0764:1, L0775:1, L0376:1, L0776:1, L0606:1, L0659:1, |
| | | | | L0789:1, L0666:1, L0663:1, L0665:1, H0693:1, H0547:1, H0660:1, H0539:1, S0044:1, |
| | | | | H0436:1, L0742:1, L0749:1, L0755:1, L0759:1, S0031:1, S0260:1, H0445:1, H0707:1, |
| | | | | S0434:1, L0581:1, L0593:1, S0194:1, H0543:1,H0423:1 and H0506:1. |
| 210 | HNECL22 | 799541 | 220 | AR218:10, AR219:10, AR185:10, AR277:9, AR283:8, AR282:8, AR039:8, AR089:8, |
| | | | | AR316:7, AR055:7, AR096:7, AR104:7, AR240:7, AR299:6, AR313:6, AR060:5, AR300:5 |
| | | | | L0748:54, L0766:20, L0754:18, H0179:12, L0777:12, L0750:11, L0749:10, S0116:9, |
| | | | | H0271:9, L0761:9, H0031:8, L0794:8, H0144:8, L0744:8, H0457:7, S0356:6, H0393:6, |
| | | | | H0013:6, L0438:6, L0743:6, L0751:6, L0745:6, L0779:6, L0758:6, H0421:5, L0805:5, |
| | | | | H0436:5, H0305:4, H0599:4, H0050:4, L0769:4, L0646:4, L0771:4, L0803:4, L0776:4, |
| | | | | L0809:4, S0428:4, L0603:4, H0662:3, S0358:3, S0045:3, H0747:3, H0549:3, H0497:3, |
| | | | | S0474:3, H0674:3, H0591:3, H0625:3, S0422:3, L0800:3, L07733, L0792:3, L0666:3, |
| | | | | S0052:3, S0028:3, L0759:3, H0542:3, H0556:2, H0341:2, H0402:2, S0354:2, S0376:2, |
| | | | | S0046:2, H0559:2, H0575:2, H0590:2, H0581:2, H0024:2, H0266:2, H0553:2, H0032:2, |
| | | | | H0673:2, H0087:2, H0264:2, H0100:2, H0494:2, H0529:2, L0774:2, L0493:2, L0659:2, |
| | | | | L0790:2, L0664:2, H0518:2, S0044:2, L0747:2, L0780:2, L0752:2, L0605:2, L0599:2, |
| | | | | L0593:2, H0721:2, H0171:1, L3642:1, L3644:1, S0114:1, H0583:1, L0785:1, H0419:1, |
| | | | | H0255:1, H0589:1, H0638:1, H0125:1, S0418:1, S0444:1, H0151:1, S0476:1, H0619:1, |
| | | | | S6026:1, H0261:1, H0431:1, H0392:1, H0069:1, H0075:1, H0635:1, T0070:1, H0156:1, |
| | | | | H0618:1, S0010:1, H0318:1, H0310:1, H0052:1, H0251:1, T0110:1, H0046:1, H0439:1, |
| | | | | H0086:1, H0081:1, H0057:1, H0051:1, H0375:1, H0109:1, H0416:1, S0318:1, S0314:1, |
| | | | | H0030:1, H0111:1, L0455:1, H0040:1, H0056:1, H0623:1, T0041:1, T0042:1, S0210:1, |
| | | | | S0002:1, S0426:1, L0598:1, L0641:1, L0764:1, L0768:1, L0807:1, L0514:1, L0658:1, |
| | | | | L0783:1, L5623:1, L0788:1, L0663:1, L0665:1, S0374:1, H0519:1, S0122:1, H0659:1, |
| | | | | H0658:1, H0666:1, H0672:1, S0328:1, H0521:1, H0522:1, S0406:1, H0555:1, H0478:1, |
| | | | | H0727:1, L0742:1, L0755:1, L0731:1, S0011:1, S0026:1, H0543:1, H0423:1, H0422:1 |
| | | | | and H0506:1. |
| 211 | HNECW49 | 639117 | 221 | AR055:8, AR060:7, AR240:6, AR185:5, AR300:5, AR218:5, AR104:5, AR283:5, AR089:4, |
| | | | | AR299:4, AR282:4, AR316:3, AR039:3, AR313:3, AR096:3, AR277:2, AR219:2 H0179:2 |
| | | | | and H0402:1. |
| 212 | HNEDH88 | 815675 | 222 | AR055:2, AR185:2, AR313:2, AR299:2, AR060:2, AR277:2, AR104:2, AR039:1, AR089:1, |
| | | | | AR218:1, AR096:1, AR316:1, AR283:1, AR300:1 L0748:2 and H0179:1. |
| 213 | HNFAC50 | 815676 | 223 | AR055:8, AR277:6, AR060:5, AR282:5, AR299:5, AR283:5, AR039:5, AR240:5, AR104:4, |
| | | | | AR300:4, AR218:4, AR089:4, AR185:4, AR096:3, AR316:3, AR313:2, AR219:1 L0769:5, |
| | | | | L0756:4, S0444:3, L0774:3, H0624:2, S0408:2, H0587:2, L0764:2, L0766:2, H0170:1, |
| | | | | H0497:1, H0333:1, H0156:1, L0022:1, H0271:1, S0344:1, L0637:1, L0772:1, L0773:1, |
| | | | | L0662:1, L0775:1, L0809:1, L0791:1, L0663:1, H0144:1, S0374:1, L3811:1, H0593:1, |
| | | | | H0660:1, H0648:1, H0672:1, H0696:1, L0749:1, L0750:1, L0779:1, L0752:1, L0755:1, |
| | | | | L0599:1, L0601:1 and H0667:1. |
| 214 | HNFCY57 | 877653 | 224 | H0271:3, H0575:2, H0416:2, H0518:2, L0748:2, S6022:1, L0021:1, H0024:1, H0179:1, |
| | | | | S0002:1, L0794:1, S0053:1 and S0216:1. |
| 215 | HNGAM58 | 688114 | 225 | AR313:88, AR039:72, AR299:41, AR185:40, AR300:34, AR089:34, AR277:32, AR096:31, |
| | | | | AR218:23, AR316:23, AR240:23, AR104:21, AR219:20, AR060:16, AR282:14, AR055:9, |
| | | | | AR283:6 S0052:1 |
| 216 | HNGBH53 | 532614 | 226 | AR055:10, AR060:7, AR283:5, AR240:5, AR300:4, AR185:4, AR299:4, AR104:4, |
| | | | | AR089:4, AR282:3, AR316:3, AR277:3, AR218:3, AR313:2, AR096:2, AR039:2, AR219:1 |
| | | | | S0052:1 |
| 217 | HNGDX18 | 1145071 | 227 | AR228:8, AR176:7, AR161:6, AR162:6, AR163:6, AR251:5, AR223:5, AR181:5, AR171:5, |
| | | | | AR225:4, AR060:4, AR267:4, AR055:4, AR216:4, AR261:4, AR235:4, AR236:4, AR268:4, |
| | | | | AR230:4, AR269:4, AR288:4, AR191:4, AR052:4, AR182:4, AR221:4, AR239:4, AR254:3, |
| | | | | AR242:3, AR255:3, AR312:3, AR233:3, AR287:3, AR272:3, AR262:3, AR165:3, AR271:3, |
| | | | | AR244:3, AR178:3, AR229:3, AR164:3, AR173:3, AR257:3, AR290:3, AR274:3, AR266:3, |
| | | | | AR061:3, AR297:3, AR166:3, AR282:3, AR198:3, AR053:3, AR231:3, AR199:3, AR291:3, |
| | | | | AR177:3, AR201:3, AR214:3, AR264:3, AR247:3, AR196:3, AR224:3, AR190:3, AR174:3, |
| | | | | AR270:3, AR296:2, AR286:2, AR300:2, AR309:2, AR203:2, AR089:2, AR200:2, AR294:2, |
| | | | | AR289:2, AR249:2, AR311:2, AR240:2, AR168:2, AR293:2, AR238:2, AR188:2, AR217:2, |
| | | | | AR175:2, AR285:2, AR179:2, AR234:2, AR310:2, AR185:2, AR033:2, AR298:2, AR260:2, |
| | | | | AR226:2, AR316:2, AR227:2, AR222:2, AR313:2, AR265:2, AR197:2, AR277:2, AR237:2, |
| | | | | AR189:2, AR295:2, AR299:2, AR193:2, AR283:2, AR172:2, AR183:2, AR275:2, AR232:2, |
| | | | | AR211:2, AR253:2, AR210:2, AR104:2, AR096:2, AR213:1, AR258:1, AR292:1, AR308:1, |
| | | | | AR273:1, AR194:1, AR180:1, AR184:1, AR284:1, AR252:1, AR205:1 H0457:4, S0052:4, |
| | | | | H0271:3, L0766:3, H0543:3, H0255:2, H0402:2, H0253:2, L0805:2, L0754:2, H0422:2, |
| | | | | H0583:1, H0650:1, H0656:1, H0484:1, H0483:1, H0254:1, L3659:1, S0442:1, S0360:1, |
| | | | | H0580:1, S0140:1, H0747:1, H0393:1, H0486:1, H0250:1, H0618:1, H0050:1, H0630:1, |
| | | | | H0719:1, H0182:1, H0063:1, H0087:1, H0264:1, H0488:1, H0487:1, L0351:1, T0042:1, |
| | | | | S0448:1, S0002:1, L0761:1, L0378:1, L0655:1, L4501:1, H0539:1, S0188:1, S0146:1, |
| | | | | H0707:1, L0599:1, H0136:1, H0423:1 and H0677:1. |
| 218 | HNGDY34 | 566863 | 228 | AR251:7, AR060:6, AR246:6, AR282:5, AR055:4, AR206:3, AR205:3, AR309:3, AR184:3, |
| | | | | AR052:3, AR089:3, AR312:3, AR053:3, AR267:3, AR243:2, AR277:2, AR186:2, AR104:2, |
| | | | | AR202:2, AR061:2, AR033:2, AR213:2, AR238:2, AR300:2, AR185:2, AR175:2, AR265:2, |
| | | | | AR283:2, AR294:2, AR269:2, AR295:2, AR316:2, AR198:2, AR244:2, AR183:2, AR274:2, |
| | | | | AR253:2, AR247:2, AR310:2, AR233:2, AR240:2, AR299:2, AR270:2, AR292:2, AR293:2, |
| | | | | AR231:2, AR241:2, AR227:2, AR291:2, AR275:1, AR268:1, AR289:1, AR096:1, AR296:1, |
| | | | | AR298:1, AR039:1, AR177:1, AR313:1, AR218:1, AR194:1, AR232:1, AR229:1, AR219:1, |
| | | | | AR237:1 S0052:1 |
| 219 | HNGEQ75 | 535723 | 229 | H0052:2, H0406:1, S0052:1 and L0439:1. |
| 220 | HNGFR54 | 695748 | 230 | S0052:2 |
| 221 | HNGGA68 | 638116 | 231 | AR055:6, AR060:6, AR218:6, AR300:4, AR185:4, AR240:4, AR299:3, AR104:3, AR219:3, |
| | | | | AR089:3, AR282:3, AR283:3, AR316:3, AR096:2, AR039:2, AR313:2, AR277:2 H0419:1, |
| | | | | H0305:1 and S0052:1. |
| 222 | HNGGP65 | 597449 | 232 | AR313:17, AR039:13, AR219:10, AR299:10, AR300:10, AR185:9, AR096:9, AR104:8, |
| | | | | AR089:8, AR218:8, AR060:8, AR055:7, AR277:7, AR282:7, AR316:6, AR240:6, AR283:4 |
| | | | | S0052:1 |
| 223 | HNGHK37 | 609889 | 233 | AR055:5, AR060:5, AR218:4, AR300:3, AR185:3, AR283:2, AR299:2, AR240:2, AR089:2, |
| | | | | AR282:2, AR104:2, AR316:2, AR096:1, AR313:1, AR277:1, AR039:1 S0052:1 |
| 224 | HNGHZ69 | 899289 | 234 | H0445:2 and S0052:1. |
| 225 | HNGIV64 | 561572 | 235 | AR185:8, AR039:8, AR060:8, AR313:7, AR055:7, AR096:6, AR300:6, AR089:6, AR240:6, |
| | | | | AR218:6, AR299:6, AR277:6, AR316:5, AR104:5, AR283:4, AR282:3, AR219:1 S0052:1 |
| 226 | HNGJB41 | 852178 | 236 | AR055:6, AR060:6, AR282:5, AR300:4, AR277:4, AR104:4, AR316:4, AR283:4, AR218:4, |
| | | | | AR185:3, AR299:3, AR219:3, AR089:3, AR313:3, AR240:3, AR096:2, AR039:2 S0052:1 |
| 227 | HNGKT41 | 836061 | 237 | AR316:11, AR055:6, AR060:6, AR277:5, AR300:5, AR282:5, AR104:4, AR240:4, |
| | | | | AR185:4, AR218:3, AR283:3, AR313:3, AR039:3, AR089:3, AR219:3, AR096:2, AR299:2 |
| | | | | S0428:1 |
| 228 | HNGNK44 | 834949 | 238 | AR055:5, AR060:5, AR104:4, AR218:3, AR283:3, AR300:2, AR089:2, AR096:2, AR039:2, |
| | | | | AR185:2, AR282:2, AR299:2, AR277:2, AR316:2, AR240:2, AR219:2, AR313:1 L0581:2 |
| | | | | and S0428:1. |
| 229 | HNGNO53 | 836063 | 239 | AR055:7, AR060:6, AR240:5, AR300:5, AR218:5, AR185:4, AR283:4, AR299:4, AR277:4, |
| | | | | AR089:4, AR104:3, AR316:3, AR096:3, AR219:2, AR313:2, AR039:2, AR282:1 S0428:2 |
| | | | | and L0439:1. |
| 230 | HNGPJ25 | 834942 | 240 | AR060:7, AR055:7, AR218:6, AR240:6, AR282:5, AR185:5, AR277:5, AR300:5, AR299:4, |
| | | | | AR283:3, AR089:3, AR104:3, AR316:3, AR096:3, AR039:2, AR313:2, AR219:2 H0251:8, |
| | | | | H0624:4, L0752:4, H0286:1, L0598:1, S0428:1 and H0144:1. |
| 231 | HNHEN82 | 836157 | 241 | AR055:5, AR060:4, AR300:4, AR104:3, AR282:2, AR283:2, AR219:2, AR089:2, AR039:2, |
| | | | | AR185:2, AR299:2, AR218:2, AR313:2, AR316:2, AR277:1, AR240:1 |
| 232 | HNHFE71 | 834487 | 242 | AR055:9, AR060:8, AR218:6, AR300:5, AR185:5, AR240:5, AR277:5, AR299:5, AR282:5, |
| | | | | AR104:5, AR283:4, AR089:4, AR039:4, AR316:4, AR096:3, AR313:3, AR219:2 S0053:1 |
| 233 | HNHGK22 | 597451 | 243 | AR060:7, AR055:6, AR240:5, AR218:4, AR185:4, AR299:4, AR300:4, AR089:4, AR104:4, |
| | | | | AR282:4, AR283:3, AR039:3, AR316:3, AR313:3, AR096:3, AR219:3 S0053:2 |
| 234 | HNHHB10 | 634589 | 244 | AR313:29, AR039:26, AR089:22, AR096:19, AR299:15, AR196:15, AR241:14, AR173:13, |
| | | | | AR300:12, AR180:12, AR161:12, AR162:12, AR178:12, AR163:11, AR185:11, AR165:11, |
| | | | | AR262:11, AR316:11, AR277:11, AR240:11, AR060:11, AR264:11, AR164:11, AR199:10, |
| | | | | AR191:10, AR242:10, AR166:10, AR181:10, AR104:10, AR258:9, AR174:9, AR257:9, |
| | | | | AR218:9, AR282:8, AR200:8, AR236:8, AR183:8, AR175:8, AR270:8, AR247:8, AR192:8, |
| | | | | AR179:7, AR219:7, AR189:7, AR312:7, AR182:7, AR203:7, AR297:7, AR229:7, AR176:7, |
| | | | | AR275:7, AR212:7, AR287:7, AR230:7, AR235:6, AR274:6, AR255:6, AR234:6, AR052:6, |
| | | | | AR188:6, AR213:6, AR260:6, AR177:6, AR193:6, AR293:6, AR269:6, AR261:6, AR233:6, |
| | | | | AR268:6, AR290:5, AR263:5, AR267:5, AR311:5, AR053:5, AR238:5, AR198:5, AR296:5, |
| | | | | AR226:5, AR308:5, AR294:5, AR055:5, AR309:5, AR288:5, AR239:5, AR285:5, AR272:5, |
| | | | | AR250:5, AR244:4, AR265:4, AR228:4, AR271:4, AR197:4, AR283:4, AR273:4, AR243:4, |
| | | | | AR190:4, AR286:4, AR033:4, AR171:4, AR207:4, AR254:4, AR291:4, AR195:4, AR211:4, |
| | | | | AR237:3, AR248:3, AR204:3, AR266:3, AR231:3, AR310:3, AR249:3, AR215:3, AR295:3, |
| | | | | AR225:3, AR186:3, AR210:3, AR202:3, AR201:3, AR168:3, AR227:3, AR256:3, AR253:3, |
| | | | | AR223:3, AR221:2, AR170:2, AR216:2, AR205:2, AR289:2, AR169:2, AR184:2, AR217:2, |
| | | | | AR214:2, AR232:2, AR246:2, AR206:2, AR251:1, AR222:1, AR245:1, AR298:1, AR252:1, |
| | | | | AR224:1, AR172:1, AR061:1 H0059:1 and S0053:1. |
| 235 | HNHKS19 | 778392 | 245 | L0789:2, H0616:1, S0216:1 and L0758:1. |
| 236 | HNTMH79 | 801921 | 246 | AR313:28, AR219:16, AR218:14, AR096:14, AR089:14, AR316:14, AR039:11, AR299:11, |
| | | | | AR277:11, AR283:10, AR240:9, AR300:9, AR185:8, AR055:8, AR282:8, AR060:5, |
| | | | | AR104:5 L0748:14, L0809:10, L0747:9, L0777:7, H0740:6, L0717:6, L0766:6, |
| | | | | L0794:5, L0745:5, S0360:4, H0457:4, S0422:4, L0771:4, L0749:4, L0759:4, H0395:3, |
| | | | | H0305:3, H0393:3, H0318:3, L0764:3, L0804:3, L0776:3, L0655:3, L0666:3, L0439:3, |
| | | | | L0750:3, L0758:3, S0116:2, H0402:2, H0586:2, S0474:2, S0438:2, S0440:2, H0529:2, |
| | | | | L0770:2, L0775:2, L0806:2, H0672:2, H0436:2, L0746:2, L0779:2, L0731:2, H0543:2, |
| | | | | L0615:1, H0556:1, H0685:1, S0218:1, H0749:1, S0222:1, H0592:1, H0497:1, H0013:1, |
| | | | | H0052:1, H0050:1, H0057:1, H0687:1, H0119:1, H0553:1, H0124:1, H0634:1, H0063:1, |
| | | | | H0560:1, H0561:1, L0769:1, L0638:1, L0637:1, L0761:1, L0646:1, L0800:1, L0662:1, |
| | | | | L0803:1, L0807:1, L0659:1, L0783:1, L5622:1, L0790:1, L0665:1, H0520:1, H0593:1, |
| | | | | H0689:1, H0659:1, S0380:1, H0521:1, H0576:1, L0744:1, L0755:1, H0445:1, L0589:1, |
| | | | | L0485:1 and H0423:1. |
| 237 | HODAG07 | 655356 | 247 | AR77:30, AR283:23, AR219:17, AR218:15, AR055:15, AR089:14, AR316:14, AR299:13, |
| | | | | AR104:13, AR039:12, AR313:12, AR282:12, AR240:11, AR300:11, AR060:10, AR096:10, |
| | | | | AR185:10 H0328:1, L0640:1, L0666:1 and L0748:1. |
| 238 | HODBB70 | 520196 | 248 | AR055:7, AR218:6, AR060:5, AR104:5, AR240:4, AR300:4, AR299:4, AR096:4, AR219:4, |
| | | | | AR283:4, AR039:3, AR185:3, AR089:3, AR316:3, AR282:3, AR277:2 H0328:1, L0789:1, |
| | | | | L0742:1 and L0439:1. |
| 239 | HODCZ32 | 836069 | 249 | AR313:62, AR039:45, AR299:33, AR277:30, AR089:28, AR185:27, AR096:27, AR300:22, |
| | | | | AR240:19, AR316:19, AR104:15, AR218:15, AR060:14, AR219:14, AR055:12, AR282:11, |
| | | | | AR283:6 H0328:1 |
| 240 | HOFAA78 | 836646 | 250 | AR316:60 |
| 241 | HOFMO16 | 596835 | 251 | AR281:9, AR263:7, AR265:7, AR277:7, AR183:6, AR283:6, AR204:6, AR251:6, AR243:5, |
| | | | | AR315:5, AR282:5, AR267:4, AR182:4, AR240:4, AR316:4, AR269:4, AR280:4, AR247:4, |
| | | | | AR310:4, AR299:4, AR234:4, AR300:4, AR238:4, AR060:4, AR096:4, AR266:4, AR268:4, |
| | | | | AR294:4, AR055:4, AR309:4, AR184:4, AR313:3, AR270:3, AR253:3, AR312:3, AR289:3, |
| | | | | AR275:3, AR033:3, AR104:3, AR292:3, AR229:3, AR226:3, AR206:3, AR053:3, AR231:3, |
| | | | | AR284:3, AR219:3, AR202:3, AR205:3, AR218:3, AR295:3, AR039:3, AR089:3, AR052:3, |
| | | | | AR232:3, AR061:3, AR296:3, AR185:3, AR186:3, AR227:3, AR286:3, AR285:3, AR291:3, |
| | | | | AR246:3, AR290:3, AR233:2, AR293:2, AR271:2, AR198:2, AR237:2, AR298:2, AR213:2, |
| | | | | AR175:2, AR177:2, AR256:2, AR273:2, AR258:2, AR241:1, AR314:1, AR259:1, AR248:1, |
| | | | | AR192:1 H0415:1 |
| 242 | HOFNU55 | 897611 | 252 | AR277:60, AR283:51, AR282:47, AR316:45, AR313:40, AR219:37, AR240:35, AR089:35, |
| | | | | AR218:32, AR104:32, AR096:31, AR299:31, AR055:31, AR185:30, AR300:26, AR039:23, |
| | | | | AR060:18 H0415:1 |
| 243 | HOGEF01 | 772573 | 253 | H0435:1 |
| 244 | HOHB066 | 853375 | 254 | L0766:6, L0747:5, S0408:4, L0748:4, L0663:3, L0758:3, H0556:2, H0637:2, H0486:2, |
| | | | | H0581:2, H0052:2, H0530:2, H0560:2, H0641:2, L0764:2, L0783:2, S0328:2, L0751:2, |
| | | | | L0592:2, H0543:2, H0422:2, H0650:1, H0656:1, H0663:1, H0638:1, S0418:1, S0420:1, |
| | | | | S0356:1, S0376:1, S0132:1, S6026:1, S0278:1, S0222:1, H0586:1, H0632:1, H0069:1, |
| | | | | H0427:1, T0082:1, H0457:1, H0083:1, H0510:1, H0188:1, L0138:1, S0250:1, H0644:1, |
| | | | | L0143:1, H0068:1, H0551:1, T0041:1, L0769:1, L0761:1, L0800:1, L0644:1, L0767:1, |
| | | | | L0768:1, L0655:1, L0659:1, L0368:1, H0144:1, H0702:1, H0547:1, H0519:1, H0711:1, |
| | | | | H0690:1, H0435:1, H0670:1, S3012:1, L0755:1, L0731:1, S0031:1, L0596:1, H0653:1 |
| | | | | and H0506:1. |
| 245 | HORBS82 | 638293 | 255 | H0706:2, L0809:2, S0360:1, L0623:1, H0122:1, H0041:1, H0095:1, H0292:1, H0424:1, |
| | | | | S0364:1, L0794:1, L0787:1, L0663:1, H0780:1, H0435:1, L0743:1, L0747:1 and |
| | | | | L0731:1. |
| 246 | HORBV76 | 839270 | 256 | AR313:8, AR218:8, AR060:7, AR055:7, AR219:6, AR240:6, AR185:6, AR282:5, AR299:5, |
| | | | | AR039:5, AR316:5, AR089:5, AR300:4, AR096:4, AR283:4, AR104:4, AR277:3 L0794:2, |
| | | | | L0608:2, H0686:1, S0278:1, H0292:1, H0031:1, L0065:1, S0344:1, L0638:1, L0662:1, |
| | | | | L0803:1, L0659:1, L0665:1, L0749:1 and L0780:1. |
| 247 | HOSEC25 | 688055 | 257 | AR313:58, AR039:44, AR089:31, AR299:31, AR300:31, AR096:29, AR277:29, AR185:26, |
| | | | | AR316:20, AR240:19, AR218:14, AR060:13, AR282:12, AR219:11, AR104:10, AR055:8, |
| | | | | AR283:4 S0214:1 and L0776:1. |
| 248 | HOSEI81 | 562778 | 258 | AR055:5, AR060:5, AR104:4, AR282:4, AR300:4, AR299:3, AR185:3, AR089:3, AR240:3, |
| | | | | AR039:3, AR283:2, AR218:2, AR096:2, AR316:2, AR219:2, AR313:2, AR277:2 L0777:2, |
| | | | | S0214:1 and H0539:1. |
| 249 | HOSEJ94 | 795132 | 259 | AR219:24, AR218:23, AR316:17, AR089:16, AR096:16, AR055:15, AR185:14, AR313:14, |
| | | | | AR299:14, AR283:13, AR039:13, AR060:12, AR240:11, AR300:10, AR282:8, AR104:8, |
| | | | | AR277:5 L0731:8, L0766:6, S0474:4, L0598:4, L0774:4, H0547:4, L0752:4, H0486:3, |
| | | | | S0003:3, L0775:3, L0745:3, L0362:3, H0170:2, H0657:2, H0733:2, H0038:2, S0440:2, |
| | | | | S0210:2, L0770:2, L0651:2, L0555:2, L0776:2, L0655:2, L0665:2, L0438:2, S0330:2, |
| | | | | H0539:2, L0439:2, L0758:2, L0594:2, S0412:2, H0394:1, S0040:1, L0002:1, H0650:1, |
| | | | | H0663:1, S0358:1, S0360:1, L3649:1, L2255:1, H0441:1, H0497:1, H0574:1, H0635:1, |
| | | | | H0156:1, H0575:1, H0036:1, H0251:1, L0163:1, H0083:1, H0594:1, S0214:1, H0328:1, |
| | | | | H0644:1, L0055:1, H0674:1, H0634:1, H0412:1, S0438:1, S0422:1, S0426:1, UNKWN:1, |
| | | | | H0529:1, L0520:1, L0625:1, L0637:1, L0627:1, L0772:1, L0646:1, L0764:1, L0773:1, |
| | | | | L0521:1, L0662:1, L0768:1, L0522:1, L0650:1, L0375:1, L0806:1, L0656:1, L0790:1, |
| | | | | L0666:1, L0663:1, L0664:1, S0374:1, H0659:1, H0672:1, H0710:1, H0696:1, S0027:1, |
| | | | | S0028:1, L0740:1, L0750:1, L0777:1, L0753:1, L0759:1, L0592:1, L0608:1, L0361:1, |
| | | | | S0192:1 and H0543:1. |
| 250 | HOUCA21 | 655359 | 260 | S0040:1, T0042:1 and S0292:1. |
| 251 | HOUDE92 | 580866 | 261 | H0052:17, L0745:11, L0748:10, H0547:7, L0439:7, L0755:6, L0771:5, L0774:5, |
| | | | | L0662:4, L0746:4, L0777:4, S0474:3, L0163:3, H0059:3, H0100:3, L0775:3, L0741:3, |
| | | | | H0261:2, H0333:2, H0194:2, H0545:2, H0012:2, H0617:2, H0135:2, L0770:2, L0665:2, |
| | | | | L0438:2, H0520:2, L0747:2, L0752:2, L0753:2, S0040:1, L0717:1, H0437:1, H0550:1, |
| | | | | S6016:1, H0497:1, H0574:1, H0599:1, H0575:1, H0618:1, H0253:1, H0041:1, H0620:1, |
| | | | | H0373:1, H0188:1, H0124:1, H0068:1, H0040:1, H0561:1, S0448:1, S0210:1, L0763:1, |
| | | | | L0644:1, L0767:1, L0768:1, L0375:1, L0651:1, L0659:1, L0540:1, L5622:1, H0144:1, |
| | | | | H0593:1, S0126:1, H0539:1, S0152:1, H0694:1, S0390:1, S0028:1, L0749:1, L0786:1, |
| | | | | L0780:1, L0731:1, L0757:1, L0758:1, S0436:1, L0592:1 and S0276:1. |
| 252 | HOUDR07 | 745404 | 262 | AR177:34, AR197:30, AR195:28, AR207:25, AR171:23, AR182:23, AR192:23, AR275:22, |
| | | | | AR199:22, AR169:21, AR170:21, AR226:21, AR183:20, AR189:19, AR168:18, AR263:18, |
| | | | | AR179:18, AR174:18, AR175:18, AR176:18, AR224:18, AR269:17, AR235:17, AR311:17, |
| | | | | AR270:16, AR231:16, AR214:16, AR222:16, AR181:16, AR225:16, AR229:16, AR190:15, |
| | | | | AR196:15, AR271:15, AR237:15, AR309:15, AR261:15, AR061:15, AR295:15, AR245:15, |
| | | | | AR210:14, AR201:14, AR230:14, AR173:14, AR221:13, AR191:13, AR283:13, AR161:13, |
| | | | | AR223:13, AR291:13, AR165:13, AR308:13, AR213:13, AR268:13, AR162:13, AR164:13, |
| | | | | AR266:13, AR166:13, AR240:13, AR163:13, AR198:13, AR277:13, AR217:12, AR264:12, |
| | | | | AR289:12, AR247:12, AR211:12, AR239:12, AR236:12, AR212:12, AR216:12, AR288:12, |
| | | | | AR172:12, AR286:12, AR205:11, AR178:11, AR218:11, AR228:11, AR215:11, AR312:11, |
| | | | | AR238:11, AR243:11, AR258:11, AR246:11, AR316:11, AR297:11, AR287:10, AR053:10, |
| | | | | AR285:10, AR227:10, AR204:10, AR193:10, AR282:10, AR180:10, AR242:9, AR089:9, |
| | | | | AR039:9, AR267:9, AR296:9, AR290:9, AR234:9, AR188:9, AR272:9, AR033:9, AR233:8, |
| | | | | AR299:8, AR293:8, AR300:8, AR255:8, AR262:8, AR254:8, AR256:7, AR200:7, AR203:7, |
| | | | | AR252:7, AR253:7, AR219:7, AR313:7, AR257:7, AR274:7, AR260:6, AR104:6, AR055:6, |
| | | | | AR250:6, AR096:6, AR294:6, AR060:6, AR185:6, AR232:6 S0212:10, L0659:10, |
| | | | | L0755:6, L0731:6, H0599:5, L0757:5, L0775:4, L0603:4, H0713:3, S0132:3, H0427:3, |
| | | | | S0312:3, H0622:3, H0553:3, H0628:3, L5565:3, L0439:3, L0740:3, S0040:2, H0717:2, |
| | | | | H0587:2, H0635:2, T0010:2, H0266:2, S0314:2, H0163:2, L0770:2, L3904:2, L0804:2, |
| | | | | L5622:2, L0751:2, L0747:2, L0750:2, H0668:2, S0194:2, H0716:1, S0116:1, H0661:1, |
| | | | | S0358:1, S0360:1, H0730:1, H0728:1, S0045:1, S0046:1, S0476:1, H0456:1, H0549:1, |
| | | | | H0431:1, H0370:1, H0592:1, H0632:1, L0623:1, H0486:1, L0021:1, H0706:1, H0590:1, |
| | | | | H0618:1, H0705:1, T0071:1, S0049:1, H0545:1, H0086:1, H0024:1, N0007:1, L3647:1, |
| | | | | H0510:1, H0594:1, H0124:1, H0551:1, S0352:1, S0438:1, H0509:1, H0647:1, L0769:1, |
| | | | | L0637:1, L0764:1, L0773:1, L0378:1, L0661:1, L4558:1, L0783:1, L0788:1, H0144:1, |
| | | | | H0519:1, H0555:1, S0390:1, S0028:1, L0753:1, L0758:1, S0434:1 and S0276:1. |
| 253 | HOUED72 | 858547 | 263 | AR313:145, AR096:124, AR219:123, AR282:123, AR240:96, AR218:92, AR316:89, |
| | | | | AR104:74, AR299:71, AR089:68, AR185:68, AR277:63, AR039:61, AR300:53, AR283:44, |
| | | | | AR060:43, AR055:41 S0040:1 |
| 254 | HOUFS04 | 771564 | 264 | AR218:41, AR219:38, AR096:23, AR185:23, AR277:22, AR299:22, AR282:20, AR055:18, |
| | | | | AR316:17, AR039:16, AR089:14, AR240:13, AR283:13, AR104:12, AR300:10, AR313:10, |
| | | | | AR060:10 L0745:15, S0414:6, H0351:5, H0013:5, S0422:5, L0803:5, H0144:4, |
| | | | | H0413:3, H0519:3, L0754:3, L0759:3, S0242:3, H0624:2, H0580:2, S0045:2, L3655:2, |
| | | | | H0421:2, H0375:2, H0428:2, H0553:2, L0598:2, L0775:2, L5622:2, L0666:2, L0664:2, |
| | | | | L0665:2, H0520:2, H0547:2, S0126:2, H0672:2, S0380:2, H0521:2, L0743:2, L0744:2, |
| | | | | L0605:2, H0171:1, H0556:1, H0685:1, S0040:1, S0114:1, H0657:1, S0212:1, S0444:1, |
| | | | | H0733:1, H0734:1, H0749:1, S0132:1, H0619:1, L3388:1, H0411:1, S0278:1, H0549:1, |
| | | | | S0222:1, L3816:1, H0486:1, S0280:1, H0575:1, L0105:1, H0581:1, H0052:1, H0545:1, |
| | | | | H0594:1, S6028:1, H0687:1, S0250:1, H0031:1, S0364:1, L0455:1, H0124:1, H0591:1, |
| | | | | H0038:1, S0450:1, L0763:1, L0638:1, L0637:1, L0662:1, L0794:1, L0649:1, L0654:1, |
| | | | | L0382:1, L0792:1, L3811:1, L3824:1, L3828:1, H0435:1, H0518:1, H0696:1, H0436:1, |
| | | | | S0432:1, S0390:1, S0037:1, S3014:1, S0028:1, S0124:1, L0751:1, L0756:1, L0779:1, |
| | | | | L0777:1, L0780:1, L0752:1, L0755:1, S0031:1, L05991, S01961, H04231, HO4221 and |
| | | | | H0721:1. |
| 255 | HOUHI25 | 888279 | 265 | AR219:18, AR218:16, AR055:8, AR104:6, AR096:5, AR316:5, AR039:5, AR300:5, |
| | | | | AR060:4, AR277:4, AR089:3, AR299:3, AR185:3, AR283:3, AR282:2, AR240:2, AR313:1 |
| | | | | S0436:7, H0551:6, L2985:5, H0599:5, L0805:5, L0756:5, L0758:5, L0759:5, L0754:4, |
| | | | | L0747:4, L3655:3, H0545:3, S0003:3, L0375:3, H0144:3, L0755:3, S0442:2, L3649:2, |
| | | | | S0045:2, L3816:2, H0013:2, L0471:2, H0373:2, H0051:2, H0560:2, S0422:2, L0768:2, |
| | | | | L0803:2, L0650:2, L0659:2, L0438:2, L0439:2, L0740:2, L0750:2, L0779:2, L0757:2, |
| | | | | S0242:2, H0739:1, H0624:1, S0040:1, S0342:1, S0116:1, S0212:1, S0444:1, H0747:1, |
| | | | | L3280:1, H0357:1, H0587:1, L0021:1, S0010:1, L0105:1, S0474:1, H0544:1, H0046:1, |
| | | | | S0051:1, H0266:1, H0622:1, H0032:1, H0388:1, H0598:1, H0413:1, S0438:1, H0641:1, |
| | | | | S0002:1, L0770:1, L3904:1, L0662:1, L0776:1, L0809:1, L0519:1, L5622:1, L5623:1, |
| | | | | L0663:1, L0664:1, L2260:1, L2381:1, L2673:1, L3827:1, H0520:1, S0126:1, L3832:1, |
| | | | | L0753:1, S0434:1, L0599:1, S0011:1, H0667:1, L3560:1 and L3585:1. |
| 256 | HOVBD85 | 827362 266 | AR218:13, AR219:12, AR096:5, AR313:2, AR316:2, AR055:1, AR060:1, AR282:1, | |
| | | | | AR240:1 H0252:1, H0428:1 and L0439:1. |
| 257 | HPCAB41 | 758003 | 267 AR104:4, AR055:4, AR277:3, AR218:3, AR282:2, AR039:2, AR299:2, AR185:2, AR283:2, | |
| | | | | AR089:2, AR060:2, AR316:2, AR219:2, AR313:1, AR300:1, AR096:1 L0754:4, L0471:1, |
| | | | | L0662:1, L0766:1, H0521:1, S0146:1, L07581 and H0422:1. |
| 258 | HPCAL26 | 762822 | 268 | L0659:11, S0126:11, L0731:11, S0192:11, L0666:9, L0777:7, T0049:5, S0358:5, |
| | | | | L0771:5, L0757:5, S0360:4, S0440:4, L0740:4, L0758:4, S0212:3, S0356:3, S0046:3, |
| | | | | H0369:3, H0545:3, L0662:3, L0774:3, L0809:3, H0519:3, L0752:3, S0011:3, H0295:2, |
| | | | | H0662:2, S0468:2, H0012:2, H0024:2, H0356:2, H0616:2, H0268:2, H0412:2, L0646:2, |
| | | | | L0803:2, S0013:2, L0754:2, L0747:2, L0759:2, S0040:1, S0418:1, S0442:1, S0376:1, |
| | | | | H0676:1, L0717:1, H0550:1, S0222:1, H0574:1, L0021:1, H0575:1, H0036:1, H0590:1, |
| | | | | H0618:1, T0048:1, H0309:1, H0596:1, T0110:1, H0546:1, H0046:1, H0123:1, H0014:1, |
| | | | | S0003:1, S0022:1, H0428:1, H0622:1, H0031:1, H0673:1, L0455:1, H0316:1, H0598:1, |
| | | | | H0163:1, H0038:1, H0433:1, H0413:1, T0069:1, S0438:1, H0633:1, H0647:1, S0210:1, |
| | | | | L0770:1, L0769:1, L0768:1, L0794:1, L0519:1, L0789:1, L0790:1, L0664:1, L0665:1, |
| | | | | H0144:1, S0330:1, S0136:1, H0696:1, S3014:1, S0206:1, L0751:1, L0749:1, L0756:1, |
| | | | | L0779:1, S0031:1, S0242:1, S0194:1 and S0276:1. |
| 259 | HPFBA54 | 635539 | 269 | H0169:1, H0130:1 and L0606:1. |
| 260 | HPFCI36 | 855966 | 270 | AR218:18, AR219:16, AR313:14, AR089:9, AR055:7, AR282:6, AR060:6, AR316:6, |
| | | | | AR185:6, AR299:5, AR240:5, AR039:5, AR300:4, AR104:4, AR283:4, AR096:4, AR277:2 |
| | | | | L0591:4, L0754:3, H0450:2, H0486:2, H0046:2, S0003:2, H0494:2, S0422:2, L0659:2, |
| | | | | S0126:2, H0659:2, L0750:2, L0601:2, H0170:1, H0556:1, H0657:1, S0420:1, S0354:1, |
| | | | | H0734:1, H0749:1, H0455:1, H0403:1, H0600:1, H0013:1, H0156:1, H0599:1, H0744:1, |
| | | | | H0082:1, S0214:1, H0622:1, H0031:1, H0673:1, H0169:1, H0090:1, H0038:1, H0022:1, |
| | | | | H0560:1, L0643:1, L0771:1, L0773:1, L0655:1, L0807:1, L3872:1, L0792:1, L0665:1, |
| | | | | L3811:1, S0378:1, H0518:1, S0152:1, H0521:1, L0748:1, L0749:1, L0757:1, L0759:1, |
| | | | | S0434:1, L0596:1, L0605:1 and H0653:1. |
| 261 | HPIAA80 | 829972 | 271 | AR218:13, AR219:11, AR282:9, AR089:8, AR055:8, AR240:7, AR104:6, AR060:6, |
| | | | | AR283:6, AR277:6, AR039:6, AR316:5, AR299:5, AR096:4, AR185:4, AR300:4, AR313:3 |
| | | | | L0750:3, H0672:2, L0744:2, H0587:1, L0021:1, S0010:1, H0024:1, H0266:1, S0364:1, |
| | | | | H0068:1, H0038:1, T0004:1, H0625:1, S0150:1, L0769:1, L0667:1, L0649:1, L0784:1, |
| | | | | L0526:1, L0790:1, L0792:1, L0793:1, L0663:1, H0696:1, L0747:1, L0608:1 and |
| | | | | S0276:1. |
| 262 | HPJBU43 | 862058 | 272 | AR283:11, AR055:10, AR060:9, AR039:7, AR299:6, AR277:6, AR300:6, AR104:5, |
| | | | | AR185:5, AR240:5, AR089:5, AR313:5, AR096:5, AR316:4, AR282:4, AR218:3, AR219:3 |
| | | | | S0152:1 and L0589:1. |
| 263 | HPMBX22 | 702012 | 273 | H0046:16, L0362:15, L0766:11, L0754:8, L0747:4, L0731:4, L0439:3, S0212:2, |
| | | | | H0013:2, H0251:2, L0471:2, S0003:2, H0674:2, S0422:2, L0769:2, L0663:2, L0665:2, |
| | | | | L0438:2, L0740:2, H0445:2, L0589:2, H0170:1, T0002:1, H0686:1, H0717:1, S0134:1, |
| | | | | H0657:1, H0459:1, S0442:1, S0360:1, S0410:1, L3649:1, H0729:1, S0468:1, H0431:1, |
| | | | | H0587:1, H0486:1, H0196:1, H0596:1, H0565:1, H0571:1, H0566:1, H0024:1, H0275:1, |
| | | | | S6028:1, H0615:1, H0031:1, H0644:1, H0591:1, H0634:1, S0440:1, L0640:1, L0770:1, |
| | | | | L0642:1, L0794:1, L0649:1, L0803:1, L0804:1, L0650:1, L0774:1, L0775:1, L0805:1, |
| | | | | L0661:1, L0783:1, L0809:1, L0666:1, L0664:1, H0520:1, H0547:1, H0519:1, H0684:1, |
| | | | | H0539:1, S0406:1, H0732:1, L0748:1, L0750:1, L0779:1, S0434:1, S0106:1, S0026:1, |
| | | | | H0423:1 and H0422:1. |
| 264 | HPMCJ84 | 562779 | 274 | AR282:2, AR277:1 H0031:1 |
| 265 | HPMCV30 | 612870 | 275 | L0526:11, L0622:8, H0670:8, H0087:7, S0360:5, H0594:5, H0188:5, H0412:5, |
| | | | | S0206:5, H0218:4, S0418:4, H0318:4, H0024:4, H0617:4, L0770:4, L0783:4, S0328:4, |
| | | | | S0027:4, H0265:3, H0663:3, T0048:3, H0597:3, H0123:3, H0673:3, S0366:3, H0135:3, |
| | | | | H0616:3, S0002:3, L0775:3, L0776:3, L0518:3, L0663:3, H0144:3, S0374:3, S0126:3, |
| | | | | S0380:3, S3014:3, H0352:3, H0624:2, H0556:2, H0219:2, S0114:2, H0657:2, H0341:2, |
| | | | | S0110:2, H0661:2, H0305:2, H0351:2, H0492:2, T0039:2, H0052:2, H0546:2, H0178:2, |
| | | | | H0083:2, H0688:2, H0068:2, H0038:2, H0040:2, H0509:2, S0142:2, S0426:2, L0769:2, |
| | | | | L0521:2, L0768:2, H0689:2, L0750:2, H0445:2, H0170:1, H0686:1, H0344:1, H0295:1, |
| | | | | H0294:1, S0134:1, S0218:1, H0650:1, L0760:1, S0116:1, S0001:1, H0483:1, H0255:1, |
| | | | | H0662:1, H0402:1, S0358:1, S0376:1, H0675:1, H0580:1, S0046:1, S0132:1, S0278:1, |
| | | | | H0549:1, H0441:1, H0370:1, H0455:1, H0333:1, H0643:1, L0623:1, T0060:1, H0250:1, |
| | | | | T0082:1, S0010:1, H0505:1, H0421:1, H0327:1, H0545:1, H0150:1, H0086:1, H0012:1, |
| | | | | H0099:1, H0109:1, H0290:1, T0023:1, H0031:1, H0181:1, H0606:1, H0166:1, H0674:1, |
| | | | | H0124:1, H0163:1, H0063:1, H0551:1, H0413:1, H0102:1, H0560:1, S0372:1, H0130:1, |
| | | | | S0144:1, S0344:1, S0422:1, L0598:1, L0507:1, L0639:1, L0648:1, L0662:1, L0767:1, |
| | | | | L0524:1, L0805:1, L0659:1, L0542:1, L0809:1, L0530:1, L0789:1, H0691:1, H0520:1, |
| | | | | H0519:1, H0682:1, H0684:1, H0659:1, H0658:1, H0648:1, H0672:1, S0378:1, S0152:1, |
| | | | | S0174:1, H0576:1, L0612:1, H0540:1, L0748:1, L0740:1, L0752:1, L0758:1, S0436:1, |
| | | | | L0485:1, L0599:1, L0608:1, L0595:1, L0362:1, L0366:1, S0106:1, H0543:1, S0446:1, |
| | | | | L0600:1 and H0008:1. |
| 266 | HPMFH77 | 702014 | 276 | AR089:24, AR282:22, AR060:6, AR277:5, AR055:5, AR104:4, AR240:4, AR316:4, |
| | | | | AR299:4, AR300:4, AR313:4, AR283:4, AR039:3, AR218:2, AR096:2, AR185:2 L0750:4, |
| | | | | L0809:3, L0747:3, L0803:2, L0776:2, L0740:2, L0754:2, S0045:1, S0010:1, H0581:1, |
| | | | | T0010:1, H0687:1, H0031:1, S0440:1, L0770:1, L0764:1, L0375:1, L0748:1 and |
| | | | | L0731:1. |
| 267 | HPQCB83 | 740761 | 277 | AR055:2, AR060:2, AR282:2, AR277:1, AR185:1, AR283:1, AR240:1 S0136:15 |
| 268 | HPRCA64 | 824074 | 278 | AR295:13, AR285:10, AR297:8, AR191:8, AR291:7, AR261:7, AR288:7, AR189:6, |
| | | | | AR296:6, AR188:6, AR178:6, AR271:6, AR170:5, AR181:5, AR165:5, AR175:5, AR174:5, |
| | | | | AR270:5, AR235:5, AR223:5, AR164:5, AR190:5, AR166:5, AR272:5, AR172:5, AR210:5, |
| | | | | AR255:5, AR236:5, AR274:5, AR196:5, AR217:5, AR287:5, AR246:4, AR096:4, AR089:4, |
| | | | | AR286:4, AR176:4, AR168:4, AR195:4, AR269:4, AR183:4, AR173:4, AR060:4, AR219:4, |
| | | | | AR222:4, AR214:3, AR199:3, AR268:3, AR033:3, AR218:3, AR257:3, AR104:3, AR161:3, |
| | | | | AR163:3, AR275:3, AR171:3, AR240:3, AR299:3, AR182:3, AR289:3, AR290:3, AR177:3, |
| | | | | AR316:3, AR207:3, AR245:3, AR180:3, AR162:3, AR300:3, AR216:3, AR262:3, AR293:3, |
| | | | | AR197:3, AR282:3, AR258:3, AR179:3, AR294:3, AR200:2, AR185:2, AR238:2, AR201:2, |
| | | | | AR203:2, AR225:2, AR267:2, AR193:2, AR232:2, AR260:2, AR266:2, AR231:2, AR211:2, |
| | | | | AR205:2, AR283:2, AR053:2, AR264:2, AR256:2, AR247:2, AR192:2, AR237:2, AR226:2, |
| | | | | AR243:2, AR204:1, AR277:1, AR239:1, AR229:1, AR169:1, AR313:1 L0005:7, L0662:7, |
| | | | | L0665:7, L0666:6, L0740:6, S0222:5, L0659:5, L0439:5, L0483:4, H0547:4, L0754:4, |
| | | | | L0756:4, L0779:4, S0194:4, S0049:3, L0646:3, L0521:3, L0663:3, L0664:3, L0438:3, |
| | | | | H0696:3, L0777:3, H0171:2, S0356:2, S0442:2, S0360:2, S0408:2, H0052:2, H0563:2, |
| | | | | L0471:2, S0388:2, S0051:2, S6028:2, H0266:2, H0623:2, S0440:2, L0598:2, L0520:2, |
| | | | | L0641:2, L0771:2, L0768:2, L0774:2, L0805:2, L0776:2, L0518:2, H0670:2, H0648:2, |
| | | | | H0672:2, S0028:2, L0751:2, L0731:2, L0758:2, S0031:2, L0596:2, S0026:2, S0196:2, |
| | | | | H0624:1, H0170:1, H0686:1, H0685:1, H0717:1, H0381:1, S0212:1, H0662:1, S0354:1, |
| | | | | S0376:1, S0045:1, S0046:1, H0411:1, H0369:1, H0602:1, T0040:1, H0013:1, H0427:1, |
| | | | | H0390:1, S0474:1, H0545:1, H0046:1, H0178:1, H0562:1, H0123:1, H0201:1, S0003:1, |
| | | | | H0428:1, T0006:1, H0031:1, H0553:1, H0032:1, H0163:1, H0551:1, L0564:1, S0370:1, |
| | | | | S0450:1, L0769:1, L0637:1, L5565:1, L0372:1, L0773:1, L0650:1, L0806:1, L0527:1, |
| | | | | L0526:1, L0783:1, L0809:1, S0374:1, L0565:1, H0519:1, H0682:1, H0435:1, H0659:1, |
| | | | | H0660:1, S0328:1, S0330:1, S0380:1, L0602:1, H0555:1, L0753:1, L0755:1, L0759:1, |
| | | | | S0260:1, S0434:1, S0436:1, L0595:1, H0667:1 and S0242:1. |
| 269 | HPRCM72 | 813512 | 279 | AR104:11, AR219:9, AR218:9, AR039:8, AR055:6, AR313:6, AR096:6, AR240:6, |
| | | | | AR060:6, AR316:5, AR300:4, AR185:4, AR089:4, AR299:4, AR282:3, AR277:3, AR283:3 |
| | | | | L0766:11, L0748:10, L0731:6, L0805:5, L0776:5, L0777:5, L0752:5, L0759:5, |
| | | | | L0659:4, L0666:4, L0665:4, L0754:4, L0749:4, L0757:4, S0358:3, H0580:3, H0519:3, |
| | | | | L0740:3, L0756:3, H0624:2, H0716:2, H0208:2, H0574:2, H0052:2, S0003:2, H03282, |
| | | | | L0649:2, L0663:2, L0439:2, L0745:2, L0747:2, S0436:2, L0605:2, L0362:2, H0170:1, |
| | | | | H0686:1, S0212:1, H0483:1, H0255:1, L3658:1, S0348:1, S0418:1, S0376:1, S0360:1, |
| | | | | L3646:1, L3649:1, S0007:1, H0619:1, S0222:1, H0586:1, H0486:1, H0250:1, S0010:1, |
| | | | | L0105:1, S0474:1, H0194:1, H0327:1, H0565:1, H0123:1, H0050:1, H0024:1, H0015:1, |
| | | | | S0051:1, S0318:1, S0316:1, S0214:1, H0553:1, H0030:1, H0032:1, H0068:1, H0163:1, |
| | | | | H0413:1, S0038:1, S0344:1, S0422:1, S0426:1, L0763:1, L0761:1, L0642:1, L0521:1, |
| | | | | L0662:1, L0768:1, L0794:1, L0803:1, L0774:1, L0775:1, L0376:1, L0806:1, L0657:1, |
| | | | | L0517:1, L0545:1, L0529:1, L0791:1, L0664:1, H0144:1, L0438:1, H0520:1, H0689:1, |
| | | | | H0684:1, H0435:1, H0660:1, H0672:1, H0539:1, H0521:1, L0750:1, L0779:1, L0755:1, |
| | | | | S0031:1, L0608:1, S0242:1, S0276:1, H0542:1, H0543:1, H0423:1 and H0506:1. |
| 270 | HPTRE80 | 884167 | 280 | AR277:53, AR283:38, AR219:37, AR316:30, AR282:30, AR218:28, AR089:28, AR299:27, |
| | | | | AR313:27, AR104:26, AR240:25, AR096:24, AR185:24, AR039:24, AR300:22, AR055:21, |
| | | | | AR060:19 L0769:5, L0759:4, H0402:3, S0376:3, H0424:3, L0806:3, L0749:3, S0222:2, |
| | | | | L0535:2, L0774:2, L0384:2, L0666:2, H0423:2, H0265:1, S0218:1, H0484:1, S0354:1, |
| | | | | S0444:1, S0360:1, S0007:1, H0392:1, H0559:1, H0486:1, T0039:1, T0060:1, L0021:1, |
| | | | | H0004:1, H0581:1, H0052:1, H0194:1, H0204:1, L0471:1, H0024:1, H0405:1, H0617:1, |
| | | | | H0606:1, H0090:1, H0272:1, H0494:1, S0438:1, S0422:1, S0002:1, L0763:1, L0770:1, |
| | | | | L0772:1, L0372:1, L0646:1, L0800:1, L0641:1, L0645:1, L0771:1, L0768:1, L0794:1, |
| | | | | L0381:1, L0775:1, L0789:1, H0547:1, H0519:1, H0659:1, H0658:1, H0672:1, H0521:1, |
| | | | | S0406:1, H0727:1, L0744:1, L0740:1, L0747:1, L0779:1, L0731:1, L0757:1, L0758:1, |
| | | | | H0445:1 and H0422:1. |
| 271 | HPTRI42 | 655362 | 281 | AR185:34, AR060:22, AR299:19, AR104:12, AR277:10, AR282:10, AR089:9, AR055:9, |
| | | | | AR316:8, AR219:8, AR218:8, AR096:8, AR283:7, AR300:7, AR240:7, AR039:5, AR313:5 |
| | | | | H0036:3, H0618:3, L3905:3, H0619:2, H0424:2, L0776:2, H0136:2, S0276:2, H0717:1, |
| | | | | H0716:1, H0742:1, S0045:1, H0261:1, H0497:1, H0250:1, H0575:1, H0310:1, H0052:1, |
| | | | | H0123:1, H0024:1, S0250:1, H0401:1, H0169:1, H0616:1, L0351:1, H0561:1, S0440:1, |
| | | | | S0150:1, H0647:1, H0646:1, H0652:1, L0768:1, L0766:1, L0803:1, L0659:1, L0809:1, |
| | | | | L0666:1, L0665:1, S0126:1, H0672:1, H0539:1, S0406:1, H0576:1, L0439:1, L0779:1, |
| | | | | L0777:1 and H0423:1. |
| 272 | HPTRM02 | 812879 | 282 | H0617:7, H0087:6, H0657:5, S0410:3, L0754:3, S0356:2, L0717:2, H0150:2, H0687:2, |
| | | | | H0424:2, H0551:2, L0769:2, L0774:2, L0743:2, L0758:2, L0592:2, H0556:1, T0002:1, |
| | | | | H0686:1, H0685:1, T0049:1, H0663:1, S0442:1, S0444:1, S0360:1, S0476:1, H0550:1, |
| | | | | H0486:1, H0250:1, L0021:1, T0048:1, S0474:1, S0049:1, H0052:1, H0309:1, H0597:1, |
| | | | | H0544:1, H0014:1, H0107:1, S6028:1, H0622:1, H0644:1, H0102:1, S0038:1, L0351:1, |
| | | | | S0450:1, S0344:1, S0002:1, L0764:1, L0766:1, L0805:1, L0776:1, L0655:1, L0661:1, |
| | | | | L0657:1, L0809:1, L0666:1, L0665:1, L2652:1, L2260:1, L2261:1, H0689:1, H0435:1, |
| | | | | H0521:1, H0696:1, H0555:1, L0744:1, L0439:1, L0749:1, L0777:1, L0755:1, L0759:1, |
| | | | | S0436:1, L0597:1, L0599:1, L0366:1 and S0196:1. |
| 273 | HPTRQ52 | 655363 | 283 | AR219:43, AR277:42, AR104:34, AR283:31, AR218:30, AR316:28, AR240:27, AR096:25, |
| | | | | AR089:24, AR185:23, AR039:23, AR313:21, AR055:21, AR282:20, AR299:20, AR060:19, |
| | | | | AR300:15 H0694:12, L0748:10, L0731:7, L0754:6, H0556:5, L0758:5, H0265:4, |
| | | | | S0420:4, S0408:4, L0517:4, H0657:3, H0618:3, H0052:3, H0083:3, H0553:3, H0494:3, |
| | | | | L0763:3, L0666:3, L0663:3, S0126:3, L0747:3, H0295:2, S0134:2, S0418:2, H0637:2, |
| | | | | S0046:2, H0431:2, H0545:2, H0014:2, H0271:2, H0039:2, H0424:2, H0124:2, H0641:2, |
| | | | | L0764:2, L0766:2, L0774:2, L0775:2, L0776:2, L0655:2, L0783:2, L0665:2, H0519:2, |
| | | | | H0522:2, S0044:2, L0755:2, S0436:2, L0595:2, L0362:2, H0543:2, S0040:1, H0740:1, |
| | | | | H0656:1, S0212:1, H0484:1, H0661:1, H0662:1, S0360:1, H0733:1, H0619:1, S0222:1, |
| | | | | H0486:1, H0156:1, H0575:1, H0706:1, H0253:1, S0010:1, S0346:1, H0318:1, H0596:1, |
| | | | | H0231:1, H0046:1, H0150:1, H0081:1, H0050:1, H0012:1, H0620:1, L0163:1, S0051:1, |
| | | | | T0010:1, S6028:1, H0266:1, H0179:1, H0292:1, H0031:1, H0644:1, H0182:1, H0617:1, |
| | | | | H0606:1, H0673:1, L0455:1, L0456:1, H0598:1, H0038:1, H0040:1, H0616:1, H0087:1, |
| | | | | T0067:1, H0264:1, T0041:1, H0131:1, H0647:1, S0002:1, L0772:1, L0642:1, L0662:1, |
| | | | | L0767:1, L0657:1, L0659:1, L0382:1, L5623:1, L0664:1, S0374:1, H0593:1, H0690:1, |
| | | | | H0682:1, H0659:1, H0658:1, H0666:1, H0651:1, H0539:1, H0521:1, S0406:1, H0576:1, |
| | | | | L0743:1, L0740:1, L0750:1, L0779:1 and H0445:1. |
| 274 | HPTVI96 | 636064 | 284 | L0809:5, L0779:5, L0758:5, L0769:4, L0764:4, L0777:4, H0634:3, L0748:3, L0750:3, |
| | | | | L0731:3, S0222:2, L0163:2, L0763:2, L0772:2, L0775:2, L0776:2, H0651:2, L0749:2, |
| | | | | L0759:2, H0657:1, S0376:1, S0300:1, L0622:1, H0427:1, H0009:1, L0471:1, T0006:1, |
| | | | | H0424:1, H0674:1, H0708:1, H0135:1, H0413:1, S0438:1, L0771:1, L0768:1, L0794:1, |
| | | | | L0766:1, L0774:1, L0375:1, L0806:1, L0789:1, H0648:1, H0521:1, S0406:1 and |
| | | | | H0506:1. |
| 275 | HPWBA29 | 561956 | 285 | AR313:19, AR039:14, AR218:11, AR277:11, AR089:11, AR299:10, AR096:10, AR185:10, |
| | | | | AR300:9, AR060:8, AR219:8, AR316:8, AR055:8, AR240:8, AR104:7, AR282:6, AR283:4 |
| | | | | S0044:1 |
| 276 | HPWDK06 | 839825 | 286 | H0717:11, L0743:11, L0748:10, L0731:6, L0754:5, H0427:4, H0716:3, H0575:3, |
| | | | | H0428:3, H0031:3, L3904:3, L0517:3, H0696:3, S0044:3, L0758:3, H0411:2, H0597:2, |
| | | | | H0620:2, H0024:2, H0687:2, H0135:2, L0770:2, L0662:2, L0775:2, L0518:2, L5622:2, |
| | | | | L0666:2, H0144:2, L0744:2, L0751:2, L0750:2, S0436:2, L0605:2, H0713:1, S0116:1, |
| | | | | S0212:1, H0669:1, H0662:1, S0418:1, S0360:1, H0728:1, S0045:1, H0619:1, L0717:1, |
| | | | | H0550:1, L0623:1, L2487:1, S0280:1, L0021:1, H0599:1, H0706:1, S0010:1, S0474:1, |
| | | | | S0049:1, H0309:1, H0085:1, H0231:1, H0545:1, H0050:1, L0471:1, H0057:1, L0163:1, |
| | | | | S0051:1, T0010:1, S0312:1, H0688:1, H0169:1, L0456:1, H0551:1, T0067:1, H0379:1, |
| | | | | H0059:1, T0069:1, S0038:1, H0652:1, S0344:1, H0743:1, L0520:1, L0371:1, L3905:1, |
| | | | | L0772:1, L0771:1, L0768:1, L0378:1, L0653:1, L0776:1, L0807:1, L0659:1, L0542:1, |
| | | | | L0647:1, L5623:1, L0664:1, L2654:1, H0593:1, S0126:1, H0690:1, H0684:1, H0658:1, |
| | | | | H0670:1, H0660:1, H0539:1, S0146:1, S0027:1, S0028:1, S0032:1, L0439:1, L0747:1, |
| | | | | L0777:1, L0604:1, L3592:1, H0506:1, L0462:1 and H0352:1. |
| 277 | HRAAD30 | 866187 | 287 | AR282:5, AR277:5, AR060:5, AR055:4, AR185:4, AR300:4, AR299:3, AR104:3, AR218:3, |
| | | | | AR283:3, AR316:3, AR089:3, AR039:2, AR096:2, AR313:2, AR240:1 L0731:6, L2800:4, |
| | | | | H0617:4, H0547:4, L0758:4, S0420:3, H0013:3, L0748:3, L0747:3, S0358:2, L3278:2, |
| | | | | L0770:2, S0126:2, L0439:2, L0751:2, L0777:2, L0757:2, H0543:2, S0040:1, L3012:1, |
| | | | | H0341:1, S0046:1, H0550:1, H0497:1, H0333:1, H0427:1, H0618:1, H0253:1, S0474:1, |
| | | | | H0052:1, H0546:1, H0571:1, L0471:1, H0024:1, H0051:1, S6028:1, H0286:1, H0622:1, |
| | | | | H0644:1, L0455:1, T0067:1, H0561:1, S0440:1, H0130:1, H0529:1, L0763:1, L0769:1, |
| | | | | L0772:1, L0372:1, L0662:1, L0806:1, L0807:1, L0659:1, L5622:1, L4501:1, L0666:1, |
| | | | | L0664:1, L0709:1, L2261:1, H0144:1, L2402:1, S0374:1, H0520:1, L3831:1, H0555:1, |
| | | | | S0027:1, L0740:1, L0750:1, L0752:1, L0759:1, S0436:1, L0592:1, L0604:1, H0542:1, |
| | | | | S0398:1, L3837:1 and H0677:1. |
| 278 | HRADA42 | 827302 | 288 | AR283:35, AR219:34, AR277:32, AR316:28, AR218:25, AR282:24, AR313:23, AR104:22, |
| | | | | AR089:22, AR096:20, AR185:19, AR299:19, AR055:17, AR300:16, AR240:16, AR039:15, |
| | | | | AR060:13 L0771:7, S0358:4, L0768:4, L0779:4, L0766:3, L0775:3, L0748:3, L0754:3, |
| | | | | L0763:2, L0769:2, L0764:2, L0649:2, L0774:2, L0809:2, L0747:2, H0657:1, S0116:1, |
| | | | | H0671:1, S0418:1, L0005:1, S0360:1, S0408:1, H0733:1, S0045:1, H0393:1, H0370:1, |
| | | | | H0333:1, H0150:1, T0003:1, H0266:1, S0003:1, L0055:1, H0038:1, H0040:1, H0100:1, |
| | | | | S0440:1, H0646:1, S0344:1, S0210:1, S0422:1, H0529:1, L0770:1, L0646:1, L0767:1, |
| | | | | L0381:1, L0378:1, L0776:1, L0655:1, L0659:1, L2264:1, S0126:1, H0659:1, H0670:1, |
| | | | | H0648:1, H0710:1, H0555:1, S0028:1, L0740:1, L0750:1, L0777:1, L0752:1, L0755:1, |
| | | | | L0731:1, L0758:1, L0759:1, S0434:1, S0436:1, L0596:1, L0588:1, L0605:1, L0590:1, |
| | | | | L0608:1 and H0543:1. |
| 279 | HRADF49 | 866481 | 289 | AR244:12, AR296:6, AR205:6, AR183:6, AR292:6, AR104:5, AR249:5, AR291:5, |
| | | | | AR285:5, AR298:5, AR206:5, AR289:4, AR240:4, AR293:4, AR275:4, AR270:4, AR295:4, |
| | | | | AR294:4, AR284:3, AR213:3, AR186:3, AR060:3, AR286:3, AR234:3, AR229:3, AR282:3, |
| | | | | AR267:3, AR184:3, AR096:3, AR283:3, AR033:3, AR251:3, AR300:2, AR313:2, AR316:2, |
| | | | | AR185:2, AR039:2, AR299:2, AR218:2, AR256:2, AR089:2, AR219:2, AR061:2, AR243:2, |
| | | | | AR055:2, AR269:2, AR277:2, AR233:2, AR238:2, AR182:2, AR268:2, AR175:2, AR259:2, |
| | | | | AR266:2, AR232:2, AR258:2, AR227:2, AR315:2, AR263:1, AR226:1, AR309:1, AR314:1, |
| | | | | AR053:1, AR290:1, AR052:1, AR231:1 H0618:9, L0751:7, L0754:6, L0758:6, H0253:5, |
| | | | | L0748:5, L0439:5, H0580:3, L3816:3, H0052:3, L0770:3, L0663:3, H0556:2, H0733:2, |
| | | | | H0351:2, H0706:2, H0567:2, H0625:2, S0142:2, L0639:2, L3905:2, L0659:2, L0543:2, |
| | | | | L5623:2, L0749:2, S0436:2, H0423:2, L3643:1, H0381:1, S0212:1, H0254:1, H0663:1, |
| | | | | H0638:1, S0418:1, H0741:1, H0735:1, S0045:1, S0046:1, S0476:1, S6022:1, H0549:1, |
| | | | | H0550:1, S0222:1, H0370:1, H0497:1, H0574:1, L0622:1, L0623:1, L3655:1, H0101:1, |
| | | | | H0427:1, S0280:1, H0122:1, H0194:1, H0596:1, H0570:1, H0081:1, H0620:1, H0014:1, |
| | | | | H0083:1, H0355:1, H0510:1, H0424:1, H0030:1, H0553:1, H0628:1, S0364:1, S0366:1, |
| | | | | H0038:1, H0551:1, H0100:1, |
| | | | | L0351:1, H0494:1, S0438:1, H0633:1, S0144:1, S0422:1, L0371:1, L0769:1, L3904:1, |
| | | | | L0772:1, L0648:1, L0497:1, L0375:1, L0511:1, L0666:1, L0709:1, L0710:1, H0144:1, |
| | | | | L3811:1, L3824:1, H0520:1, H0593:1, H0682:1, H0670:1, H0672:1, H0539:1, L3833:1, |
| | | | | S0044:1, H0626:1, H0732:1, S3012:1, S3014:1, S0027:1, S0028:1, L0779:1, L0584:1, |
| | | | | L0608:1, L0593:1, H0667:1 and H0542:1. |
| 280 | HRADN25 | 800628 | 290 | AR277:30, AR283:24, AR104:22, AR219:21, AR316:20, AR282:18, AR218:18, AR089:17, |
| | | | | AR313:17, AR096:17, AR240:16, AR299:14, AR185:14, AR300:13, AR060:12, AR039:12, |
| | | | | AR055:12 H0556:10, H0618:6, H0253:6, L0748:6, L0758:6, H0305:5, L0742:5, |
| | | | | H0038:4, L0439:4, L0592:3, H0013:2, H0194:2, H0545:2, H0009:2, H0014:2, H0617:2, |
| | | | | H0087:2, L0769:2, L0774:2, L0776:2, L0665:2, L0438:2, H0690:2, H0539:2, S0380:2, |
| | | | | L0747:2, L0779:2, H0265:1, H0657:1, S0420:1, S0376:1, H0734:1, S0278:1, H0455:1, |
| | | | | H0333:1, H0632:1, H0581:1, S0049:1, H0052:1, H0123:1, S0362:1, H0687:1, H0688:1, |
| | | | | H0606:1, H0673:1, H0135:1, H0090:1, H0591:1, H0040:1, H0616:1, S0438:1, S0142:1, |
| | | | | L0638:1, L4747:1, L0796:1, L5565:1, L0761:1, L0643:1, L0645:1, L0662:1, L0768:1, |
| | | | | L0794:1, L0775:1, L0375:1, L0378:1, L0655:1, L0382:1, L0793:1, L0666:1, L0663:1, |
| | | | | S0053:1, S0374:1, H0547:1, H0658:1, H0660:1, H0651:1, H0521:1, S0406:1, H0555:1, |
| | | | | H0436:1, S0390:1, S3014:1, S0027:1, L0743:1, L0777:1, L0731:1, H0707:1, S0436:1, |
| | | | | H0543:1 and H0422:1. |
| 281 | HRADT25 | 800737 | 291 | AR277:8, AR282:8, AR283:7, AR316:4, AR055:4, AR185:4, AR104:3, AR096:3, AR300:3, |
| | | | | AR299:3, AR240:3, AR089:3, AR039:3, AR060:3, AR313:2, AR219:2, AR218:2 H0555:2 |
| | | | | and S0356:1. |
| 282 | HRDAI17 | 560720 | 292 | H0031:2, L0758:2, H0013:1, H0124:1, L0369:1, L0792:1, S0216:1, L0745:1 and |
| | | | | L0753:1. |
| 283 | HRDDQ39 | 840405 | 293 | AR313:36, AR039:33, AR185:27, AR299:20, AR089:18, AR300:17, AR096:17, AR240:16, |
| | | | | AR218:15, AR277:14, AR316:13, AR060:11, AR219:10, AR104:9, AR055:8, AR282:7, |
| | | | | AR283:7 S0001:2, H0436:2, S0134:1, H0657:1, H0441:1, H0009:1, H0123:1, H0050:1, |
| | | | | H0428:1, H0124:1, H0529:1, H0521:1 and H0352:1. |
| 284 | HRDER22 | 688056 | 294 | AR283:14, AR104:12, AR296:12, AR289:11, AR298:11, AR060:11, AR089:10, AR291:10, |
| | | | | AR284:10, AR292:10, AR266:10, AR286:10, AR055:9, AR270:9, AR285:9, AR282:9, |
| | | | | AR247:9, AR294:8, AR033:8, AR293:8, AR243:8, AR277:8, AR263:8, AR238:8, AR183:8, |
| | | | | AR240:8, AR295:8, AR299:8, AR241:8, AR269:7, AR281:7, AR316:7, AR185:7, AR192:7, |
| | | | | AR182:7, AR194:7, AR218:7, AR177:7, AR290:7, AR184:7, AR061:7, AR186:7, AR267:7, |
| | | | | AR219:6, AR246:6, AR175:6, AR202:6, AR204:6, AR274:6, AR268:6, AR229:6, AR206:6, |
| | | | | AR096:6, AR251:6, AR234:6, AR256:6, AR232:6, AR300:6, AR198:5, AR313:5, AR039:5, |
| | | | | AR273:5, AR205:5, AR259:5, AR227:5, AR275:5, AR310:5, AR052:5, AR258:5, AR233:5, |
| | | | | AR226:5, AR312:4, AR237:4, AR271:4, AR248:4, AR309:4, AR253:4, AR053:4, AR244:4, |
| | | | | AR280:4, AR231:4, AR213:4, AR315:4, AR179:3, AR249:3, AR265:3, AR314:2 L0769:5, |
| | | | | L0751:5, L0770:4, L0758:3, H0716:2, H0617:2, L0771:2, L0803:2, L0806:2, L0809:2, |
| | | | | L0789:2, L0740:2, L0779:2, L0600:2, H0402:1, S0420:1, L0005:1, S0442:1, S0360:1, |
| | | | | H0637:1, H0728:1, H0261:1, S0222:1, H0370:1, H0392:1, H0438:1, H0592:1, H0586:1, |
| | | | | L0622:1, L0623:1, H0427:1, L0021:1, H0575:1, H0618:1, H0581:1, H0123:1, H0012:1, |
| | | | | H0039:1, H0424:1, S0364:1, H0124:1, H0087:1, H0412:1, L0800:1, L0648:1, L0662:1, |
| | | | | L0774:1, L0805:1, L0657:1, L0658:1, L0542:1, L5623:1, L0788:1, L0666:1, L0665:1, |
| | | | | L3825:1, H0547:1, H0521:1, S0406:1, H0576:1, L0742:1, L0777:1 and L0366:1. |
| 285 | HRDFK37 | 840381 | 295 | H0556:4, L0731:3, H0124:2, L0766:2, L0809:2, L0747:2, L0603:2, S0218:1, H0657:1, |
| | | | | S0116:1, H0549:1, H0550:1, H0250:1, H0253:1, H0052:1, H0083:1, H0355:1, L0483:1, |
| | | | | H0181:1, H0617:1, H0032:1, S0364:1, H0264:1, H0100:1, H0494:1, L0065:1, L0770:1, |
| | | | | L0769:1, L0772:1, L0764:1, L0662:1, L0768:1, L0387:1, L0657:1, L0658:1, L0541:1, |
| | | | | S0052:1, S0374:1, L0565:1, H0547:1, S0406:1, H0478:1, L0740:1, L0779:1, L0757:1, |
| | | | | L0759:1, H0444:1, H0445:1, L0592:1 and L0595:1. |
| 286 | HRGBD54 | 828436 | 296 | L0438:4, T0049:2, H0251:2, H0050:2, L0483:2, H0551:2, H0413:2, L0748:2, L0755:2, |
| | | | | L0599:2, H0170:1, H0650:1, H0657:1, S0212:1, H0662:1, H0402:1, S0444:1, S0132:1, |
| | | | | L0717:1, H0574:1, H0013:1, H0156:1, H0599:1, H0581:1, L0471:1, H0011:1, H0024:1, |
| | | | | H0266:1, S0250:1, S0214:1, T0067:1, L0065:1, L0796:1, L0764:1, L0794:1, L0766:1, |
| | | | | L0659:1, L0666:1, H0144:1, H0547:1, H0519:1, H0593:1, H0134:1, S3014:1, L0744:1, |
| | | | | L0747:1, L0758:1, S0434:1 and H0543:1. |
| 287 | HROEA08 | 866190 | 297 | S0474:57, H0521:14, L0766:12, S0422:10, L0809:8, H0069:7, H0591:7, H0556:6, |
| | | | | H0650:5, H0749:5, H0486:5, H0090:5, L0655:5, S0114:4, S0134:4, H0747:4, S0003:4, |
| | | | | H0268:4, H0641:4, L0770:4, H0518:4, L0777:4, H0656:3, H0638:3, H0271:3, H0039:3, |
| | | | | L0598:3, L0763:3, L0659:3, H0436:3, L0754:3, L0756:3, L0731:3, H0423:3, H0422:3, |
| | | | | H0265:2, H0657:2, S0354:2, H0013:2, L0105:2, H0581:2, H0622:2, H0598:2, H0100:2, |
| | | | | S0144:2, S0002:2, H0529:2, L0648:2, L5564:2, L0803:2, L0776:2, L0789:2, L0663:2, |
| | | | | H0696:2, H0445:2, H0542:2, H0506:2, H0624:1, H0583:1, H0305:1, H0125:1, S0360:1, |
| | | | | H0549:1, H0586:1, L3657:1, T0060:1, H0075:1, H0002:1, H0599:1, H0004:1, H0318:1, |
| | | | | H0421:1, H0251:1, H0457:1, H0178:1, L0471:1, T0003:1, H0024:1, S0388:1, S0051:1, |
| | | | | S0024:1, H0266:1, H0687:1, H0644:1, H0040:1, H0264:1, T0069:1, H0625:1, S0440:1, |
| | | | | H0646:1, S0344:1, S0426:1, L0761:1, L0641:1, L0662:1, L0794:1, L0650:1, L0774:1, |
| | | | | L0375:1, L0784:1, L0805:1, L0515:1, H0144:1, H0702:1, S0374:1, H0520:1, S0126:1, |
| | | | | H0689:1, H0659:1, H0658:1, S0378:1, H0522:1, H0555:1, H0727:1, S3014:1, L0747:1, |
| | | | | L0779:1, L0752:1, L0753:1, L0757:1, S0260:1, S0242:1, H0543:1 and S0412:1. |
| 288 | HSAVA08 | 580870 | 298 | AR313:39, AR039:39, AR299:18, AR089:17, AR096:17, AR185:16, AR277:16, AR300:16, |
| | | | | AR104:12, AR316:12, AR240:10, AR219:10, AR218:9, AR060:9, AR282:9, AR055:8, |
| | | | | AR283:5 S0114:2 |
| 289 | HSAWN53 | 634697 | 299 | AR277:14, AR313:13, AR219:10, AR299:9, AR039:9, AR089:9, AR055:9, AR185:9, |
| | | | | AR104:8, AR218:8, AR300:8, AR283:8, AR316:8, AR282:8, AR060:8, AR096:7, AR240:6 |
| | | | | S0114:1 |
| 290 | HSAWZ40 | 634000 | 300 | AR283:11, AR039:8, AR218:8, AR060:8, AR219:8, AR313:8, AR055:7, AR089:7, |
| | | | | AR185:7, AR096:6, AR299:6, AR316:6, AR240:6, AR277:5, AR282:5, AR104:5, AR300:4 |
| | | | | S0114:1 |
| 291 | HSDBI90 | 853376 | 301 | AR055:5, AR282:4, AR060:4, AR104:3, AR240:3, AR218:3, AR283:2, AR185:2, AR277:2, |
| | | | | AR219:2, AR300:2, AR089:2, AR096:2, AR039:2, AR316:1, AR299:1 L0439:5, L0438:2, |
| | | | | S6024:1, H0052:1, H0009:1, H0051:1, H0424:1, S0352:1, L0794:1, L0803:1, L0790:1 |
| | | | | and S0106:1. |
| 292 | HSDZM54 | 637870 | 302 | AR060:424, AR055:413, AR299:314, AR185:295, AR277:232, AR104:224, AR283:216, |
| | | | | AR089:202, AR282:188, AR300:180, AR039:167, AR316:159, AR240:126, AR096:104, |
| | | | | AR219:88, AR218:76, AR313:63 H0455:1 |
| 293 | HSHBF76 | 715838 | 303 | L0747:7, H0599:5, H0622:4, L0764:4, L0794:4, L0659:4, L0005:3, H0144:3, L0749:3, |
| | | | | L0750:3, S0046:2, H0013:2, H0046:2, H0031:2, L0770:2, L0761:2, L0649:2, L0806:2, |
| | | | | L0809:2, L0744:2, L0754:2, L0755:2, L0588:2, L0603:2, H0171:1, H0685:1, S0212:1, |
| | | | | S0376:1, S0132:1, H0645:1, H0619:1, S6022:1, H0574:1, L0738:1, L0157:1, H0030:1, |
| | | | | H0135:1, H0616:1, H0494:1, L0800:1, L0771:1, L0773:1, L0662:1, L0803:1, L0783:1, |
| | | | | L0789:1, L0665:1, S0374:1, H0539:1, S3012:1, S0037:1, S0027:1, L0751:1, L0756:1, |
| | | | | L0779:1, L0731:1, L0758:1, H0653:1 and H0352:1. |
| 294 | HSIFG47 | 778378 | 304 | H0590:1 |
| 295 | HSJBY32 | 702020 | 305 | AR055:3, AR300:3, AR277:3, AR299:2, AR060:2, AR185:2, AR039:2, AR104:2, AR282:1, |
| | | | | AR283:1, AR240:1, AR096:1, AR316:1, AR089:1 H0729:1, H0735:1, S0222:1, H0271:1, |
| | | | | L0796:1, L0766:1, S0032:1 and L0747:1. |
| 296 | HSKDR27 | 580874 | 306 | AR055:9, AR104:9, AR218:7, AR060:7, AR299:6, AR185:6, AR039:6, AR240:5, AR089:5, |
| | | | | AR219:5, AR300:5, AR283:5, AR316:4, AR313:4, AR096:3, AR277:3, AR282:2 S0027:95, |
| | | | | S0192:54, S3014:53, S0126:42, S0040:35, H0424:23, S0028:22, S0037:19, S3012:16, |
| | | | | H0213:13, T0006:12, H0250:11, S0032:11, L0744:11, T0040:10, H0124:10, H0429:10, |
| | | | | L0740:10, L0588:10, L0754:9, H0545:8, H0280:8, S0194:8, S0196:7, H0392:6, |
| | | | | T0039:6, H0150:6, H0039:6, S0206:6, L0743:6, L0731:6, S0342:5, S0212:5, S0045:5, |
| | | | | H0486:5, H0575:5, H0014:5, H0090:5, H0551:5, H0100:5, S0044:5, S0011:5, H0255:4, |
| | | | | H0318:4, H0271:4, S0022:4, H0031:4, H0181:4, H0032:4, H0038:4, T0067:4, S0124:4, |
| | | | | L0747:4, L0749:4, H0402:3, H0309:3, H0046:3, S0250:3, H0068:3, H0087:3, H0059:3, |
| | | | | S0142:3, S0053:3, H0419:2, S0116:2, S0408:2, S0132:2, S0278:2, S0222:2, H0331:2, |
| | | | | T0060:2, H0069:2, H0427:2, H0599:2, T0082:2, H0253:2, H0546:2, H0086:2, H0123:2, |
| | | | | H0024:2, H0015:2, H0510:2, H0428:2, T0023:2, H0163:2, H0063:2, H0509:2, L0772:2, |
| | | | | L0805:2, S0052:2, H0547:2, H0518:2, L0748:2, L0751:2, L0745:2, L0750:2, L0777:2, |
| | | | | L0755:2, L0757:2, H0445:2, L0590:2, L0599:2, S0026:2, S0242:2, H0171:1, H0265:1, |
| | | | | H0716:1, H0294:1, S0298:1, H0662:1, H0450:1, S0360:1, H0329:1, S0046:1, H0411:1, |
| | | | | S6022:1, H0431:1, H0357:1, H0455:1, H0586:1, H0587:1, L0021:1, H0042:1, T0048:1, |
| | | | | H0505:1, H0052:1, H0251:1, H0235:1, H0231:1, H0544:1, H0050:1, H0051:1, H0071:1, |
| | | | | H0083:1, H0060:1, H0266:1, H0188:1, H0292:1, S0214:1, H0328:1, H0033:1, H0417:1, |
| | | | | H0553:1, H0628:1, H0617:1, H0606:1, H0383:1, H0212:1, H0388:1, H0135:1, H0040:1, |
| | | | | H0487:1, H0413:1, T0069:1, H0560:1, H0538:1, S0210:1, L0763:1, L0646:1, L0641:1, |
| | | | | L0649:1, L0803:1, L0652:1, L0629:1, L0659:1, L0787:1, L0665:1, H0435:1, H0528:1, |
| | | | | H0521:1, H0555:1, L0779:1, L0581:1, S0276:1 and H0008:1. |
| 297 | HSLHG78 | 846148 | 307 | AR096:21, AR055:6, AR039:6, AR299:6, AR104:6, AR185:6, AR060:4, AR300:4, |
| | | | | AR313:4, AR240:3, AR316:3, AR089:2, AR283:2, AR277:2, AR282:1 L0777:9, L0759:7, |
| | | | | L0740:6, L0756:6, L0665:5, L0771:4, L0731:4, L0637:3, S0028:3, L0744:3, L0662:2, |
| | | | | L0803:2, L0809:2, L3811:2, L0751:2, L0779:2, L0362:2, H0739:1, H0624:1, H0713:1, |
| | | | | S6024:1, H0733:1, S0220:1, T0039:1, L3655:1, H0156:1, L0021:1, L0471:1, H0644:1, |
| | | | | H0032:1, H0316:1, H0488:1, H0641:1, L0638:1, L0641:1, L0774:1, L0776:1, L0807:1, |
| | | | | L0636:1, L0787:1, L0789:1, L0790:1, H0144:1, H0726:1, H0478:1, S3012:1, S0206:1, |
| | | | | L0439:1, L0749:1, L0750:1, L0758:1, L0599:1 and S0242:1. |
| 298 | HSNAP85 | 784054 | 308 | AR218:36, AR219:31, AR313:20, AR089:16, AR055:16, AR299:13, AR185:13, AR316:10, |
| | | | | AR060:9, AR104:8, AR300:8, AR282:8, AR096:7, AR039:7, AR277:6, AR283:5, AR240:5 |
| | | | | L0105:11, L0754:10, L0803:9, L0777:8, L0740:6, L0770:4, L0649:4, L0805:4, |
| | | | | L0731:4, S0212:3, L0766:3, L0752:3, L0599:3, H0265:2, L3643:2, H0656:2, S0418:2, |
| | | | | S0444:2, S0360:2, H0581:2, L0157:2, T0023:2, H0038:2, H0413:2, S0422:2, H0529:2, |
| | | | | L0794:2, L0774:2, L0654:2, L0776:2, L0666:2, L0663:2, L0665:2, H0547:2, H0696:2, |
| | | | | S0027:2, L0743:2, L0744:2, L0750:2, L0779:2, L0759:2, S0192:2, S0242:2, H0624:1, |
| | | | | S0134:1, H0341:1, H0663:1, H0664:1, H0729:1, H0722:1, S0045:1, S0476:1, H0619:1, |
| | | | | H0610:1, H0497:1, L3816:1, H0486:1, H0013:1, H0575:1, H0318:1, H0545:1, H0569:1, |
| | | | | L0471:1, H0328:1, H0615:1, H0553:1, H0163:1, H0040:1, H0551:1, H0412:1, S0370:1, |
| | | | | S0438:1, L0646:1, L0521:1, L0662:1, L0804:1, L0775:1, L0655:1, L0658:1, L0634:1, |
| | | | | L0809:1, S0374:1, L3824:1, L3826:1, H0435:1, H0660:1, H0672:1, S0378:1, H0754:1, |
| | | | | H0576:1, S0390:1, S3014:1, S0206:1, L0747:1, L0758:1, L0608:1, S0026:1, S0194:1 |
| | | | | and H0506:1. |
| 299 | HSOAH16 | 827058 | 309 | AR282:2 H0343:1 |
| 300 | HSQDO85 | 853393 | 310 | AR219:50, AR218:47, AR096:37, AR316:34, AR313:28, AR039:27, AR299:25, AR277:22, |
| | | | | AR185:21, AR282:21, AR089:21, AR300:20, AR240:19, AR104:18, AR283:17, AR055:16, |
| | | | | AR060:15 S0026:1 |
| 301 | HSQES57 | 831222 | 311 | AR060:15, AR185:14, AR299:14, AR089:13, AR240:12, AR218:11, AR282:11, AR277:10, |
| | | | | AR104:10, AR055:9, AR300:9, AR096:9, AR316:9, AR219:8, AR313:8, AR039:8, AR283:7 |
| | | | | L0751:4, L0747:4, L0769:3, L0662:3, L0809:3, L0748:3, H0624:2, H0618:2, H0050:2, |
| | | | | L0770:2, L0764:2, L0766:2, L0744:2, H0352:2, H0686:1, S0040:1, S0114:1, H0657:1, |
| | | | | S0116:1, L0988:1, S0444:1, H0586:1, H0587:1, H0013:1, H0123:1, S0250:1, H0166:1, |
| | | | | S0438:1, S0440:1, L0639:1, L0643:1, L0771:1, L0521:1, L0803:1, L0774:1, L0379:1, |
| | | | | L0807:1, L0783:1, L5623:1, S0374:1, L3660:1, H0593:1, S0404:1, S0406:1, L0743:1, |
| | | | | L0750:1, L0777:1, L0753:1, L0757:1, L0758:1, L0599:1, S0026:1 and L2842:1. |
| 302 | HSRBE06 | 871264 | 312 | AR313:33, AR039:26, AR299:17, AR277:15, AR096:14, AR089:14, AR300:13, AR185:12, |
| | | | | AR316:11, AR282:10, AR218:9, AR240:9, AR104:9, AR219:7, AR060:7, AR055:5, |
| | | | | AR283:4 S0011:3, H0306:1, H0402:1, L0004:1, H0486:1, H0050:1, S0051:1, H0494:1 |
| | | | | and S0002:1. |
| 303 | HSSDI26 | 560722 | 313 | AR313:14, AR039:11, AR299:9, AR185:8, AR089:8, AR277:8, AR300:7, AR218:6, |
| | | | | AR060:6, AR240:6, AR055:6, AR096:6, AR316:5, AR104:5, AR283:4, AR282:4, AR219:3 |
| | | | | H0135:1 |
| 304 | HSSEA64 | 853395 | 314 | AR240:12, AR055:11, AR060:10, AR277:9, AR282:9, AR089:9, AR096:8, AR218:8, |
| | | | | AR283:7, AR219:7, AR104:6, AR300:6, AR185:6, AR316:6, AR299:5, AR039:5, AR313:4 |
| | | | | H0052:17, L0745:11, L0748:10, L0777:8, L0755:8, H0547:7, L0439:7, L0766:6, |
| | | | | L0774:6, L0771:5, L0662:4, L0746:4, S0474:3, L0163:3, H0059:3, H0100:3, L0770:3, |
| | | | | L0775:3, L0665:3, L0741:3, L0751:3, L0758:3, L0759:3, H0261:2, H0333:2, H0618:2, |
| | | | | H0194:2, H0545:2, H0012:2, H0617:2, H0135:2, L0763:2, L0769:2, L0768:2, L0657:2, |
| | | | | L0438:2, H0520:2, H0539:2, S0152:2, L0747:2, L0752:2, L0753:2, S0436:2, L0588:2, |
| | | | | S0040:1, T0049:1, H0657:1, H0663:1, S0420:1, S0358:1, S0360:1, H0675:1, H0645:1, |
| | | | | L0717:1, H0437:1, H0550:1, S6016:1, H0497:1, H0574:1, H0599:1, H0575:1, H0253:1, |
| | | | | H0041:1, H0620:1, H0373:1, H0375:1, H0188:1, H0181:1, H0124:1, H0068:1, H0040:1, |
| | | | | H0561:1, S0448:1, S0440:1, S0210:1, S0002:1, L0638:1, L0639:1, L0627:1, L0644:1, |
| | | | | L0773:1, L0767:1, L0387:1, L0375:1, L0651:1, L0806:1, L0776:1, L0659:1, L0540:1, |
| | | | | L5622:1, L2261:1, H0144:1, H0593:1, S0126:1, H0694:1, H0134:1, H0555:1, S0390:1, |
| | | | | S0028:1, L0749:1, L0786:1, L0780:1, L0731:1, L0757:1, L0605:1, L0592:1, S0026:1 |
| | | | | and S0276:1. |
| 305 | HSSEF77 | 658725 | 315 | H0617:7, L0750:7, H0556:5, L0769:5, L0783:5, L0758:5, L0759:5, L0665:4, L0741:4, |
| | | | | S0132:3, L0761:3, L0742:3, L0439:3, L0755:3, L0592:3, H0618:2, H0620:2, H0038:2, |
| | | | | L0771:2, L0662:2, L0659:2, L0666:2, S0126:2, H0670:2, S0328:2, S0380:2, L0747:2, |
| | | | | L0753:2, L0731:2, H0395:1, H0295:1, H0294:1, H0657:1, H0656:1, H0341:1, H0484:1, |
| | | | | H0663:1, H0638:1, S0356:1, S0444:1, H0741:1, L3271:1, H0549:1, H0550:1, H0370:1, |
| | | | | H0455:1, H0632:1, H0486:1, T0039:1, T0112:1, H0156:1, H0581:1, H0052:1, H0545:1, |
| | | | | H0046:1, H0150:1, H0081:1, S0051:1, H0107:1, H0061:1, H0188:1, H0288:1, S0250:1, |
| | | | | H0428:1, H0135:1, H0163:1, H0090:1, H0616:1, T0004:1, S0438:1, L0770:1, L0796:1, |
| | | | | L0637:1, L0772:1, L0372:1, L0646:1, L0521:1, L0768:1, L0766:1, L5574:1, L0774:1, |
| | | | | L0775:1, L0375:1, L0806:1, L0776:1, L0807:1, L0657:1, L0658:1, L0540:1, L0384:1, |
| | | | | L0809:1, L0663:1, L0438:1, H0672:1, H0754:1, S0188:1, S0406:1, H0436:1, H0576:1, |
| | | | | S3014:1, L0748:1, L0779:1, L0757:1 and H0506:1. |
| 306 | HSSFE38 | 742512 | 316 | AR218:169, AR219:154, AR240:64, AR185:42, AR096:42, AR039:40, AR055:36, |
| | | | | AR316:29, AR104:24, AR299:23, AR089:21, AR060:18, AR313:17, AR283:14, AR300:14, |
| | | | | AR282:10, AR277:8 |
| 307 | HSSGJ58 | 747714 | 317 | AR277:4, AR282:3, AR055:2, AR185:2, AR299:2, AR104:2, AR218:2, AR060:2, AR240:2, |
| | | | | AR089:2, AR219:1, AR283:1, AR039:1, AR300:1, AR316:1, AR313:1 L0749:2, H0135:1, |
| | | | | L0558:1 and L0748:1. |
| 308 | HSVBD37 | 637110 | 318 | AR219:111, AR218:98, AR089:46, AR185:35, AR299:32, AR313:32, AR096:30, AR277:30, |
| | | | | AR316:30, AR060:28, AR283:27, AR104:26, AR055:26, AR039:23, AR240:22, AR282:21, |
| | | | | AR300:19 S0136:115, L0731:10, L0803:9, S0026:9, S0358:7, L0439:7, H0624:6, |
| | | | | S0418:6, L0805:6, H0619:5, L0659:5, L0666:5, L0754:5, L0756:5, H0170:4, S0360:4, |
| | | | | H0553:4, L0662:4, H0547:4, L0750:4, L0779:4, H0351:3, H0486:3, H0046:3, H0050:3, |
| | | | | L0471:3, H0266:3, H0623:3, L0770:3, H0144:3, H0520:3, S0380:3, S0040:2, H0295:2, |
| | | | | H0661:2, S0420:2, S0376:2, H0722:2, H0369:2, H0592:2, H0574:2, H0013:2, H0575:2, |
| | | | | H0051:2, S0022:2, H0615:2, H0032:2, S0438:2, S0440:2, L0598:2, L0769:2, L0774:2, |
| | | | | L0776:2, L0518:2, L0663:2, H0726:2, S0126:2, H0539:2, H0696:2, H0555:2, L0740:2, |
| | | | | L0747:2, L0753:2, L0593:2, H0686:1, S0212:1, H0484:1, H0671:1, H0662:1, S0356:1, |
| | | | | S0442:1, S0354:1, S0444:1, S0476:1, H0645:1, S0222:1, H0441:1, H0586:1, H0587:1, |
| | | | | H0333:1, H0632:1, S0280:1, L0021:1, H0599:1, H0590:1, H0309:1, L0040:1, H0544:1, |
| | | | | H0545:1, H0019:1, S0051:1, H0275:1, H0375:1, S6028:1, S0250:1, H0328:1, H0428:1, |
| | | | | H0031:1, H0111:1, H0628:1, S0364:1, H0135:1, H0616:1, H0551:1, H0268:1, H0100:1, |
| | | | | H0494:1, H0652:1, S0210:1, L0763:1, L5566:1, L0646:1, L0800:1, L0764:1, L0771:1, |
| | | | | L0768:1, L0649:1, L0804:1, L0775:1, L0806:1, L0527:1, L0636:1, L0783:1, L0790:1, |
| | | | | S0296:1, H0693:1, H0519:1, H0690:1, H0682:1, H0684:1, H0648:1, H0672:1, S0454:1, |
| | | | | S0013:1, H0626:1, H0627:1, S0028:1, L0744:1, L0777:1, L0755:1, L0757:1, L0758:1, |
| | | | | L0759:1, S0434:1, S0436:1, L0592:1, H0667:1, S0194:1 and H0506:1. |
| 309 | HSXCP38 | 895392 | 319 | AR104:7, AR055:5, AR060:4, AR039:2, AR185:2, AR240:2, AR089:2, AR282:2, AR277:2, |
| | | | | AR316:2, AR299:2, AR313:2, AR300:2, AR283:1, AR218:1, AR096:1 L0439:3, L3655:1, |
| | | | | H0050:1, T0010:1, S0036:1, L0438:1 and L0759:1. |
| 310 | HSYBI06 | 740766 | 320 | AR313:46, AR039:40, AR096:25, AR185:20, AR300:20, AR089:20, AR299:18, AR104:18, |
| | | | | AR240:17, AR316:17, AR219:16, AR277:16, AR218:14, AR060:12, AR282:10, AR055:4, |
| | | | | AR283:3 H0159:2, H0663:2, H0024:2, H0059:2, H0543:2, H0556:1, H0222:1, L3643:1, |
| | | | | H0255:1, H0431:1, T0039:1, H0599:1, S0010:1, T0048:1, H0251:1, H0266:1, H0032:1, |
| | | | | H0551:1, H0100:1, S0015:1, S0370:1, H0743:1, L0369:1, L0627:1, L0519:1, L0663:1, |
| | | | | L0665:1, H0691:1, H0696:1, H0627:1, S0028:1, L0744:1, L0740:1, L0777:1, S0434:1, |
| | | | | L0588:1, L0604:1 and H0422:1. |
| 311 | HT1SC27 | 630647 | 321 | AR313:10, AR039:9, AR219:9, AR218:8, AR185:7, AR055:7, AR060:6, AR089:6, |
| | | | | AR299:6, AR277:5, AR282:5, AR316:5, AR096:5, AR240:4, AR104:4, AR300:4, AR283:3 |
| | | | | H0218:20, H0219:7, H0157:3, H0207:2, H0169:1, S0440:1 and L0749:1. |
| 312 | HT3BF49 | 838620 | 322 | H0271:2, L0791:2, L0439:2, H0159:1, H0561:1, L0774:1, S0052:1 and L0779:1. |
| 313 | HT5FX79 | 794169 | 323 | AR313:23, AR055:11, AR089:11, AR316:10, AR060:10, AR039:9, AR277:9, AR096:8, |
| | | | | AR240:8, AR283:8, AR299:7, AR300:7, AR282:7, AR185:7, AR104:6, AR219:5, AR218:4 |
| | | | | H0584:45, L0748:8, H0167:6, L0766:6, L0779:5, L0758:5, H0445:5, L0777:4, |
| | | | | H0581:3, H0529:3, L0805:3, L0789:3, L0750:3, H0333:2, L0471:2, H0024:2, L0483:2, |
| | | | | H0090:2, H0494:2, L0769:2, L0768:2, L0774:2, L0783:2, L5622:2, H0593:2, L0747:2, |
| | | | | L0755:2, L0731:2, L0589:2, H0556:1, S0114:1, S0134:1, H0255:1, L0481:1, S0360:1, |
| | | | | H0675:1, H0645:1, H0619:1, H0453:1, H0574:1, H0575:1, H0309:1, L0157:1, H0014:1, |
| | | | | H0083:1, H0615:1, H0622:1, H0553:1, H0708:1, H0598:1, H0038:1, H0616:1, H0551:1, |
| | | | | H0477:1, H0056:1, S0016:1, H0561:1, S0002:1, L0763:1, L0637:1, L0761:1, L0646:1, |
| | | | | L0771:1, L0794:1, L0803:1, L0375:1, L0806:1, L0653:1, L0776:1, L0655:1, L0527:1, |
| | | | | L0790:1, L0792:1, L4501:1, L4508:1, H0547:1, H0689:1, H0690:1, H0659:1, H0539:1, |
| | | | | S0380:1, H0518:1, H0521:1, H0696:1, S0406:1, L0754:1, L0749:1, S0394:1, S0106:1, |
| | | | | S0026:1, S0276:1, H0542:1, H0543:1, H0423:1, S0424:1 and H0506:1. |
| 314 | HT5GR59 | 801930 | 324 | AR240:19, AR096:15, AR316:10, AR300:9, AR055:9, AR039:8, AR313:8, AR282:8, |
| | | | | AR277:7, AR185:7, AR060:7, AR219:7, AR218:6, AR299:6, AR104:6, AR283:6, AR089:5 |
| | | | | H0584:36, H0585:22, H0141:11, H0167:9, H0457:7, H0521:6, S0474:4, H0575:3, |
| | | | | L0731:3, H0265:2, H0556:2, H0581:2, L0761:2, H0543:2, H0140:1, H0638:1, S0358:1, |
| | | | | S0140:1, H0747:1, H0619:1, H0497:1, H0559:1, H0069:1, H0635:1, H0427:1, S0280:1, |
| | | | | H0252:1, H0477:1, L0667:1, L0768:1, L0775:1, L0659:1, L0791:1, L0792:1, S0053:1, |
| | | | | L0777:1, L0758:1, H0445:1 and H0506:1. |
| 315 | HTDAA78 | 566861 | 325 | AR240:12, AR219:12, AR039:10, AR316:10, AR218:9, AR096:8, AR283:8, AR282:8, |
| | | | | AR313:7, AR055:7, AR089:6, AR104:6, AR300:6, AR299:6, AR277:5, AR060:4, AR185:3 |
| | | | | H0477:1 |
| 316 | HTEAG62 | 812332 | 326 | AR310:2, AR282:2, AR206:2, AR273:2, AR186:1, AR295:1, AR294:1, AR175:1 L0766:6, |
| | | | | H0038:5, L0758:4, H0616:3, S0422:2, L0779:2, L0752:2, H0638:1, S0376:1, S0132:1, |
| | | | | L3388:1, H0250:1, L0564:1, L0794:1, L0803:1, L0666:1, L0777:1, L0755:1, H0595:1, |
| | | | | S0434:1 and H0542:1. |
| 317 | HTECB02 | 806305 | 327 | AR283:34, AR104:20, AR219:12, AR240:12, AR089:12, AR218:12, AR282:11, AR299:10, |
| | | | | AR055:10, AR039:9, AR060:9, AR096:8, AR316:8, AR185:7, AR277:6, AR300:6, AR313:6 |
| | | | | S0358:3, H0253:3, T0010:3, L0806:3, L0747:3, L0749:3, H0265:2, H0663:2, H0036:2, |
| | | | | H0618:2, L0764:2, L5623:2, L0666:2, H0521:2, L0759:2, L0591:2, L0604:2, H0556:1, |
| | | | | S0114:1, L0443:1, S0408:1, H0619:1, S0222:1, H0559:1, T0039:1, S0280:1, L0021:1, |
| | | | | H0706:1, H0196:1, H0052:1, H0545:1, H0009:1, H0172:1, H0123:1, H0024:1, H0014:1, |
| | | | | S0388:1, H0239:1, H0428:1, H0181:1, H0708:1, H0591:1, H0038:1, S0002:1, L0796:1, |
| | | | | L3905:1, L0761:1, L0646:1, L0766:1, L0381:1, L0803:1, L0774:1, L0775:1, L0807:1, |
| | | | | L0517:1, L0783:1, L0384:1, L0809:1, L0545:1, L5622:1, L0788:1, L0664:1, L0447:1, |
| | | | | H0658:1, S0027:1, L0743:1, L0744:1, L0751:1, L0754:1, L0745:1, L0746:1, L0750:1, |
| | | | | L0752:1, L0755:1, L0758:1, S0434:1, H0665:1 and H0542:1. |
| 318 | HTECC15 | 866488 | 328 | H0616:8, S0222:5, S0049:5, L0794:4, S0126:4, L0742:3, L0439:3, L0756:3, S0212:2, |
| | | | | S0376:2, H0013:2, H0327:2, H0399:2, H0494:2, H0144:2, L0438:2, L0758:2, L0599:2, |
| | | | | H0656:1, S0001:1, S0007:1, S0300:1, L0717:1, H0392:1, H0438:1, H0244:1, H0590:1, |
| | | | | S0010:1, H0178:1, L0157:1, H0057:1, S0050:1, S0388:1, S0051:1, T0010:1, S6028:1, |
| | | | | H0328:1, H0615:1, H0068:1, H0135:1, H0591:1, H0038:1, H0102:1, H0359:1, L0521:1, |
| | | | | L0649:1, L0805:1, L0657:1, L0791:1, H0520:1, H0547:1, L0779:1, S0260:1, L0685:1 |
| | | | | and L0594:1. |
| 319 | HTEDJ28 | 762845 | 329 | AR219:24, AR218:21, AR089:19, AR055:18, AR313:16, AR299:15, AR096:13, AR316:13, |
| | | | | AR104:13, AR060:11, AR185:11, AR283:10, AR039:9, AR277:9, AR282:9, AR300:8, |
| | | | | AR240:7 L0747:9, L0439:8, L0809:6, L0766:5, L0750:5, L0758:5, L0740:4, L0752:4, |
| | | | | L0731:4, L0662:3, H0547:3, L0779:3, L0777:3, L0757:3, H0375:2, L0646:2, L0774:2, |
| | | | | L0783:2, H0144:2, L0759:2, S0442:1, H0333:1, T0060:1, H0327:1, H0399:1, L0483:1, |
| | | | | H0038:1, L0564:1, S0382:1, H0538:1, H0743:1, L0763:1, L0638:1, L0765:1, L0771:1, |
| | | | | L0649:1, L0522:1, L0775:1, L0655:1, L0659:1, L0792:1, L0663:1, L0438:1, H0648:1, |
| | | | | L0756:1, L0753:1, L0596:1, L0590:1, L0592:1, L0608:1, H0423:1 and S0460:1. |
| 320 | HTEDS12 | 838621 | 330 | H0253:4, L0779:2, H0618:1, H0050:1, H0038:1, L0151:1, L0758:1 and H0445:1. |
| 321 | HTEEW69 | 764835 | 331 | AR104:36, AR283:28, AR219:27, AR218:27, AR316:21, AR277:20, AR089:20, AR055:19, |
| | | | | AR096:18, AR313:18, AR240:18, AR282:18, AR185:16, AR299:16, AR060:15, AR039:14, |
| | | | | AR300:12 H0038:8, H0616:4, L0779:3, L0758:3, L0753:2, L0032:1, T0006:1, H0040:1, |
| | | | | L0768:1 and H0547:1. |
| 322 | HTEGS07 | 827700 | 332 | AR283:22, AR277:9, AR055:8, AR218:8, AR219:7, AR060:6, AR104:6, AR300:6, |
| | | | | AR282:5, AR240:5, AR039:4, AR089:4, AR316:4, AR185:4, AR299:4, AR096:4, AR313:3 |
| | | | | L0804:2, L0747:2, L0485:2, L0604:2, L0623:1, H0708:1, S0366:1, H0038:1, L0794:1, |
| | | | | L0775:1 and L0779:1. |
| 323 | HTEGS11 | 862066 | 333 | AR219:12, AR055:9, AR218:9, AR185:9, AR060:8, AR300:7, AR240:6, AR104:6, |
| | | | | AR089:6, AR282:6, AR299:6, AR096:5, AR039:5, AR316:4, AR313:3, AR283:3, AR277:3 |
| | | | | L0748:8, L0598:4, L0747:4, L0770:3, L0750:3, L0756:3, H0645:2, H0619:2, L0794:2, |
| | | | | L0666:2, L0439:2, L0749:2, L0777:2, L0731:2, H0170:1, S0040:1, H0713:1, H0486:1, |
| | | | | H0196:1, L0471:1, H0038:1, L0769:1, L0637:1, L0761:1, L0772:1, L0766:1, L0775:1, |
| | | | | L0367:1, L0789:1, L0793:1, H0144:1, H0547:1, L0758:1 and L0581:1. |
| 324 | HTEHA56 | 806461 | 334 | AR104:41, AR089:32, AR299:24, AR313:21, AR055:19, AR096:18, AR240:18, AR060:17, |
| | | | | AR185:17, AR316:16, AR039:15, AR282:12, AR300:11, AR219:11, AR277:10, AR218:9, |
| | | | | AR283:8 L0754:8, L0770:5, L0794:5, L0805:5, H0553:4, L0803:4, H0615:3, L0769:3, |
| | | | | L0439:3, L0777:3, L0752:3, H0052:2, H0038:2, L0637:2, L3905:2, L0768:2, L0659:2, |
| | | | | L5623:2, L0666:2, L0664:2, L3828:2, H0547:2, H0593:2, H0682:2, H0539:2, H0521:2, |
| | | | | L0744:2, L0757:2, L0604:2, L0601:2, H0624:1, H0657:1, H0656:1, S0212:1, H0254:1, |
| | | | | H0662:1, L0005:1, L2323:1, S0045:1, H0619:1, H0550:1, H0592:1, L3655:1, H0013:1, |
| | | | | H0036:1, H0618:1, H0620:1, H0023:1, S0051:1, H0188:1, H0028:1, H0428:1, T0006:1, |
| | | | | H0213:1, L0455:1, H0135:1, H0616:1, H0264:1, H0413:1, T0069:1, S0038:1, H0100:1, |
| | | | | L3180:1, L0763:1, L0638:1, L5565:1, L0761:1, L0667:1, L0804:1, L0650:1, L0375:1, |
| | | | | L0776:1, L0807:1, L0809:1, L0519:1, L0663:1, L0665:1, L0710:1, L3811:1, L3825:1, |
| | | | | L3827:1, H0520:1, S0126:1, H0684:1, H0435:1, H0659:1, H0648:1, S0190:1, S0404:1, |
| | | | | H0555:1, L0741:1, L0751:1, L0747:1, L0753:1 and L0758:1. |
| 325 | HTEHU59 | 840385 | 335 | AR313:11, AR218:10, AR219:9, AR039:7, AR316:6, AR096:6, AR104:6, AR277:5, |
| | | | | AR299:5, AR055:5, AR282:4, AR089:4, AR283:3, AR300:3, AR060:3, AR240:3, AR185:3 |
| | | | | S0422:6, H0038:4, L0758:4, L0754:3, S0360:2, H0024:2, L0598:2, L0766:2, L0748:2, |
| | | | | L0747:2, L0756:2, H0583:1, H0341:1, S0418:1, L0005:1, H0741:1, H0437:1, H0369:1, |
| | | | | H0581:1, H0194:1, S0050:1, H0271:1, H0428:1, T0006:1, H0068:1, H0412:1, H0056:1, |
| | | | | H0494:1, S0426:1, L0772:1, L0646:1, L0662:1, L0803:1, L0806:1, L0776:1, L0655:1, |
| | | | | L0789:1, L0792:1, H0144:1, S0374:1, H0670:1, H0627:1, S0026:1 and S0192:1. |
| 326 | HTEKM46 | 862069 | 336 | S0422:6, H0038:4, L0758:4, L0754:3, S0360:2, H0024:2, L0598:2, L0766:2, L0748:2, |
| | | | | L0747:2, L0756:2, H0583:1, H0341:1, S0418:1, L0005:1, H0741:1, H0437:1, H0369:1, |
| | | | | H0581:1, H0194:1, S0050:1, H0271:1, H0428:1, T0006:1, H0068:1, H0412:1, H0056:1, |
| | | | | H0494:1, S0426:1, L0772:1, L0646:1, L0662:1, L0803:1, L0806:1, L0776:1, L0655:1, |
| | | | | L0789:1, L0792:1, H0144:1, S0374:1, H0670:1, H0627:1, S0026:1 and S0192:1. |
| 327 | HTEMQ17 | 840387 | 337 | AR282:6, AR055:6, AR060:5, AR218:4, AR283:4, AR300:3, AR299:3, AR316:3, AR039:3, |
| | | | | AR185:3, AR104:2, AR089:2, AR219:2, AR313:2, AR096:2, AR240:1 L0748:6, L0766:4, |
| | | | | H0038:3, H0616:3, H0056:2, H0529:2, H0519:2, H0624:1, H0662:1, S0418:1, S0360:1, |
| | | | | H0749:1, H0013:1, H0581:1, S0388:1, H0266:1, H0591:1, H0087:1, H0413:1, H0561:1, |
| | | | | S0438:1, S0422:1, L0520:1, L0769:1, L0794:1, L0775:1, L0666:1, L0663:1, H0547:1, |
| | | | | S0152:1, L0740:1, L0777:1, L0753:1, L0758:1, L0608:1 and H0542:1. |
| 328 | HTLAP64 | 603913 | 338 | AR313:19, AR039:14, AR299:12, AR055:10, AR185:9, AR316:8, AR104:7, AR096:7, |
| | | | | AR300:6, AR089:6, AR060:5, AR218:5, AR282:4, AR283:4, AR277:4, AR219:3, AR240:3 |
| | | | | L0803:7, L0756:6, S0422:4, L0794:4, L0809:4, L0754:4, L0758:3, S0003:2, H0615:2, |
| | | | | L0764:2, L0375:2, L0659:2, L0783:2, L0665:2, L0748:2, L0731:2, L0759:2, L3643:1, |
| | | | | H0686:1, S6024:1, L0002:1, H0662:1, L0005:1, L3649:1, H0734:1, H0749:1, H0441:1, |
| | | | | H0574:1, L3653:1, H0575:1, H0253:1, S0474:1, H0052:1, H0569:1, H0081:1, L0471:1, |
| | | | | H0266:1, H0687:1, H0622:1, L0483:1, H0628:1, H0606:1, H0135:1, H0591:1, H0059:1, |
| | | | | L0763:1, L0637:1, L3904:1, L0772:1, L0643:1, L0768:1, L0364:1, L0649:1, L0774:1, |
| | | | | L4558:1, L0368:1, L4501:1, L0663:1, L0664:1, L2655:1, H0144:1, L0352:1, H0519:1, |
| | | | | H0593:1, S0126:1, H0660:1, H0666:1, H0696:1, S0406:1, S0028:1, L0740:1, L0745:1, |
| | | | | L0747:1, L0750:1, L0779:1, S0436:1, L0587:1, L0597:1, L0591:1, S0026:1, L0097:1 |
| | | | | and S0242:1. |
| 329 | HTLBT80 | 840045 | 339 | AR251:22, AR273:18, AR053:18, AR309:16, AR310:16, AR183:15, AR313:15, AR274:15, |
| | | | | AR263:15, AR247:15, AR312:14, AR314:14, AR266:14, AR265:14, AR219:14, AR175:13, |
| | | | | AR218:13, AR285:12, AR280:12, AR182:12, AR268:12, AR293:12, AR213:12, AR052:12, |
| | | | | AR292:11, AR290:11, AR286:11, AR267:11, AR277:11, AR289:11, AR315:11, AR296:11, |
| | | | | AR256:11, AR295:11, AR177:10, AR291:10, AR269:10, AR271:10, AR284:10, AR096:9, |
| | | | | AR243:9, AR270:9, AR299:9, AR283:9, AR249:9, AR300:9, AR033:9, AR253:9, AR238:9, |
| | | | | AR184:8, AR179:8, AR248:8, AR231:8, AR298:8, AR234:8, AR061:8, AR226:8, AR282:8, |
| | | | | AR232:8, AR229:8, AR316:8, AR258:8, AR259:7, AR233:7, AR240:7, AR186:7, AR294:7, |
| | | | | AR185:7, AR198:7, AR237:7, AR275:6, AR281:6, AR039:6, AR192:6, AR227:6, AR089:6, |
| | | | | AR104:6, AR246:6, AR055:6, AR244:6, AR202:5, AR204:5, AR060:5, AR206:4, AR205:4, |
| | | | | AR241:4, AR194:1 L0659:6, H0556:4, H0521:4, L0439:4, L0745:4, L0759:4, H0657:3, |
| | | | | S0360:3, L0761:3, L0662:3, L0766:3, L0809:3, H0549:2, H0392:2, H0253:2, H0581:2, |
| | | | | H0620:2, H0051:2, H0551:2, H0494:2, L0770:2, L0794:2, L0649:2, L0665:2, H0520:2, |
| | | | | S0032:2, L0741:2, L0743:2, L0748:2, L0747:2, L0779:2, H0758:2, L0605:2, H0650:1, |
| | | | | H0484:1, H0254:1, H0402:1, S0358:1, H0580:1, H0741:1, S0007:1, S0132:1, S0476:1, |
| | | | | H0393:1, H0369:1, H0550:1, H0409:1, H0256:1, H0250:1, H0042:1, H0036:1, H0318:1, |
| | | | | S0049:1, H0050:1, H0014:1, H0375:1, S6028:1, H0266:1, H0292:1, H0428:1, H0622:1, |
| | | | | H0031:1, H0617:1, L0456:1, H0135:1, H0040:1, H0379:1, H0264:1, H0056:1, H0623:1, |
| | | | | H0100:1, H0633:1, S0002:1, H0529:1, L0762:1, L5575:1, L0772:1, L0646:1, L0771:1, |
| | | | | L0773:1, L0767:1, L0768:1, L0803:1, L0805:1, L0653:1, L5622:1, L4501:1, L0666:1, |
| | | | | H0689:1, H0690:1, H0682:1, H0670:1, H0522:1, S0044:1, H0436:1, S0027:1, L0754:1, |
| | | | | L0749:1, L0753:1, L0731:1, S0436:1, H0653:1, S0192:1, H0542:1, H0543:1, H0423:1 and S0424:1. |
| 330 | HTLCX82 | 847091 | 340 | L0803:4, L0805:4, L0758:4, S0422:3, H0255:2, H0747:2, L0769:2, L0774:2, L0666:2, |
| | | | | L0665:2, L0439:2, L0777:2, L0731:2, S0042:2, H0265:1, H0686:1, H0662:1, S0442:1, |
| | | | | L3387:1, H0156:1, H0253:1, H0009:1, H0571:1, S6028:1, S0214:1, H0328:1, H0494:1, |
| | | | | L0773:1, L0766:1, L0809:1, L0788:1, L0792:1, L0663:1, L0438:1, H0518:1, L0749;1, |
| | | | | L0779:1, L0755:1, H0595:1, H0707:1. |
| 331 | HTLDA84 | 686397 | 341 | AR313:7, AR039:5, AR277:3, AR185:3, AR299:3, AR096:2, AR300:2, AR089:2, AR316:2, |
| | | | | AR283:2, AR219:2, AR060:1, AR240:1, AR104:1, AR055:1 H0253:1 |
| 332 | HTLDU78 | 637702 | 342 | L0758:3, H0253:1 and L0779:1. |
| 333 | HTLEC82 | 811992 | 343 | AR283:60, AR219:60, AR277:57, AR218:43, AR096:41, AR104:40, AR316:40, AR240:39, |
| | | | | AR313:37, AR089:36, AR185:35, AR299:31, AR039:29, AR282:28, AR055:27, AR060:21, |
| | | | | AR300:20 L0766:29, H0618:13, H0253:13, L0758:10, L0754:9, L0731:8, L0750:7, |
| | | | | L0756:6, L0761:5, L0744:5, L0748:5, L0747:5, L0759:5, L0763:4, L0769:4, L0662:4, |
| | | | | L0741:4, H0024:3, H0641:3, L0770:3, L0800:3, L0775:3, H0521:3, L0755:3, S0418:2, |
| | | | | S0046:2, S0476:2, H0250:2, H0052:2, H0620:2, H0266:2, H0271:2, H0188:2, L0783:2, |
| | | | | L0809:2, L0792:2, H0689:2, L0751:2, L0757:2, L0603:2, H0265:1, H0556:1, H0713:1, |
| | | | | H0583:1, H0650:1, H0662:1, L0005:1, S0442:1, S0444:1, H0580:1, H0730:1, H0619:1, |
| | | | | H0351:1, H0549:1, H0550:1, S0222:1, H0431:1, H0455:1, H0331:1, H0427:1, S0280:1, |
| | | | | H0122:1, H0318:1, S0049:1, H0546:1, H0545:1, H0086:1, H0009:1, H0011:1, H0023:1, |
| | | | | S0051:1, T0010:1, H0179:1, H0028:1, H0615:1, H0688:1, H0428:1, H0039:1, T0023:1, |
| | | | | H0030:1, H0553:1, H0181:1, H0606:1, H0135:1, H0038:1, H0634:1, H0063:1, H0264:1, |
| | | | | H0272:1, H0056:1, T0041:1, T0042:1, H0494:1, H0560:1, H0647:1, H0281:1, S0002:1, |
| | | | | L4497:1, L0637:1, L0643:1, L0644:1, L0764:1, L0773:1, L0767:1, L0768:1, L0794:1, |
| | | | | L0650:1, L0651:1, L0784:1, L0378:1, L0776:1, L0807:1, L0528:1, L0790:1, L0793:1, |
| | | | | L0666:1, S0374:1, H0693:1, H0547:1, H0593:1, H0672:1, S0152:1, H0555:1, S0027:1, |
| | | | | L0742:1, L0439:1, L0780:1, S0436:1, L0596:1, H0543:1 and H0352:1. |
| 334 | HTLEM16 | 779133 | 344 | AR104:96, AR219:74, AR277:67, AR283:59, AR218:52, AR185:51, AR089:49, AR316:46, |
| | | | | AR096:44, AR240:44, AR313:42, AR055:40, AR299:37, AR282:37, AR060:33, AR039:33, |
| | | | | AR300:24 L0439:31, L0741:24, H0056:13, L0748:12, H0052:9, H0521:9, L0776:8, |
| | | | | L0744:8, L0438:7, L0754:7, S0474:6, L0766:6, L0742:6, L0731:6, L0750:5, S0278:4, |
| | | | | L5566:4, L0665:4, H0522:4, H0556:3, H0716:3, H0657:3, S0358:3, H0580:3, H0599:3, |
| | | | | S0049:3, H0009:3, H0553:3, H0641:3, S0142:3, L0764:3, L0659:3, L0666:3, S0126:3, |
| | | | | L0751:3, H0717:2, H0656:2, S0029:2, S0420:2, S0360:2, S0007:2, H0497:2, H0486:2, |
| | | | | H0618:2, H0253:2, H0581:2, H0046:2, S0388:2, T0010:2, H0039:2, H0424:2, L0456:2, |
| | | | | S0036:2, H0135:2, H0551:2, H0623:2, H0494:2, S0002:2, L0770:2, L0796:2, L5575:2, |
| | | | | L5565:2, L0761:2, L0662:2, L0650:2, L0383:2, L0663:2, H0682:2, L0758:2, S0434:2, |
| | | | | L0596:2, L0581:2, S0242:2, S0114:1, H0583:1, L0422:1, S0116:1, H0662:1, H0305:1, |
| | | | | S0418:1, L0005:1, S0444:1, S0046:1, S0476:1, H0645:1, H0437:1, H0261:1, H0392:1, |
| | | | | H0600:1, H0586:1, H0574:1, L0623:1, H0013:1, H0250:1, H0427:1, H0002:1, H0575:1, |
| | | | | T0082:1, H0590:1, S0010:1, H0390:1, T0048:1, H0318:1, H0421:1, H0251:1, H0232:1, |
| | | | | H0546:1, H0150:1, H0041:1, H0178:1, H0569:1, H0620:1, H0051:1, S0051:1, H0510:1, |
| | | | | H0416:1, H0188:1, S0312:1, S0314:1, H0622:1, H0213:1, H0031:1, L0143:1, H0032:1, |
| | | | | L0455:1, S0366:1, H0038:1, H0087:1, H0264:1, H0268:1, H0022:1, H0560:1, H0625:1, |
| | | | | H0561:1, S0438:1, H0509:1, H0633:1, H0649:1, S0144:1, S0208:1, H0529:1, L0769:1, |
| | | | | L0637:1, L0667:1, L5568:1, L0774:1, L0375:1, L0805:1, L0653:1, L0654:1, L0661:1, |
| | | | | L0807:1, L0527:1, L0382:1, L0809:1, L0793:1, S0006:1, S0428:1, S0053:1, S0310:1, |
| | | | | L0352:1, H0547:1, H0684:1, H0670:1, H0660:1, S0152:1, H0696:1, S0406:1, H0555:1, |
| | | | | H0436:1, S3014:1, L0743:1, L0745:1, L0747:1, L0749:1, L0756:1, L0753:1, L0755:1, |
| | | | | H0445:1, S0436:1, L0485:1, H0667:1, H0216:1, H0543:1, H0422:1 and H0008:1. |
| 335 | HTLEV48 | 723799 | 345 | S0366:4, L0623:1 and H0253:1. |
| 336 | HTLFI73 | 846063 | 346 | AR316:6, AR218:6, AR055:6, AR060:5, AR277:5, AR300:5, AR240:4, AR283:4, AR104:4, |
| | | | | AR185:4, AR299:3, AR039:3, AR282:3, AR219:3, AR089:3, AR096:2, AR313:2 H0253:2, |
| | | | | H0305:1, T0109:1 and H0618:1. |
| 337 | HTLIF11 | 843506 | 347 | H0253:7, H0618:4, H0620:3, L0794:3, L0769:2, L0768:2, L0439:2, H0327:1, H0051:1, |
| | | | | S0250:1, S0036:1, L0639:1, L0761:1, L0635:1, L0791:1, L0664:1, L0438:1, H0539:1, |
| | | | | L0741:1, L0747:1, L0750:1, L0756:1 and L0753:1. |
| 338 | HTNAM63 | 566880 | 348 | L0439:6, T0067:1 and L0438:1. |
| 339 | HTNBK13 | 831967 | 349 | L0779:5, L0731:4, L0593:4, H0046:3, L0776:3, L0666:3, H0031:2, L0772:2, L0774:2, |
| | | | | L0805:2, H0670:2, L0439:2, L0754:2, L0777:2, L0758:2, L0590:2, T0002:1, L0717:1, |
| | | | | H0632:1, L0622:1, T0082:1, H0581:1, H0263:1, T0115:1, H0597:1, L0471:1, H0012:1, |
| | | | | H0620:1, H0163:1, T0067:1, L0770:1, L0637:1, L0388:1, L0657:1, L0382:1, L0664:1, |
| | | | | S0126:1, H0660:1, S0378:1, H0521:1, L0747:1, L0750:1, L0756:1, L0752:1, L0755:1, |
| | | | | L0759:1, S0031:1, L0599:1 and L0603:1. |
| 340 | HTOAI50 | 638623 | 350 | AR313:10, AR219:9, AR218:8, AR039:8, AR104:7, AR299:6, AR185:6, AR089:6, |
| | | | | AR096:5, AR282:4, AR316:4, AR277:4, AR300:4, AR055:4, AR060:4, AR240:2, AR283:2 |
| | | | | S0442:1, L3388:1, H0264:1 and L0766:1. |
| 341 | HTOAM11 | 664508 | 351 | AR313:30, AR039:27, AR185:18, AR299:16, AR300:13, AR277:13, AR096:13, AR089:12, |
| | | | | AR218:11, AR219:11, AR316:9, AR240:9, AR104:8, AR060:7, AR055:6, AR282:6, |
| | | | | AR283:3 S0010:1 and H0264:1. |
| 342 | HTODH57 | 823126 | 352 | AR055:5, AR060:5, AR185:4, AR283:3, AR218:3, AR300:3, AR104:3, AR299:3, AR089:2, |
| | | | | AR039:2, AR240:2, AR316:2, AR282:2, AR096:2, AR313:2, AR219:1, AR277:1 H0264:1 |
| 343 | HTODH83 | 580884 | 353 | AR055:4, AR060:4, AR283:2, AR039:2, AR104:2, AR219:2, AR299:2, AR185:2, AR282:1, |
| | | | | AR089:1, AR316:1, AR240:1, AR096:1, AR277:1 H0264:1 |
| 344 | HTOEV16 | 853616 | 354 | AR104:8, AR218:6, AR055:6, AR060:5, AR240:5, AR185:4, AR316:4, AR282:4, AR299:4, |
| | | | | AR300:4, AR283:4, AR039:4, AR277:3, AR096:3, AR219:3, AR313:3, AR089:3 H0506:66, |
| | | | | H0555:28, S0354:20, H0264:18, H0087:17, H0581:16, S0116:15, H0486:13, H0040:12, |
| | | | | H0063:12, S0358:10, H0597:8, H0039:7, H0488:6, L0751:5, H0421:4, L0744:4, |
| | | | | H0255:3, S0356:3, S0408:3, H0156:3, S0182:3, S0432:3, H0427:2, H0108:2, H0575:2, |
| | | | | T0023:2, S0382:2, H0538:2, L0770:2, L0769:2, L0662:2, L0439:2, L0592:2, S0462:2, |
| | | | | H0624:1, S0430:1, S0212:1, H0254:1, S0376:1, H0489:1, H0393:1, H0550:1, H0331:1, |
| | | | | H0025:1, H0042:1, H0004:1, T0071:1, H0596:1, H0231:1, H0545:1, H0086:1, H0355:1, |
| | | | | H0510:1, H0031:1, H0598:1, H0090:1, H0591:1, H0561:1, S0370:1, S0464:1, L0372:1, |
| | | | | L0508:1, S0374:1, H0547:1, H0689:1, H0215:1, S0392:1, L0747:1, L0731:1, L0758:1, |
| | | | | H0445:1, H0595:1, S0456:1, S0446:1 and L0600:1. |
| 345 | HTOGR38 | 824639 | 355 | AR316:149, AR104:15, AR055:14, AR089:14, AR218:13, AR240:13, AR299:12, AR185:12, |
| | | | | AR313:11, AR096:11, AR060:11, AR282:10, AR219:10, AR277:9, AR283:9, AR300:8, |
| | | | | AR039:7 L0777:3, L0748:2, H0264:1, L0794:1 and L0740:1. |
| 346 | HTOHO21 | 732808 | 356 | H0556:3 and H0264:1. |
| 347 | HTPDU17 | 840596 | 357 | AR039:5, AR277:4, AR300:4, AR282:3, AR316:3, AR096:3, AR218:3, AR299:3, AR060:2, |
| | | | | AR055:2, AR283:2, AR185:2, AR104:2, AR313:2, AR089:1, AR240:1 H0677:19, L0759:6, |
| | | | | L0748:5, H0040:4, L0438:3, L0754:3, L0750:3, L0777:3, H0255:2, H0617:2, H0038:2, |
| | | | | H0529:2, L0769:2, L0761:2, L0662:2, L0666:2, S0406:2, L0749:2, L0758:2, L0595:2, |
| | | | | H0265:1, H0556:1, H0717:1, S0134:1, H0650:1, H0657:1, S0358:1, S0444:1, S0410:1, |
| | | | | S0045:1, H0411:1, H0392:1, L0468:1, H0587:1, H0013:1, H0069:1, H0635:1, H0575:1, |
| | | | | H0618:1, H0581:1, H0564:1, H0569:1, S6028:1, H0266:1, H0252:1, H0615:1, H0039:1, |
| | | | | H0031:1, H0634:1, H0100:1, H0494:1, H0334:1, H0561:1, S0150:1, S0422:1, L0667:1, |
| | | | | L0646:1, L0800:1, L0771:1, L0661:1, L0809:1, L0790:1, L0792:1, L0663:1, L0665:1, |
| | | | | S0374:1, H0547:1, H0519:1, H0593:1, H0672:1, H0518:1, H0521:1, H0555:1, H0436:1, |
| | | | | L0439:1, L0779:1, L0731:1 and L0757:1. |
| 348 | HTSFJ32 | 637720 | 358 | AR104:9, AR039:7, AR277:5, AR282:4, AR313:4, AR299:4, AR240:3, AR089:3, AR283:3, |
| | | | | AR300:3, AR096:3, AR185:3, AR055:2, AR316:2, AR219:2, AR218:2, AR060:2 H0556:1, |
| | | | | S0114:1, H0087:1, H0538:1, H0695:1 and L0774:1. |
| 349 | HTTEZ02 | 702027 | 359 | AR299:21, AR096:20, AR313:20, AR219:19, AR218:19, AR039:17, AR089:17, AR316:17, |
| | | | | AR185:15, AR104:14, AR277:14, AR055:13, AR282:12, AR240:12, AR300:12, AR283:11, |
| | | | | AR060:11 S0474:15, L0777:12, L0758:10, H0038:9, S0406:9, L0748:9, L0595:9, |
| | | | | L0439:8, H0040:7, H0521:7, L0740:7, L0779:7, L0747:6, L0749:6, L0659:5, H0599:4, |
| | | | | H0050:4, H0634:4, L0770:4, L0761:4, L0776:4, L0663:4, L0565:4, H0547:4, S0436:4, |
| | | | | L0605:4, H0427:3, H0673:3, H0068:3, L0662:3, L0766:3, L0666:3, H0696:3, H0436:3, |
| | | | | L0751:3, H0445:3, L0596:3, H0713:2, H0583:2, S0442:2, S0358:2, H0733:2, S0046:2, |
| | | | | H0749:2, S0132:2, H0619:2, L0717:2, H0586:2, H0013:2, H0618:2, H0253:2, S0010:2, |
| | | | | H0581:2, H0457:2, L0471:2, H0057:2, H0014:2, H0039:2, H0553:2, H0617:2, T0041:2, |
| | | | | L0769:2, L0794:2, L0649:2, L0775:2, L0805:2, L0655:2, L0665:2, S0374:2, H0520:2, |
| | | | | H0682:2, H0658:2, H0710:2, S0404:2, L0742:2, L0755:2, L0731:2, L0759:2, L0591:2, |
| | | | | L0593:2, H0543:2, H0624:1, H0265:1, H0685:1, S0342:1, S0134:1, S0116:1, H0341:1, |
| | | | | H0459:1, S0444:1, S0360:1, S0408:1, H0735:1, S0045:1, S0476:1, S0222:1, H0392:1, |
| | | | | H0415:1, H0592:1, H0486:1, L3385:1, T0109:1, H0635:1, L0021:1, H0098:1, H0575:1, |
| | | | | H0318:1, H0421:1, H0596:1, L0118:1, H0012:1, H0373:1, S6028:1, H0179:1, H0719:1, |
| | | | | H0416:1, H0687:1, H0252:1, H0328:1, H0622:1, H0032:1, S0366:1, S0036:1, H0090:1, |
| | | | | H0591:1, H0616:1, H0412:1, H0623:1, H0059:1, H0641:1, S0344:1, L0369:1, L0763:1, |
| | | | | L0796:1, L0637:1, L5566:1, L0372:1, L0764:1, L0364:1, L0774:1, L0378:1, L0379:1, |
| | | | | L0657:1, L0526:1, L0664:1, H0144:1, H0519:1, H0593:1, H0689:1, H0659:1, H0672:1, |
| | | | | S0328:1, S0152:1, H0522:1, S0390:1, S0032:1, L0750:1, L0756:1, L0786:1, S0031:1, |
| | | | | S0434:1, L0584:1, L0608:1, L0601:1, S0194:1, S0196:1 and S0456:1. |
| 350 | HTXBD09 | 839429 | 360 | AR219:10, AR218:9, AR313:8, AR240:7, AR277:7, AR316:7, AR055:6, AR282:6, |
| | | | | AR096:6, AR039:6, AR089:6, AR060:6, AR185:5, AR299:5, AR300:5, AR104:5, AR283:4 |
| | | | | L0439:9, L0751:7, L0662:3, L0766:3, L0665:3, L0757:3, S0007:2, H0050:2, L0770:2, |
| | | | | L0769:2, L0764:2, L0774:2, L0776:2, L0663:2, S0053:2, L0750:2, L0756:2, L0731:2, |
| | | | | L0601:2, H0265:1, S0116:1, H0661:1, L0717:1, L0622:1, H0486:1, H0545:1, H0150:1, |
| | | | | H0553:1, L0055:1, H0038:1, H0634:1, H0413:1, S0438:1, S0144:1, L0520:1, L0762:1, |
| | | | | L0763:1, L0363:1, L0654:1, L0783:1, L0809:1, L0664:1, H0435:1, H0753:1, H0555:1, |
| | | | | L0740:1, L0747:1, L0749:1, L0777:1, L0758:1, L0597:1 and L0595:1. |
| 351 | HTXDB22 | 853407 | 361 | AR218:18, AR219:16, AR096:14, AR313:12, AR316:11, AR039:10, AR299:10, AR104:10, |
| | | | | AR089:9, AR055:9, AR060:8, AR185:8, AR300:7, AR240:6, AR277:6, AR282:5, AR283:4 |
| | | | | H0271:16, S0422:15, L0777:11, H0179:10, L0766:9, S0360:8, H0521:7, L0752:7, |
| | | | | H0584:6, H0457:6, H0423:6, S0356:5, S0474:5, L0770:5, L0776:5, H0659:5, L0748:5, |
| | | | | L0779:5, H0749:4, H0581:4, H0617:4, L0521:4, L0655:4, L0663:4, S0328:4, L0754:4, |
| | | | | L0749:4, L0756:4, S0242:4, H0265:3, H0585:3, S0418:3, S0444:3, H0747:3, H0674:3, |
| | | | | S0426:3, L0662:3, L0438:3, S0126:3, L0439:3, L0731:3, H0543:3, H0422:3, H0624:2, |
| | | | | H0556:2, H0657:2, H0255:2, S0420:2, S0442:2, S0408:2, H0455:2, H0497:2, L3816:2, |
| | | | | H0486:2, H0318:2, H0545:2, H0150:2, S0003:2, S0214:2, H0087:2, H0100:2, S0440:2, |
| | | | | S0144:2, S0002:2, L0598:2, H0529:2, L0769:2, L0638:2, L0768:2, L0527:2, L0659:2, |
| | | | | L0518:2, L0666:2, L0665:2, S0052:2, S0216:2, H0522:2, L0747:2, L0755:2, S0026:2, |
| | | | | S0194:2, H0167:1, S0470:1, S0040:1, H0713:1, H0294:1, T0049:1, S0134:1, S0218:1, |
| | | | | H0656:1, S0116:1, H0341:1, S0180:1, L3659:1, H0638:1, S0354:1, S0376:1, L3649:1, |
| | | | | H0580:1, H0729:1, H0742:1, H0730:1, S0476:1, L3388:1, H0351:1, S6014:1, H0574:1, |
| | | | | L0586:1, H0013:1, H0250:1, H0156:1, L0021:1, H0309:1, H0263:1, H0231:1, L0738:1, |
| | | | | H0544:1, H0046:1, L0471:1, H0057:1, H0015:1, H0373:1, H0083:1, H0375:1, H0719:1, |
| | | | | H0687:1, H0290:1, S0250:1, T0006:1, H0030:1, H0553:1, H0032:1, H0673:1, H0169:1, |
| | | | | L0455:1, H0316:1, H0090:1, H0591:1, H0040:1, H0634:1, H0059:1, H0102:1, T0042:1, |
| | | | | H0494:1, S0438:1, H0132:1, S0142:1, UNKWN:1, L0520:1, L0640:1, L0763:1, L0637:1, |
| | | | | L5565:1, L0761:1, L0373:1, L0372:1, L0648:1, L0767:1, L0794:1, L0803:1, L0774:1, |
| | | | | L0775:1, L0378:1, L0806:1, L0805:1, L0657:1, L0635:1, L0526:1, L0809:1, L0532:1, |
| | | | | L0664:1, S0428:1, S0053:1, L3827:1, H0520:1, H0547:1, H0690:1, H0682:1, H0672:1, |
| | | | | S0378:1, H0696:1, H0694:1, H0134:1, S0406:1, H0436:1, H0576:1, H0479:1, H0627:1, |
| | | | | H0631:1, L0740:1, L0745:1, L0757:1, L0758:1, S0031:1, H0343:1, S0436:1, L0605:1, |
| | | | | L0592:1, L0485:1, S0011:1, H0136:1, S0196:1, H0542:1, L0698:1, S0460:1, H0506:1, |
| | | | | L3630:1 and H0352:1. |
| 352 | HTXDC38 | 801935 | 362 | AR170:25, AR168:18, AR104:14, AR253:13, AR243:12, AR171:12, AR169:11, AR215:11, |
| | | | | AR254:11, AR239:10, AR060:10, AR250:10, AR225:10, AR055:10, AR204:9, AR238:9, |
| | | | | AR161:9, AR162:9, AR061:9, AR172:9, AR242:9, AR163:9, AR214:9, AR246:9, AR185:8, |
| | | | | AR231:8, AR205:8, AR165:8, AR309:8, AR282:8, AR240:8, AR164:8, AR217:8, AR166:7, |
| | | | | AR216:7, AR193:7, AR275:7, AR201:7, AR316:7, AR237:7, AR210:7, AR227:7, AR235:6, |
| | | | | AR180:6, AR229:6, AR300:6, AR226:6, AR198:6, AR233:6, AR096:6, AR224:6, AR089:6, |
| | | | | AR197:6, AR195:6, AR247:6, AR228:6, AR296:6, AR192:6, AR245:6, AR178:6, AR269:6, |
| | | | | AR234:5, AR266:5, AR299:5, AR039:5, AR230:5, AR218:5, AR232:5, AR271:5, AR183:5, |
| | | | | AR181:5, AR312:5, AR272:5, AR173:5, AR176:5, AR221:5, AR177:5, AR270:5, AR268:5, |
| | | | | AR223:5, AR053:5, AR293:5, AR182:4, AR313:4, AR212:4, AR219:4, AR291:4, AR199:4, |
| | | | | AR289:4, AR288:4, AR274:4, AR308:4, AR264:4, AR290:4, AR257:4, AR277:4, AR267:4, |
| | | | | AR261:4, AR311:4, AR174:4, AR283:4, AR189:4, AR255:3, AR287:3, AR294:3, AR203:3, |
| | | | | AR297:3, AR285:3, AR207:3, AR211:3, AR295:3, AR175:3, AR188:3, AR262:3, AR179:3, |
| | | | | AR222:3, AR213:3, AR200:3, AR190:3, AR286:3, AR033:2, AR196:2, AR191:2, AR258:2, |
| | | | | AR236:2, AR260:2, AR256:1 S0406:9, L0755:6, L0769:4, H0009:3, H0012:3, L0783:3, |
| | | | | L0749:3, L0750:3, L0779:3, L0731:3, S0442:2, S0376:2, S0410:2, S0051:2, H0606:2, |
| | | | | H0100:2, S0440:2, L0638:2, L0665:2, S0028:2, L0751:2, L0747:2, L0756:2, L0758:2, |
| | | | | L0603:2, H0265:1, H0294:1, H0341:1, S0212:1, L3659:1, S0444:1, S0408:1, H0742:1, |
| | | | | S0045:1, H0393:1, H0549:1, S0222:1, H0586:1, H0331:1, L0623:1, T0060:1, H0581:1, |
| | | | | S0049:1, H0309:1, H0545:1, L0471:1, H0620:1, H0024:1, H0266:1, H0428:1, H0213:1, |
| | | | | L0456:1, S0366:1, S0036:1, H0040:1, S0142:1, L0763:1, L0371:1, L0772:1, L0372:1, |
| | | | | L0646:1, L0764:1, L0773:1, L0766:1, L0774:1, L0775:1, L0776:1, L0809:1, L0519:1, |
| | | | | L2263:1, H0520:1, H0519:1, S0126:1, H0660:1, H0710:1, S0350:1, H0436:1, S3012:1, |
| | | | | L0752:1, L0757:1, S0436:1, L0592:1, S0276:1 and H0422:1. |
| 353 | HTXDC77 | 844258 | 363 | AR096:676, AR240:444, AR039:281, AR316:255, AR219:252, AR218:219, AR089:164, |
| | | | | AR313:162, AR299:150, AR300:141, AR185:127, AR282:113, AR055:113, AR060:110, |
| | | | | AR283:94, AR104:88, AR277:62 S0344:14,50212:4, S0372:4, H0555:4, H0581:3, |
| | | | | S0376:2, H0597:2, H0265:1, S0360:1, S0222:1, H0046:1, H0264:1, S0370:1, S0144:1, |
| | | | | S0142:1, H0521:1 and S0027:1. |
| 354 | HTXDG92 | 658730 | 364 | AR218:44, AR277:37, AR283:37, AR219:35, AR055:31, AR316:30, AR089:29, AR104:23, |
| | | | | AR299:21, AR240:20, AR313:20, AR039:19, AR282:19, AR185:19, AR096:18, AR060:17, |
| | | | | AR300:17 L0777:11, H0618:7, L0438:6, H0144:5, L0758:5, S0410:4, H0059:4, |
| | | | | L0601:4, H0556:3, H0253:3, H0052:3, H0620:3, H0617:3, L0764:3, L0768:3, L0744:3, |
| | | | | L0747:3, H0265:2, H0341:2, S0046:2, S0222:2, H0013:2, H0069:2, S0049:2, H0150:2, |
| | | | | H0087:2, L0351:2, L0771:2, L0766:2, L0665:2, H0547:2, H0659:2, L0748:2, L0439:2, |
| | | | | L0754:2, L0749:2, H0542:2, L3643:1, S0040:1, H0717:1, H0716:1, S0114:1, T0049:1, |
| | | | | H0583:1, H0657:1, H0656:1, H0381:1, H0663:1, S0358:1, H0734:1, S0007:1, H0747:1, |
| | | | | S0278:1, H0261:1, H0550:1, H0392:1, H0486:1, T0114:1, S0010:1, H0581:1, H0374:1, |
| | | | | H0327:1, H0545:1, H0457:1, H0012:1, H0024:1, H0015:1, H0510:1, H0594:1, H0188:1, |
| | | | | H0292:1, H0286:1, H0622:1, H0181:1, H0135:1, H0040:1, H0063:1, H0100:1, T0041:1, |
| | | | | H0561:1, S0440:1, H0509:1, H0529:1, L0640:1, L0770:1, L0769:1, L3905:1, L5566:1, |
| | | | | L0773:1, L0662:1, L0363:1, L0774:1, L0775:1, L0806:1, L0559:1, L0783:1, L0383:1, |
| | | | | L5623:1, H0698:1, S0374:1, H0520:1, H0519:1, S0292:1, S0126:1, H0682:1, S0380:1, |
| | | | | H0696:1, S0027:1, L0740:1, L0731:1, H0445:1, L0605:1, L0592:1 and H0543:1. |
| 355 | HTXET11 | 581521 | 365 | AR240:7, AR055:6, AR060:5, AR283:5, AR282:5, AR300:4, AR218:4, AR277:4, AR089:3, |
| | | | | AR185:3, AR104:3, AR039:3, AR096:3, AR316:3, AR313:2, AR299:2, AR219:2 H0265:1 |
| | | | | and S0442:1. |
| 356 | HTXJY08 | 637774 | 366 | AR055:2, AR060:2, AR300:2, AR299:2, AR313:2, AR185:1, AR282:1, AR089:1, AR039:1, |
| | | | | AR316:1, AR219:1 H0556:1, S0442:1, H0036:1, H0590:1, H0024:1, H0100:1, L0769:1, |
| | | | | L0667:1, L0438:1, L0740:1 and L0777:1. |
| 357 | HTXKF95 | 834438 | 367 | AR266:6, AR309:6, AR178:6, AR176:5, AR162:5, AR161:5, AR163:5, AR282:5, AR096:5, |
| | | | | AR312:5, AR104:5, AR053:5, AR271:4, AR185:4, AR060:4, AR055:4, AR183:4, AR308:4, |
| | | | | AR246:4, AR168:4, AR181:4, AR269:4, AR229:4, AR192:4, AR263:4, AR175:4, AR274:4, |
| | | | | AR193:4, AR225:4, AR165:4, AR267:4, AR182:4, AR164:4, AR316:4, AR213:4, AR228:4, |
| | | | | AR166:4, AR242:3, AR240:3, AR270:3, AR272:3, AR212:3, AR264:3, AR283:3, AR243:3, |
| | | | | AR275:3, AR313:3, AR179:3, AR235:3, AR268:3, AR239:3, AR293:3, AR237:3, AR171:3, |
| | | | | AR180:3, AR289:3, AR173:3, AR215:3, AR172:3, AR089:3, AR231:3, AR210:2, AR061:2, |
| | | | | AR290:2, AR230:2, AR201:2, AR233:2, AR204:2, AR196:2, AR277:2, AR223:2, AR226:2, |
| | | | | AR299:2, AR177:2, AR190:2, AR247:2, AR300:2, AR296:2, AR257:2, AR285:2, AR222:2, |
| | | | | AR033:2, AR200:2, AR039:2, AR191:2, AR311:2, AR199:2, AR297:2, AR291:2, AR288:2, |
| | | | | AR203:2, AR227:2, AR232:2, AR188:2, AR294:2, AR236:2, AR255:2, AR189:2, AR286:2, |
| | | | | AR260:2, AR238:2, AR211:2, AR174:2, AR287:1, AR234:1, AR261:1, AR256:1, AR216:1, |
| | | | | AR262:1, AR252:1 L0754:41, L0747:8, L0755:5, L0659:4, H0265:2, H0556:2, H0586:2, |
| | | | | L0471:2, H0553:2, L0764:2, L0662:2, L0794:2, L0748:2, L0751:2, L0749:2, L0750:2, |
| | | | | H0305:1, S0358:1, S0046:1, H0441:1, H0599:1, H0569:1, H0050:1, H0051:1, H0030:1, |
| | | | | H0124:1, H0616:1, L0770:1, L0769:1, L0800:1, L0644:1, L0363:1, L0803:1, L0804:1, |
| | | | | L0775:1, L0806:1, L0783:1, L0666:1, L0665:1, H0144:1, H0555:1, S3012:1, L0779:1, |
| | | | | L0731:1, L0605:1, L0599:1, L0603:1, H0543:1, H0422:1 and H0506:1. |
| 358 | HTXLT36 | 843477 | 368 | AR218:8, AR240:7, AR313:7, AR060:7, AR055:7, AR089:6, AR096:6, AR104:6, AR185:6, |
| | | | | AR299:6, AR316:5, AR300:5, AR219:5, AR039:5, AR282:5, AR277:3, AR283:3 H0250:2, |
| | | | | H0477:2, L0804:2, L0791:2, H0660:2, S0406:2, L0758:2, H0171:1, H0556:1, H0713:1, |
| | | | | H0717:1, T0049:1, L0760:1, S0356:1, H0747:1, H0587:1, L3653:1, H0013:1, H0635:1, |
| | | | | H0081:1, S0003:1, H0135:1, H0090:1, T0042:1, L0065:1, S0440:1, S0422:1, L0520:1, |
| | | | | L0766:1, L0655:1, L4501:1, L0665:1, H0539:1, L0747:1, L0749:1, L0757:1, L0759:1, |
| | | | | H0423:1, H0422:1 and H0352:1. |
| 359 | HTXMZ07 | 834881 | 369 | AR277:20, AR104:8, AR060:7, AR055:7, AR316:6, AR283:6, AR240:6, AR300:5, |
| | | | | AR299:5, AR096:5, AR282:5, AR218:5, AR185:4, AR039:4, AR313:3, AR089:3, AR219:3 |
| | | | | L0439:6, H0556:3, S0007:2, H0253:2, L0744:2, L0740:2, L0731:2, H0583:1, H0656:1, |
| | | | | S0442:1, H0069:1, L0021:1, H0618:1, H0581:1, H0041:1, H0488:1, L0770:1, L0800:1, |
| | | | | L0766:1, L0803:1, L0375:1, L0807:1, L0382:1, L0791:1, L0793:1, L0352:1, S0432:1, |
| | | | | L0741:1 and L0779:1. |
| 360 | HUFCL31 | 801938 | 370 | AR060:26, AR240:10, AR300:9, AR096:9, AR316:8, AR299:8, AR089:8, AR218:7, |
| | | | | AR313:5, AR219:5, AR283:5, AR055:4, AR039:4, AR104:4, AR185:3, AR282:3, AR277:2 |
| | | | | L0764:5, L0771:5, H0506:4, L0374:3, S0434:3, S0356:1, S0410:1, H0264:1, L0372:1, |
| | | | | L0783;1, L0532:1 and L0663:1. |
| 361 | HUKBT67 | 844446 | 371 | AR089:13, AR104:13, AR055:12, AR313:12, AR282:12, AR240:11, AR299:11, AR283:10, |
| | | | | AR096:10, AR060:9, AR316:9, AR185:9, AR039:9, AR300:8, AR277:8, AR218:8, AR219:7 |
| | | | | S0360:8, L0748:8, L0659:6, L0665:6, L0759:6, L0789:5, L0743:5, S0346:4, L0662:4, |
| | | | | L0805:4, L0752:4, H0749:3, L0717:3, H0644:3, L0761:3, L0776:3, S0028:3, L0744:3, |
| | | | | L0754:3, L0749:3, L0757:3, S0010:2, H0059:2, L3905:2, L0771:2, L0804:2, L0774:2, |
| | | | | L0806:2, L0809:2, L0664:2, L0747:2, L0758:2, H0656:1, S0001:1, H0734:1, H0619:1, |
| | | | | L3388:1, H0392:1, H0592:1, H0574:1, T0082:1, H0581:1, H0052:1, H0544:1, H0009:1, |
| | | | | H0081:1, H0620:1, H0286:1, H0591:1, H0038:1, T0004:1, H0386:1, S0144:1, S0344:1, |
| | | | | L0763:1, L0667:1, L0764:1, L0773:1, L0794:1, L0766:1, L0803:1, L0650:1, L0657:1, |
| | | | | L5622:1, L0793:1, L0666:1, H0144:1, L0352:1, H0660:1, H0672:1, S0328:1, H0696:1, |
| | | | | S0404:1, S0406:1, L0742:1, L0750:1, L0779:1, L0731:1, S0031:1, L0596:1 and |
| | | | | L0604:1. |
| 362 | HUKDF20 | 566823 | 372 | AR055:7, AR218:6, AR060:6, AR300:5, AR282:4, AR104:4, AR313:4, AR283:4, |
| | | | | AR185:4, AR299:4, AR277:3, AR219:3, AR089:3, AR316:3, AR039:3, AR240:3, AR096:2 |
| | | | | H0261:1, H0266:1 and H0059:1. |
| 363 | HUKDY82 | 570896 | 373 | AR039:36, AR313:36, AR299:19, AR277:17, AR096:15, AR185:14, AR089:14, AR300:14, |
| | | | | AR104:14, AR218:12, AR219:11, AR316:11, AR240:8, AR060:8, AR055:8, AR282:8, |
| | | | | AR283:5 S0053:4, H0556:3, H0673:3, H0618:2, H0083:2, H0179:2, H0674:2, S0216:2, |
| | | | | T0002:1, S0134:1, S0116:1, L3645:1, H0550:1, H0409:1, H0069:1, H0427:1, H0271:1, |
| | | | | H0090:1, H0634:1, H0059:1, S0052:1, S0428:1, H0144:1, S0152:1, H0576:1 and |
| | | | | S0031:1. |
| 364 | HUSCJ14 | 894699 | 374 | AR239:10, AR228:10, AR227:9, AR237:9, AR230:8, AR233:8, AR287:8, AR203:7, |
| | | | | AR288:7, AR176:6, AR184:6, AR199:6, AR229:6, AR215:6, AR190:6, AR200:5, AR245:5, |
| | | | | AR174:5, AR234:5, AR191:5, AR180:4, AR297:4, AR232:4, AR226:4, AR289:4, AR298:4, |
| | | | | AR194:4, AR170:4, AR257:4, AR061:3, AR292:3, AR173:3, AR231:3, AR262:3, AR242:3, |
| | | | | AR284:3, AR286:3, AR251:3, AR179:3, AR236:3, AR238:3, AR255:3, AR161:3, AR189:3, |
| | | | | AR162:3, AR235:3, AR293:3, AR282:3, AR188:3, AR294:3, AR165:3, AR163:3, AR164:3, |
| | | | | AR166:3, AR285:2, AR201:2, AR181:2, AR295:2, AR177:2, AR247:2, AR290:2, AR205:2, |
| | | | | AR300:2, AR225:2, AR260:2, AR198:2, AR261:2, AR193:2, AR291:2, AR268:2, AR175:2, |
| | | | | AR270:2, AR183:2, AR211:2, AR296:2, AR196:2, AR185:2, AR258:2, AR250:2, AR240:2, |
| | | | | AR178:2, AR204:2, AR195:2, AR060:2, AR312:1, AR311:1, AR210:1, AR224:1, AR243:1, |
| | | | | AR299:1, AR269:1, AR316:1, AR275:1, AR186:1, AR172:1, AR039:1, AR267:1, AR256:1, |
| | | | | AR263:1, AR055:1, AR089:1, AR217:1 L2654:6, L0741:4, S0192:4, H0677:4, H0556:3, |
| | | | | H0013:3, H0052:3, L0766:3, L0744:3, L0439:3, L0757:3, H0265:2, S0040:2, S0410:2, |
| | | | | H0599:2, H0545:2, H0266:2, H0030:2, H0135:2, L3905:2, L5622:2, H0520:2, H0547:2, |
| | | | | H0519:2, L0748:2, L0756:2, L0777:2, L0780:2, L0758:2, L0485:2, L0604:2, H0739:1, |
| | | | | H0713:1, S0134:1, S0218:1, H0656:1, L2909:1, S0212:1, H0663:1, S0420:1, L1562:1, |
| | | | | S0360:1, S0408:1, H0742:1, S0132:1, S0476:1, H0393:1, H0587:1, T0040:1, H0575:1, |
| | | | | H0309:1, H0009:1, L0471:1, H0620:1, H0510:1, H0290:1, S0250:1, S0022:1, T0023:1, |
| | | | | H0488:1, H0268:1, T0041:1, T0042:1, H0538:1, S0210:1, L0763:1, L0800:1, L0771:1, |
| | | | | L0794:1, L0804:1, L0774:1, L0775:1, L5623:1, L0793:1, L2652:1, L2257:1, L2260:1, |
| | | | | L0710:1, L2262:1, H0144:1, H0593:1, H0435:1, H0521:1, H0555:1, L0743:1, L0754:1, |
| | | | | L0779:1, L0752:1, S0031:1, S0436:1, L0596:1, L0605:1, L0601:1, S0106:1, H0667:1, |
| | | | | S0276:1 and L3576:1. |
| 365 | HUSGL67 | 792637 | 375 | AR252:82, AR250:77, AR253:70, AR222:49, AR219:44, AR218:40, AR254:37, AR169:32, |
| | | | | AR171:31, AR168:30, AR214:28, AR217:27, AR221:25, AR215:22, AR309:22, AR096:21, |
| | | | | AR316:20, AR170:20, AR216:19, AR172:18, AR223:18, AR264:17, AR224:16, AR308:16, |
| | | | | AR312:15, AR263:15, AR183:14, AR268:13, AR313:13, AR039:13, AR225:12, AR311:11, |
| | | | | AR180:10, AR291:10, AR271:10, AR181:9, AR269:9, AR240:9, AR177:9, AR176:9, |
| | | | | AR242:8, AR299:8, AR229:8, AR213:8, AR173:8, AR290:8, AR235:8, AR247:8, AR179:8, |
| | | | | AR243:7, AR270:7, AR266:7, AR182:7, AR238:7, AR178:7, AR245:7, AR189:7, AR053:7, |
| | | | | AR246:6, AR267:6, AR272:6, AR190:6, AR089:6, AR165:6, AR175:6, AR193:6, AR275:6, |
| | | | | AR164:6, AR162:6, AR166:6, AR261:6, AR212:6, AR161:6, AR163:5, AR289:5, AR300:5, |
| | | | | AR174:5, AR211:5, AR199:5, AR234:5, AR197:5, AR297:5, AR200:5, AR210:5, AR296:5, |
| | | | | AR282:5, AR295:5, AR237:5, AR198:5, AR283:4, AR204:4, AR287:4, AR231:4, AR191:4, |
| | | | | AR288:4, AR285:4, AR230:4, AR257:4, AR274:4, AR055:4, AR033:4, AR195:4, AR061:4, |
| | | | | AR188:4, AR196:4, AR236:4, AR293:4, AR294:3, AR185:3, AR104:3, AR239:3, AR286:3, |
| | | | | AR226:3, AR203:3, AR277:3, AR060:3, AR205:3, AR262:3, AR255:3, AR228:3, AR201:3, |
| | | | | AR256:3, AR260:2, AR233:2, AR258:2, AR232:2, AR227:2, AR192:1 S0358:2, S0116:1, |
| | | | | S0360:1, S0045:1, H0497:1, H0486:1, H0250:1, S0010:1, S0474:1, H0266:1, H0271:1, |
| | | | | T0006:1, H0412:1, L3815:1, L0766:1, L2258:1, H0710:1, H0518:1, S3014:1 and |
| | | | | H0543:1. |
| 366 | HUSGU40 | 684975 | 376 | AR218:67, AR219:57, AR096:53, AR240:49, AR283:44; AR313:43, AR316:37, AR089:33, |
| | | | | AR039:32, AR185:29, AR277:25, AR282:24, AR104:24, AR060:23, AR299:23, AR300:22, |
| | | | | AR055:19 |
| 367 | HUSIR18 | 762858 | 377 | L0748:4, H0622:3, L0777:3, H0624:2, H0013:2, H0520:2, H0539:2, L0439:2, L0754:2, |
| | | | | L0747:2, L0757:2, L0758:2, L0593:2, L0002:1, H0664:1, H0580:1, S0007:1, H0497:1, |
| | | | | H0333:1, H0599:1, H0581:1, L0483:1, H0598:1, H0040:1, H0412:1, L0351:1, T0041:1, |
| | | | | L0769:1, L0771:1, L0662:1, L0767:1, L0768:1, L0766:1, L0381:1, L0806:1, L0656:1, |
| | | | | L0659:1, L0809:1, L0663:1, L0665:1, H0672:1, S0152:1, L0740:1, L0749:1, L0750:1, |
| | | | | L0779:1, L0752:1, L0480:1, L0591:1 and H0543:1. |
| 368 | HUVDJ48 | 564853 | 378 | AR055:6, AR060:5, AR283:5, AR039:5, AR185:4, AR096:4, AR240:4, AR104:4, AR299:4, |
| | | | | AR300:3, AR089:3, AR316:3, AR313:3, AR282:3, AR218:2, AR277:2, AR219:2 H0393:1, |
| | | | | H0056:1 and L0662:1. |
| 369 | HWAAI12 | 830432 | 379 | AR282:10, AR313:9, AR104:7, AR089:5, AR300:4, AR096:4, AR185:4, AR316:4, |
| | | | | AR240:3, AR299:3, AR060:2, AR219:2, AR283:2, AR218:2, AR039:2, AR277:2, AR055:2 |
| | | | | L0794:10, H0251:9, H0547:9, L0439:8, L0731:8, L0747:7, L0438:6, H0351:5, |
| | | | | L0750:5, S0356:4, L0769:4, L0768:4, L0766:4, L0805:4, L0809:4, L0777:4, L0758:4, |
| | | | | L0596:4, S0410:3, H0009:3, T0006:3, H0124:3, T0041:3, L0666:3, H0144:3, H0520:3, |
| | | | | S0028:3, L0742:3, L0749:3, H0543:3, H0661:2, H0305:2, S0360:2, L0103:2, H0013:2, |
| | | | | H0581:2, S0049:2, H0052:2, L0157:2, L0471:2, H0594:2, H0031:2, H0087:2, H0100:2, |
| | | | | T0042:2, S0344:2, H0529:2, L0763:2, L0761:2, L0662:2, L0803:2, L0806:2, L0664:2, |
| | | | | H0436:2, L0756:2, L0752:2, L0605:2, L0595:2, H0556:1, T0002:1, S0040:1, H0717:1, |
| | | | | H0716:1, H0294:1, S0134:1, H0341:1, H0402:1, S0354:1, S0007:1, H0747:1, L0717:1, |
| | | | | S0278:1, L0394:1, H0549:1, S0222:1, H0333:1, L0622:1, H0486:1, H0575:1, S0010:1, |
| | | | | H0085:1, H0597:1, H0545:1, H0566:1, H0620:1, H0271:1, H0687:1, H0615:1, H0622:1, |
| | | | | H0673:1, H0674:1, H0412:1, H0413:1, H0056:1, H0130:1, H0646:1, S0144:1, L0770:1, |
| | | | | L796:1, L0667:1, L0772:1, L0373:1, L0372:1, L0800:1, L0645:1, L0764:1, L0648:1, |
| | | | | L0767:1, L0650:1, L0657:1, L0517:1, L0789:1, L0790:1, L0665:1, H0690:1, H0658:1, |
| | | | | H0670:1, H0672:1, S0378:1, S0380:1, H0521:1, S3012:1, S0390:1, S0027:1, L0743:1, |
| | | | | L0779:1, L0755:1, L0759:1, S0031:1, S0436:1, L0601:1, H0136:1, S0276:1, H0542:1 |
| | | | | and S0424:1. |
| 370 | HWBBQ70 | 689121 | 380 | AR300:3, AR313:3, AR299:2, AR039:2, AR060:2, AR089:2, AR282:2, AR240:2, AR185:2, |
| | | | | AR316:2, AR277:2, AR055:2, AR096:2, AR104:1, AR283:1 L0717:2, H0580:1, S0222:1, |
| | | | | L0662:1, H0436:1, L0748:1, H0445:1 and S0308:1. |
| 371 | HWBBU75 | 780360 | 381 | L0665:4, H0457:3, H0264:3, L0766:3, H0521:3, L0745:3, H0556:2, H0580:2, S0352:2, |
| | | | | L0761:2, L0806:2, L0789:2, L0748:2, H0542:2, H0255:1, S0278:1, H0581:1, H0271:1, |
| | | | | H0719:1, H0413:1, H0494:1, S0002:1, S0426:1, L0769:1, L0774:1, H0660:1, L0750:1, |
| | | | | L0752:1, L0753:1 and S0424:1. |
| 372 | HWBCN36 | 722259 | 382 | AR104:3, AR185:3, AR039:2, AR055:2, AR282:2, AR300:2, AR060:1, AR096:1, AR089:1, |
| | | | | AR240:1, AR277:1, AR316:1 H0580:1 |
| 373 | HWBDJ08 | 762860 | 383 | AR313:31, AR039:30, AR096:19, AR218:18, AR316:17, AR300:17, AR219:16, AR299:13, |
| | | | | AR185:12, AR277:12, AR089:12, AR104:8, AR240:7, AR060:5, AR282:5, AR055:4, |
| | | | | AR283:1 L0794:7, H0556:4, S0414:4, L0779:4, H0031:3, S0216:3, H0265:2, H0220:2, |
| | | | | H0688:2, H0634:2, L0655:2, L0665:2, H0659:2, S0328:2, H0521:2, L0753:2, L0758:2, |
| | | | | H0422:2, S0114:1, H0300:1, S0356:1, S0360:1, H0580:1, S0046:1, H0643:1, L3655:1, |
| | | | | H0250:1, H0069:1, H0635:1, H0042:1, H0575:1, H0581:1, S0049:1, L0045:1, H0622:1, |
| | | | | H0644:1, H0641:1, S0002:1, L0763:1, L0653:1, L0776:1, L0793:1, L0777:1, L0755:1, |
| | | | | L0731:1, L0593:1 and H0542:1. |
| 374 | HWBFX16 | 827312 | 384 | AR185:370, AR104:325, AR039:250, AR055:245, AR060:184, AR300:176, AR089:172, |
| | | | | AR316:144, AR096:127, AR277:127, AR282:117, AR219:93, AR299:89, AR283:88, |
| | | | | AR313:86, AR218:58, AR240:58 S0114:1 and H0580:1. |
| 375 | HWDAC26 | 821335 | 385 | AR096:144, AR218:136, AR219:123, AR316:112, AR240:70, AR089:66, AR104:55, |
| | | | | AR313:49, AR060:49, AR185:48, AR299:46, AR039:41, AR055:35, AR283:22, AR282:22, |
| | | | | AR277:21, AR300:19, AR198:5, AR184:5, AR183:5, AR194:4, AR284:4, AR270:4, |
| | | | | AR229:4, AR269:3, AR292:3, AR310:3, AR182:3, AR265:3, AR175:3, AR238:3, AR293:3, |
| | | | | AR268:2, AR294:2, AR291:2, AR213:2, AR192:2, AR286:2, AR312:2, AR234:2, AR226:2, |
| | | | | AR296:2, AR249:2, AR186:2, AR177:2, AR053:2, AR290:2, AR285:2, AR227:2, AR258:2, |
| | | | | AR052:2, AR266:2, AR205:1, AR237:1, AR298:1, AR179:1, AR274:1, AR241:1, AR289:1, |
| | | | | AR233:1, AR247:1, AR295:1, AR256:1, AR280:1, AR259:1, AR231:1 H0580:1, S0300:1, |
| | | | | H0600:1, L0783:1, L0438:1, L0439:1 and L0758:1. |
| 376 | HWDAG96 | 796743 | 386 | AR060:28, AR219:25, AR104:24, AR185:23, AR299:23, AR316:22, AR055:21, AR218:20, |
| | | | | AR039:19, AR300:19, AR096:19, AR240:18, AR282:15, AR089:14, AR283:13, AR277:9, |
| | | | | AR313:9 H0556:19, L3659:16, H0265:15, S0440:11, S0418:10, L0755:9, S0420:8, |
| | | | | S0358:8, S0436:8, L0752:7, H0253:6, L0751:6, L0747:6, L0750:6, L0596:6, S0212:5, |
| | | | | H0618:5, H0545:5, H0012:5, H0617:5, H0413:5, S0406:5, L0740:5, L0601:5, H0295:4, |
| | | | | S0360:4, H0039:4, H0494:4, H0641:4, L0764:4, L0776:4, L0758:4, H0657:3, H0483:3, |
| | | | | S0356:3, S0376:3, S0408:3, S0346:3, H0040:3, S0344:3, L0637:3, H0658:3, H0660:3, |
| | | | | S0328:3, H0522:3, L0743:3, L0749:3, L0756:3, L0731:3, L0757:3, H0445:3, S0040:2, |
| | | | | H0713:2, H0294:2, H0341:2, H0484:2, H0661:2, H0305:2, H0125:2, L3645:2, H0580:2, |
| | | | | H0586:2, H0587:2, H0052:2, H0046:2, H0009:2, H0081:2, H0620:2, H0266:2, H0124:2, |
| | | | | H0135:2, H0551:2, H0100:2, L0646:2, L0768:2, L0774:2, L0806:2, L5623:2, H0547:2, |
| | | | | H0435:2, H0539:2, L0748:2, L0754:2, L0588:2, L0589:2, L0608:2, L0593:2, H0543:2, |
| | | | | S0384:2, H0170:1, H0140:1, L3643:1, H0716:1, H0740:1, H0650:1, H0656:1, H0254:1, |
| | | | | H0300:1, H0638:1, S0410:1, H0637:1, H0742:1, H0733:1, H0734:1, S0045:1, S0046:1, |
| | | | | S0476:1, H0619:1, S0278:1, S0222:1, H0600:1, H0497:1, H0632:1, H0559:1, H0013:1, |
| | | | | H0069:1, H0042:1, H0706:1, S0010:1, S0182:1, H0318:1, H0746:1, H0263:1, T0110:1, |
| | | | | H0024:1, H0416:1, H0292:1, H0286:1, S0250:1, H0622:1, L0194:1, L0483:1, T0006:1, |
| | | | | H0213:1, H0644:1, H0181:1, H0606:1, L0055:1, H0090:1, H0038:1, H0616:1, T0067:1, |
| | | | | H0488:1, H0412:1, H0056:1, T0041:1, T0042:1, L0475:1, H0396:1, S0144:1, S0142:1, |
| | | | | L3815:1, S0210:1, S0002:1, H0695:1, L0763:1, L0770:1, L0769:1, L0639:1, L0643:1, |
| | | | | L0662:1, L5622:1, L0666:1, L0663:1, L0665:1, L0710:1, H0698:1, L0438:1, H0519:1, |
| | | | | H0689:1, H0682:1, H0684:1, H0659:1, H0648:1, H0672:1, S0330:1, L0602:1, H0521:1, |
| | | | | S0044:1, H0134:1, H0478:1, H0626:1, S3014:1, S0027:1, S0028:1, S0206:1, L0745:1, |
| | | | | L0780:1, L0759:1, S0031:1, S0434:1, L0597:1, L0599:1, S0026:1, H0423:1, H0422:1, |
| | | | | S0424:1, H0506:1 and H0352:1. |
| 377 | HWDAJ01 | 794016 | 387 | AR282:2, AR060:2, AR055:2, AR185:2, AR283:1, AR104:1, AR316:1, AR039:1, AR218:1 |
| | | | | H0600:1 |
| 378 | HWHPB78 | 740778 | 388 | H0437:2, L0769:2, S0028:2, L0439:2, S0436:2, H0556:1, H0125:1, S0420:1, H0619:1, |
| | | | | H0587:1, H0635:1, H0253:1, H0318:1, H0744:1, H0052:1, H0009:1, H0172:1, H0266:1, |
| | | | | H0135:1, H0494:1, L3905:1, L0438:1, L3828:1, H0547:1, H0539:1, H0521:1, S0037:1, |
| | | | | L0593:1, H0506:1 and H0008:1. |
| 379 | HELGG84 | 851137 | 389 | AR218:39, AR219:33, AR299:7, AR104:6, AR055:5, AR313:4, AR300:4, AR185:4, |
| | | | | AR060:4, AR240:3, AR282:3, AR089:3, AR316:2, AR283:2, AR039:2, AR277:2, AR096:1 |
| | | | | L0750:5, S0045:2, S0212:1, H0742:1, S0300:1, S0010:1, H0505:1, S0049:1, H0266:1, |
| | | | | L0598:1, L0662:1, L0809:1, S0374:1, H0696:1, L0758:1 and S0434:1. |
| 380 | HILCA24 | 869856 | 390 | AR316:4, AR282:2, AR096:1, AR299:1, AR039:1 L0748:4, H0090:2, L0659:2, H0521:2, |
| | | | | L0777:2, L0608:2, H0543:2, T0002:1, S0114:1, L3658:1, S0358:1, S0408:1, L3649:1, |
| | | | | T0109:1, H0581:1, H0622:1, H0031:1, H0644:1, S0002:1, L0657:1, L0526:1, L0789:1, |
| | | | | L0664:1, S0380:1, H0522:1, L0749:1 and L0779:1. |
| 381 | HE2CA60 | 888705 | 391 | AR313:86, AR299:44, AR277:42, AR283:37, AR039:37, AR316:36, AR218:34, AR096:34, |
| | | | | AR219:34, AR089:32, AR185:32, AR104:30, AR282:23, AR300:23, AR055:22, AR060:16, |
| | | | | AR240:16 H0305:16, L0777:11, L0471:10, S0422:9, L0766:9, H0624:8, H0013:7, |
| | | | | H0170:6, L2551:6, H0046:6, L0665:6, L0598:5, L0662:5, L0776:5, H0547:5, L0758:5, |
| | | | | L0589:5, H0171:4, L0659:4, L0666:4, L0663:4, L0756:4, L0731:4, S0358:3, L2744:3, |
| | | | | L3655:3, H0581:3, H0457:3, S0406:3, L0744:3, L0439:3, L0752:3, S0436:3, H0542:3, |
| | | | | H0543:3, L3643:2, H0650:2, H0657:2, S0116:2, S0442:2, S0354:2, L0717:2, S0414:2, |
| | | | | H0486:2, T0040:2, H0318:2, H0421:2, H0428:2, H0553:2, H0090:2, H0040:2, H0063:2, |
| | | | | H0641:2, L0769:2, L0761:2, L0764:2, L0650:2, L0774:2, L0805:2, L0657:2, H0144:2, |
| | | | | L3811:2, L3832:2, H0521:2, S0404:2, L0741:2, L0740:2, L0747:2, L0759:2, S0434:2, |
| | | | | L0362:2, H0685:1, S0218:1, L0785:1, H0341:1, H0255:1, H0663:1, H0662:1, H0402:1, |
| | | | | S0376:1, S0360:1, S0410:1, L3645:1, L3646:1, H0637:1, H0741:1, H0722:1, H0735:1, |
| | | | | S0046:1, H0749:1, S0300:1, L2758:1, L2767:1, L3388:1, S0222:1, H0592:1, H0586:1, |
| | | | | H0587:1, H0559:1, L3653:1, H0427:1, L0021:1, H0037:1, H0746:1, H0263:1, H0544:1, |
| | | | | H0050:1, H0057:1, L0163:1, H0051:1, S0022:1, H0328:1, T0023:1, H0673:1, H0674:1, |
| | | | | H0591:1, H0038:1, H0551:1, T0067:1, H0100:1, L0065:1, S0440:1, H0649:1, H0529:1, |
| | | | | L0369:1, L0763:1, L0667:1, L0630:1, L0372:1, L0521:1, L0533:1, L0775:1, L0651:1, |
| | | | | L0806:1, L0655:1, L0661:1, L0807:1, L0656:1, L0809:1, L3872:1, L0790:1, L0664:1, |
| | | | | L2655:1, L3663:1, S0374:1, L2706:1, H0520:1, H0435:1, H0660:1, H0672:1, S0328:1, |
| | | | | H0539:1, S0380:1, H0753:1, S0004:1, H0696:1, L0748:1, L0754:1, L0750:1, L0753:1, |
| | | | | S0031:1, H0444:1, L0588:1, L0605:1, L0485:1, H0216:1, S0242:1, H0423:1, S0458:1 |
| | | | | and H0721:1. |
| 382 | HLWAU42 | 695737 | 392 | AR055:57, AR060:56, AR185:55, AR299:45, AR283:43, AR089:41, AR282:37, AR104:35, |
| | | | | AR316:31, AR300:25, AR039:24, AR096:23, AR240:22, AR313:22, AR277:22, AR218:16, |
| | | | | AR219:9 L0740:8, H0486:5, L0439:5, H0733:4, L0606:4, L0731:4, H0553:3, S0422:3, |
| | | | | H0672:3, H0696:3, L0747:3, H0581:2, H0428:2, H0169:2, L0774:2, L0518:2, L0438:2, |
| | | | | H0436:2, L0744:2, L0779:2, L0752:2, S0436:2, L0362:2, S0242:2, S0412:2, S0040:1, |
| | | | | H0713:1, H0656:1, H0341:1, H0661:1, H0459:1, S0444:1, S0360:1, H0729:1, H0728:1, |
| | | | | H0734:1, L0717:1, H0411:1, S0278:1, H0431:1, H0592:1, H0587:1, H0331:1, H0013:1, |
| | | | | H0156:1, H0599:1, L0105:1, H0015:1, H0051:1, H0355:1, S0022:1, H0030:1, H0031:1, |
| | | | | H0032:1, S0440:1, H0509:1, H0132:1, H0646:1, S0210:1, L0770:1, L3905:1, L0766:1, |
| | | | | L0775:1, L0661:1, L0783:1, L0666:1, L0664:1, L0665:1, H0723:1, H0724:1, H0648:1, |
| | | | | S0330:1, S0044:1, S0028:1, L0743:1, L0756:1, L0755:1, L0759:1, H0595:1, S0192:1, |
| | | | | S0276:1, S0196:1 and H0423:1. |
| 383 | HGCAC19 | 851527 | 393 | AR219:2, AR316:2, AR096:1 L0794:15, L0803:12, L0766:7, H0013:6, H0090:6, |
| | | | | L0663:6, L0777:6, L0731:6, L0759:6, H0457:5, H0328:5, L0493:5, L0666:5, L0754:5, |
| | | | | L0749:5, H0543:5, H0656:4, S0358:4, H0615:4, L0665:4, H0521:4, L0779:4, L0588:4, |
| | | | | H0305:3, S0360:3, H0036:3, H0052:3, T0042:3, L0761:3, L0805:3, L0809:3, H0144:3, |
| | | | | H0670:3, H0696:3, L0591:3, S0134:2, H0657:2, L3659:2, S0418:2, S0442:2, S0007:2, |
| | | | | S0045:2, L0717:2, H0600:2, H0486:2, H0156:2, H0575:2, H0590:2, H0024:2, S0022:2, |
| | | | | L0483:2, H0135:2, H0038:2, H0560:2, S0422:2, L0457:2, H0529:2, L0625:2, L0648:2, |
| | | | | L0776:2, L0655:2, L0527:2, S0374:2, H0520:2, H0519:2, H0659:2, H0436:2, L0748:2, |
| | | | | L0745:2, L0581:2, L0361:2, H0542:2, H0423:2, S0424:2, H0624:1, H0171:1, H0556:1, |
| | | | | T0002:1, H0686:1, S0342:1, H0717:1, T0049:1, S0430:1, H0650:1, H0341:1, H0663:1, |
| | | | | H0589:1, S0356:1, S0376:1, S0408:1, S0410:1, L2336:1, H0329:1, S0046:1, H0645:1, |
| | | | | H0369:1, S6014:1, H0370:1, H0455:1, H0438:1, H0602:1, H0586:1, H0587:1, H0574:1, |
| | | | | H0559:1, S0280:1, L0021:1, H0318:1, S0474:1, H0263:1, T0115:1, H0545:1, L0157:1, |
| | | | | H0123:1, L0471:1, H0015:1, S0388:1, S0051:1, H0375:1, H0271:1, H0188:1, S0312:1, |
| | | | | S0003:1, H0688:1, H0039:1, H0622:1, H0031:1, H0644:1, L0055:1, H0169:1, L0456:1, |
| | | | | H0163:1, H0634:1, H0551:1, H0379:1, H0488:1, H0279:1, L0475:1, S0352:1, H0652:1, |
| | | | | S0208:1, L0640:1, L0763:1, L0500:1, L0769:1, L0646:1, L0662:1, L0649:1, L0498:1, |
| | | | | L0804:1, L0650:1, L0784:1, L0806:1, L0653:1, L0606:1, L0515:1, L0659:1, L0526:1, |
| | | | | L0519:1, L0788:1, L0790:1, L0791:1, L0664:1, S0053:1, S0296:1, H0547:1, S0126:1, |
| | | | | H0682:1, H0684:1, H0658:1, H0660:1, H0672:1, S0380:1, H0518:1, H0525:1, S0044:1, |
| | | | | S0404:1, S0406:1, H0479:1, S0432:1, S3014:1, L0744:1, L0750:1, L0780:1, L0753:1, |
| | | | | L0604:1, S0106:1, S0242:1, S0196:1, S0452:1 and H0506:1. |
| 384 | HPQAX38 | 845752 | 394 | AR313:99, AR039:86, AR300:47, AR299:43, AR096:43, AR185:41, AR089:37, AR277:36, |
| | | | | AR104:30, AR240:30, AR219:29, AR316:28, AR218:23, AR282:20, AR060:19, AR055:12, |
| | | | | AR283:6 S0136:462 and H0413:1. |
| 385 | HTOJL95 | 762851 | 395 | AR313:24, AR039:22, AR096:13, AR299:13, AR300:11, AR185:11, AR218:10, AR219:10, |
| | | | | AR089:9, AR316:9, AR277:9, AR104:7, AR055:7, AR060:7, AR240:7, AR282:6, AR283:4 |
| | | | | H0264:5, S0114:3, S0134:2, S0428:2, H0381:1, H0255:1, H0402:1, H0339:1, H0581:1, |
| | | | | H0615:1, H0090:1, S0426:1, L0369:1, L0769:1, L0779:1, H0444:1 and H0445:1. |
| 386 | HTLIF12 | 901225 | 396 | AR277:72, AR283:62, AR282:57, AR219:50, AR313:45, AR089:43, AR316:42, AR218:40, |
| | | | | AR104:38, AR096:35, AR055:33, AR240:33, AR299:33, AR300:31, AR185:30, AR039:30, |
| | | | | AR060:25 H0616:14, H0038:12, H0618:6, H0253:5, L0758:5, L0768:4, H0411:2, |
| | | | | L0779:2, H0747:1, L0151:1, L0697:1 and S0398:1. |
| 387 | HTEED26 | 762846 | 397 | AR055:5, AR060:5, AR240:4, AR282:3, AR300:3, AR283:3, AR277:2, AR089:2, AR185:2, |
| | | | | AR218:2, AR299:2, AR316:2, AR313:1, AR104:1, AR039:1, AR096:1 H0038:3 |
| 388 | HPJBJ51 | 878609 | 398 | AR219:7, AR055:6, AR039:6, AR277:6, AR096:5, AR316:5, AR060:5, AR104:5, AR218:5, |
| | | | | AR185:5, AR282:5, AR299:4, AR300:4, AR240:4, AR313:4, AR283:4, AR089:3 S0152:1 |
| | | | | and H0521:1. |
| 389 | HOABP31 | 868327 | 399 | AR218:223, AR219:206, AR096:172, AR240:106, AR313:97, AR316:78, AR185:62, |
| | | | | AR039:55, AR104:54, AR299:44, AR300:41, AR089:39, AR055:32, AR282:30, AR277:24, |
| | | | | AR060:20, AR283:14 |
| 390 | HMCAZ04 | 668249 | 400 | AR219:29, AR218:27, AR240:25, AR039:21, AR316:20, AR096:16, AR089:15, AR299:13, |
| | | | | AR283:13, AR282:12, AR060:9, AR313:9, AR055:8, AR300:8, AR277:7, AR185:6, |
| | | | | AR104:4 S0410:22, S0408:18, S0476:15, S0132:14, H0584:9, S0358:9, S0002:8, |
| | | | | H0521:8, L3388:7, L0748:7, S0442:6, H0494:6, L0599:6, S0142:5, L0777:5, S0278:4, |
| | | | | L0483:4, L0775:4, L0659:4, H0543:4, S0444:3, H0733:3, H0046:3, H0284:3, H0039:3, |
| | | | | H0674:3, H0591:3, H0641:3, S0144:3, L0771:3, L0773:3, S0374:3, L0439:3, H0422:3, |
| | | | | H0677:3, H0556:2, T0002:2, H0657:2; S0212:2, S0360:2, H0574:2, H0486:2, H0635:2, |
| | | | | H0575:2, H0231:2, H0024:2, H0286:2, H0622:2, H0644:2, H0673:2, S0440:2, H0633:2, |
| | | | | S0426:2, L0764:2, L0766:2, L0774:2, L0651:2, L0655:2, L0664:2, H0593:2, H0658:2, |
| | | | | H0710:2, S0044:2, S0404:2, L0745:2, L0747:2, L0731:2, S0434:2, L0581:2, S0011:2, |
| | | | | S0276:2, H0423:2, H0506:2, H0171:1, H0167:1, H0713:1, H0716:1, H0656:1, S0298:1, |
| | | | | H0662:1, H0459:1, H0638:1, S0348:1, S0354:1, S0376:1, H0580:1, H0729:1, H0742:1, |
| | | | | H0722:1, H0734:1, H0208:1, S0045:1, H0632:1, H0075:1, H0156:1, H0042:1, H0036:1, |
| | | | | H0318:1, H0581:1, H0251:1, H0309:1, H0545:1, H0107:1, H0083:1, H0179:1, H0687:1, |
| | | | | H0292:1, S0214:1, H0031:1, H0628:1, H0617:1, L0055:1, H0032:1, H0316:1, H0090:1, |
| | | | | H0038:1, H0040:1, H0063:1, T0067:1, H0264:1, L0564:1, H0202:1, S0014:1, H0560:1, |
| | | | | S0372:1, H0649:1, S0344:1, L0640:1, L0371:1, L0770:1, L0667:1, L0765:1, L0803:1, |
| | | | | L0376:1, L0805:1, L0653:1, L0542:1, L0783:1, L0809:1, L0663:1, H0701:1, S0126:1, |
| | | | | H0689:1, H0672:1, S0328:1, H0539:1, L0602:1, H0522:1, S0406:1, H0187:1, H0727:1, |
| | | | | S0028:1, S0206:1, L0743:1, L0756:1, L0779:1, L0752:1, L0759:1, S0308:1, H0343:1, |
| | | | | S0436:1, L0485:1, L0601:1, H0653:1, S0196:1 and H0542:1. |
| 391 | HE8FC45 | 845672 | 401 | AR313:70, AR039:50, AR299:33, AR300:31, AR096:29, AR089:28, AR185:28, AR277:20, |
| | | | | AR219:20, AR316:19, AR240:18, AR218:16, AR104:15, AR282:14, AR060:14, AR055:10, |
| | | | | AR283:6 L0534:2, L0539:2, L0109:2, L0562:1, S0222:1, H0587:1, H0013:1, H0635:1, |
| | | | | H0615:1, H0477:1, H0264:1, T0042:1, L0766:1, L0379:1, L0365:1, S0053:1, L0758:1 |
| | | | | and H0543:1. |

[0105] Table 1C summarizes additional polynucleotides encompassed by the invention (including cDNA clones related to the sequences (Clone ID:), contig sequences (contig identifier (Contig ID:) contig nucleotide sequence identifiers (SEQ ID NO:X)), and genomic sequences (SEQ ID NO:B). The first column provides a unique clone identifier, “Clone ID:”, for a cDNA clone related to each contig sequence. The second column provides the sequence identifier, “SEQ ID NO:X”, for each contig sequence. The third column provides a unique contig identifier, “Contig ID:” for each contig sequence. The fourth column, provides a BAC identifier “BAC ID NO:A” for the BAC clone referenced in the corresponding row of the table. The fifth column provides the nucleotide sequence identifier, “SEQ ID NO:B” for a fragment of the BAC clone identified in column four of the corresponding row of the table. The sixth column, “Exon From-To”, provides the location (i.e., nucleotide position numbers) within the polynucleotide sequence of SEQ ID NO:B which delineate certain polynucleotides of the invention that are also exemplary members of polynucleotide sequences that encode polypeptides of the invention (e.g., polypeptides containing amino acid sequences encoded by the polynucleotide sequences delineated in column six, and fragments and variants thereof).

TABLE 1C

| cDNA | SEQ ID | CONTIG | BAC | SEQ ID | EXON |
|---|---|---|---|---|---|
| Clone ID | NO: X | ID: | ID: A | NO: B | From-To |
| H6BSF56 | 11 | 762968 | AC069362 | 845 | 1-131 |
| H6BSF56 | 11 | 762968 | AC027584 | 846 | 1-162 |
| H6BSF56 | 11 | 762968 | AC011101 | 847 | 1-100 |
| H6BSF56 | 11 | 762968 | AC073446 | 848 | 1-140 |
| H6BSF56 | 11 | 762968 | AC026556 | 849 | 1-114 |
| H6BSF56 | 11 | 762968 | AL136171 | 850 | 1-61 |
| H6BSF56 | 11 | 762968 | AC025975 | 851 | 1-136 |
| H6BSF56 | 11 | 762968 | AC073219 | 852 | 1-123 |
| H6BSF56 | 11 | 762968 | AL162741 | 853 | 1-45 |
| H6BSF56 | 11 | 762968 | AC027584 | 854 | 1-368 |
| H6BSF56 | 11 | 762968 | AC073446 | 855 | 1-52 |
| | | | | | 2626-2925 |
| H6BSF56 | 11 | 762968 | AL162741 | 856 | 1-102 |
| H6EEC72 | 12 | 889401 | AC012314 | 857 | 1-181 |
| | | | | | 1281-1463 |
| | | | | | 2719-2983 |
| | | | | | 3158-3411 |
| | | | | | 3804-6347 |
| | | | | | 6745-6879 |
| | | | | | 7118-7319 |
| | | | | | 7420-7521 |
| | | | | | 7859-8305 |
| | | | | | 8552-8602 |
| | | | | | 9988-10334 |
| | | | | | 10415-10778 |
| | | | | | 11003-11127 |
| | | | | | 11210-11303 |
| | | | | | 11334-11832 |
| | | | | | 13093-13145 |
| | | | | | 13703-13837 |
| | | | | | 13918-14152 |
| | | | | | 15415-15511 |
| | | | | | 15613-15742 |
| | | | | | 15998-16087 |
| | | | | | 16231-16307 |
| | | | | | 16447-17211 |
| | | | | | 18520-18796 |
| | | | | | 21777-22001 |
| H6EEC72 | 12 | 889401 | AC009968 | 858 | 1-180 |
| | | | | | 1275-1457 |
| | | | | | 2712-2976 |
| | | | | | 3150-3403 |
| | | | | | 3796-6332 |
| | | | | | 6730-6864 |
| | | | | | 7103-7303 |
| | | | | | 7404-7505 |
| | | | | | 7843-8289 |
| | | | | | 8536-8586 |
| | | | | | 9970-10312 |
| | | | | | 10393-10756 |
| | | | | | 10981-11105 |
| | | | | | 11188-11805 |
| | | | | | 13068-13120 |
| | | | | | 13678-13812 |
| | | | | | 13905-13994 |
| H6EEC72 | 12 | 889401 | AC012314 | 859 | 1-43 |
| | | | | | 861-1031 |
| | | | | | 1576-1743 |
| | | | | | 1924-2132 |
| | | | | | 2203-2432 |
| | | | | | 2473-2905 |
| | | | | | 3177-3360 |
| | | | | | 3651-4332 |
| | | | | | 4422-4583 |
| | | | | | 4830-4995 |
| | | | | | 5086-5365 |
| H6EEC72 | 12 | 889401 | AC009968 | 860 | 1-43 |
| | | | | | 857-1027 |
| | | | | | 1570-1737 |
| | | | | | 1918-2126 |
| | | | | | 2197-2426 |
| | | | | | 2467-2899 |
| | | | | | 3171-3354 |
| | | | | | 3644-4326 |
| | | | | | 4416-4577 |
| | | | | | 4824-4989 |
| | | | | | 5080-5360 |
| HACAB68 | 13 | 584773 | AL160283 | 861 | 1-2811 |
| HACAB68 | 13 | 584773 | AL354793 | 862 | 1-3734 |
| | | | | | 3843-4723 |
| HACAB68 | 13 | 584773 | AL356058 | 863 | 1-3055 |
| | | | | | 3165-4045 |
| HACBS22 | 14 | 847113 | AC012073 | 864 | 1-134 |
| | | | | | 718-833 |
| | | | | | 1002-1132 |
| | | | | | 2357-2516 |
| | | | | | 3762-3945 |
| | | | | | 5344-5477 |
| | | | | | 7446-7594 |
| | | | | | 7742-7904 |
| | | | | | 10636-10725 |
| | | | | | 11138-12223 |
| | | | | | 12583-12977 |
| | | | | | 13095-13178 |
| | | | | | 14224-14532 |
| | | | | | 14668-14841 |
| | | | | | 15779-16124 |
| | | | | | 16257-16343 |
| | | | | | 16508-16826 |
| | | | | | 17489-17757 |
| | | | | | 17847-18008 |
| | | | | | 19028-19192 |
| | | | | | 19755-23561 |
| | | | | | 24286-24717 |
| | | | | | 24920-25347 |
| | | | | | 25567-25741 |
| | | | | | 26629-26891 |
| | | | | | 27895-27968 |
| HACBS22 | 14 | 847113 | AC012073 | 865 | 1-545 |
| HADMA77 | 17 | 783049 | AC007944 | 866 | 1-3350 |
| HADMA77 | 17 | 783049 | AC018656 | 867 | 1-3349 |
| HADMA77 | 17 | 783049 | AC021874 | 868 | 1-3351 |
| | | | | | 4529-4959 |
| | | | | | 6110-6438 |
| HADMA77 | 17 | 783049 | AC007944 | 869 | 1-941 |
| HADMA77 | 17 | 783049 | AC018656 | 870 | 1-432 |
| HADMA77 | 17 | 783049 | AC018656 | 871 | 1-941 |
| HADMB15 | 18 | 847116 | AC026666 | 872 | 1-385 |
| | | | | | 406-780 |
| HADMB15 | 18 | 847116 | AC026281 | 873 | 1-114 |
| | | | | | 430-875 |
| | | | | | 896-1262 |
| HAGFJ67 | 22 | 861680 | AL353805 | 874 | 1-1465 |
| HAGFJ67 | 22 | 861680 | AL354917 | 875 | 1-1465 |
| HAGFJ67 | 22 | 861680 | AL353793 | 876 | 1-1464 |
| HAGFJ67 | 22 | 861680 | AL353805 | 877 | 1-565 |
| HAGFJ67 | 22 | 861680 | AL353793 | 878 | 1-565 |
| HAGFS57 | 23 | 847120 | AC021238 | 879 | 1-140 |
| | | | | | 3343-3636 |
| | | | | | 5052-5179 |
| | | | | | 5712-5796 |
| | | | | | 6486-6918 |
| | | | | | 7867-8404 |
| | | | | | 8934-9513 |
| | | | | | 9711-10538 |
| | | | | | 10984-11992 |
| | | | | | 12080-12349 |
| | | | | | 12485-12857 |
| | | | | | 13895-14212 |
| | | | | | 14994-15054 |
| | | | | | 15169-15297 |
| | | | | | 16132-16211 |
| | | | | | 17721-17811 |
| | | | | | 18135-18354 |
| | | | | | 18363-18444 |
| | | | | | 19661-19720 |
| | | | | | 19841-20784 |
| | | | | | 20920-21236 |
| | | | | | 22168-24079 |
| HAGFS57 | 23 | 847120 | AC066613 | 880 | 1-433 |
| | | | | | 1382-1919 |
| | | | | | 2449-3028 |
| | | | | | 3226-4053 |
| | | | | | 4499-5507 |
| | | | | | 5595-5864 |
| | | | | | 6000-6372 |
| | | | | | 7410-7727 |
| | | | | | 8509-8569 |
| | | | | | 8684-8812 |
| | | | | | 9647-9726 |
| | | | | | 11236-11326 |
| | | | | | 11650-11869 |
| | | | | | 11878-11959 |
| | | | | | 13176-13235 |
| | | | | | 13356-14299 |
| | | | | | 14435-14752 |
| | | | | | 15684-17595 |
| HAJAY92 | 26 | 845601 | AL353726 | 881 | 1-2332 |
| HAJAY92 | 26 | 845601 | AL353726 | 882 | 1-115 |
| HAJAY92 | 26 | 845601 | AL353726 | 883 | 1-115 |
| HAJCH70 | 27 | 827275 | AL159987 | 884 | 1-2168 |
| HAQAI92 | 29 | 688037 | AL118502 | 885 | 1-471 |
| | | | | | 571-1561 |
| HAQAI92 | 29 | 688037 | AL161939 | 886 | 1-471 |
| | | | | | 571-1561 |
| HAQAI92 | 29 | 688037 | AC004064 | 887 | 1-471 |
| | | | | | 571-1561 |
| HAQAI92 | 29 | 688037 | AL118502 | 888 | 1-161 |
| HAQAI92 | 29 | 688037 | AL118502 | 889 | 1-285 |
| HAQAI92 | 29 | 688037 | AL161939 | 890 | 1-415 |
| HAQAI92 | 29 | 688037 | AL161939 | 891 | 1-285 |
| HAQAI92 | 29 | 688037 | AC004064 | 892 | 1-285 |
| HAQAI92 | 29 | 688037 | AC004064 | 893 | 1-415 |
| HARAE26 | 30 | 560598 | AC024491 | 894 | 1-1237 |
| HATBI94 | 31 | 839468 | AC016372 | 895 | 1-1727 |
| HATBI94 | 31 | 839468 | AL390735 | 896 | 1-1729 |
| HATBI94 | 31 | 839468 | AL138791 | 897 | 1-1333 |
| HATBI94 | 31 | 839468 | AC016372 | 898 | 1-646 |
| HATBI94 | 31 | 839468 | AC016372 | 899 | 1-766 |
| HATBI94 | 31 | 839468 | AL390735 | 900 | 1-646 |
| HATBI94 | 31 | 839468 | AL390735 | 901 | 1-766 |
| HATCB45 | 32 | 631172 | AC009307 | 902 | 1-1044 |
| HATCB45 | 32 | 631172 | AC006501 | 903 | 1-1044 |
| HATCB45 | 32 | 631172 | AC009307 | 904 | 1-318 |
| HATCB45 | 32 | 631172 | AC009307 | 905 | 1-370 |
| HATCB45 | 32 | 631172 | AC006501 | 906 | 1-318 |
| HATCB45 | 32 | 631172 | AC006501 | 907 | 1-111 |
| HATCI03 | 33 | 580805 | AL137119 | 908 | 1-81 |
| | | | | | 824-941 |
| | | | | | 972-1185 |
| | | | | | 2432-2705 |
| | | | | | 3880-4812 |
| | | | | | 4880-5011 |
| | | | | | 5828-6591 |
| | | | | | 8231-8398 |
| | | | | | 8618-8767 |
| | | | | | 9466-9728 |
| HATCI03 | 33 | 580805 | AL138688 | 909 | 1-81 |
| | | | | | 825-942 |
| | | | | | 973-1186 |
| | | | | | 2433-2706 |
| | | | | | 3881-4795 |
| | | | | | 4870-5001 |
| | | | | | 5818-6581 |
| | | | | | 8221-8388 |
| | | | | | 8608-8757 |
| | | | | | 9456-9718 |
| HATCI03 | 33 | 580805 | AL137119 | 910 | 1-542 |
| HATCI03 | 33 | 580805 | AL138688 | 911 | 1-542 |
| HATEH20 | 34 | 836056 | AC006207 | 912 | 1-2845 |
| HATEH20 | 34 | 836056 | AC006207 | 913 | 1-76 |
| | | | | | 1150-1290 |
| | | | | | 1699-2395 |
| HBAGD86 | 35 | 838799 | AC016755 | 914 | 1-41 |
| | | | | | 1648-1993 |
| | | | | | 2035-3552 |
| | | | | | 3554-6713 |
| HBAGD86 | 35 | 838799 | AC016755 | 915 | 1-161 |
| | | | | | 696-809 |
| | | | | | 2256-2753 |
| | | | | | 6910-6991 |
| | | | | | 7733-7857 |
| | | | | | 9267-9458 |
| | | | | | 10650-10734 |
| | | | | | 11114-11562 |
| | | | | | 11678-11801 |
| | | | | | 12524-12817 |
| | | | | | 14494-15914 |
| HBAGD86 | 35 | 838799 | AC016755 | 916 | 1-217 |
| HBCJL35 | 36 | 1300785 | AL158846 | 917 | 1-4302 |
| | | | | | 4512-4570 |
| | | | | | 4837-5068 |
| | | | | | 5373-5856 |
| | | | | | 5965-6104 |
| | | | | | 6899-7643 |
| | | | | | 8898-9042 |
| | | | | | 9567-9925 |
| HBCJL35 | 36 | 1300785 | AL158846 | 918 | 1-170 |
| | | | | | 406-723 |
| | | | | | 864-2386 |
| HBCJL35 | 36 | 1300785 | AL158846 | 919 | 1-46 |
| | | | | | 101-334 |
| HBGNC72 | 38 | 892131 | AC016588 | 920 | 1-67 |
| | | | | | 319-423 |
| | | | | | 3335-3462 |
| | | | | | 3594-3680 |
| | | | | | 4721-5143 |
| | | | | | 5551-6677 |
| HBHAA81 | 39 | 846465 | AC006059 | 921 | 1-230 |
| | | | | | 1619-1699 |
| | | | | | 1953-2090 |
| | | | | | 2986-3054 |
| | | | | | 3665-3786 |
| | | | | | 3902-4406 |
| | | | | | 4457-4674 |
| | | | | | 5129-5531 |
| | | | | | 5660-5811 |
| | | | | | 5934-5969 |
| | | | | | 7563-7959 |
| | | | | | 8086-9195 |
| | | | | | 9591-9735 |
| | | | | | 9788-10149 |
| HBHAA81 | 39 | 846465 | AC018471 | 922 | 1-230 |
| | | | | | 1619-1699 |
| | | | | | 1965-2090 |
| | | | | | 2986-3054 |
| | | | | | 3665-3786 |
| | | | | | 3902-4405 |
| | | | | | 4456-4673 |
| | | | | | 5128-5530 |
| | | | | | 5659-5810 |
| | | | | | 5933-5968 |
| | | | | | 7561-7957 |
| | | | | | 8084-9193 |
| | | | | | 9589-9733 |
| | | | | | 9786-10146 |
| HBHAA81 | 39 | 846465 | AC006059 | 923 | 1-340 |
| | | | | | 501-802 |
| HBHAA81 | 39 | 846465 | AC006059 | 924 | 1-661 |
| | | | | | 1538-1684 |
| | | | | | 3489-3680 |
| | | | | | 3832-3933 |
| | | | | | 4241-4410 |
| | | | | | 5782-5872 |
| | | | | | 5998-6150 |
| HBHAA81 | 39 | 846465 | AC018471 | 925 | 1-661 |
| | | | | | 1539-1672 |
| HBHAA81 | 39 | 846465 | AC018471 | 926 | 1-340 |
| | | | | | 501-802 |
| HBIAA59 | 40 | 806303 | AL121929 | 927 | 1-1114 |
| | | | | | 1186-3742 |
| HBIAA59 | 40 | 806303 | AL121929 | 928 | 1-226 |
| HBIAA59 | 40 | 806303 | AL121929 | 929 | 1-243 |
| HBJAB02 | 43 | 837309 | AC015651 | 930 | 1-35 |
| | | | | | 159-252 |
| | | | | | 410-783 |
| | | | | | 786-830 |
| | | | | | 953-1035 |
| | | | | | 1452-1553 |
| | | | | | 1651-2071 |
| | | | | | 2161-2264 |
| | | | | | 2352-2454 |
| | | | | | 2494-2758 |
| | | | | | 2847-3006 |
| | | | | | 3135-3272 |
| | | | | | 3477-4138 |
| | | | | | 4907-5738 |
| | | | | | 5972-6059 |
| | | | | | 6132-6367 |
| | | | | | 6650-6834 |
| | | | | | 6915-7010 |
| | | | | | 7091-7658 |
| | | | | | 7662-9457 |
| | | | | | 10122-10222 |
| | | | | | 11415-11534 |
| | | | | | 12386-12418 |
| | | | | | 13253-13584 |
| | | | | | 13635-13867 |
| | | | | | 14881-15326 |
| | | | | | 15851-16013 |
| | | | | | 16529-16816 |
| | | | | | 17430-17529 |
| | | | | | 18140-18269 |
| | | | | | 18634-18734 |
| | | | | | 19189-19369 |
| | | | | | 20434-21105 |
| | | | | | 21912-22008 |
| HBJAB02 | 43 | 837309 | AC015651 | 931 | 1-2097 |
| | | | | | 5308-5495 |
| | | | | | 5696-5742 |
| | | | | | 5890-6249 |
| | | | | | 7370-7525 |
| | | | | | 7850-8236 |
| | | | | | 8359-8463 |
| | | | | | 8597-8770 |
| | | | | | 8919-9028 |
| | | | | | 9213-9353 |
| | | | | | 9517-9639 |
| | | | | | 9765-9874 |
| | | | | | 9944-11023 |
| | | | | | 11124-11219 |
| | | | | | 11315-11613 |
| | | | | | 11708-12241 |
| | | | | | 12431-12666 |
| | | | | | 12744-12802 |
| | | | | | 12976-13087 |
| | | | | | 13374-13914 |
| | | | | | 14728-15500 |
| HBMBM96 | 50 | 561935 | AP000786 | 932 | 1-1121 |
| HBMBM96 | 50 | 561935 | AP000786 | 933 | 1-192 |
| HBMBX01 | 51 | 705047 | AC004236 | 934 | 1-2981 |
| HBMBX01 | 51 | 705047 | AL354986 | 935 | 1-2981 |
| HBMBX01 | 51 | 705047 | AC025145 | 936 | 1-2981 |
| HBMBX01 | 51 | 705047 | AC004236 | 937 | 1-537 |
| HBMBX01 | 51 | 705047 | AC004236 | 938 | 1-334 |
| HBMBX01 | 51 | 705047 | AL354986 | 939 | 1-334 |
| HBMBX01 | 51 | 705047 | AL354986 | 940 | 1-537 |
| HBMBX01 | 51 | 705047 | AC025145 | 941 | 1-537 |
| HBMBX01 | 51 | 705047 | AC025145 | 942 | 1-328 |
| HBMTM11 | 52 | 589515 | AC005412 | 943 | 1-5153 |
| HBMTM11 | 52 | 589515 | AC068025 | 944 | 1-5153 |
| HBMTM11 | 52 | 589515 | AC005412 | 945 | 1-401 |
| | | | | | 2025-2517 |
| | | | | | 3932-4032 |
| | | | | | 4495-4619 |
| | | | | | 5190-5319 |
| | | | | | 6731-7210 |
| | | | | | 7410-7747 |
| | | | | | 7885-7989 |
| | | | | | 10428-10528 |
| | | | | | 12252-12623 |
| | | | | | 14008-14169 |
| | | | | | 15102-15535 |
| | | | | | 15963-16112 |
| | | | | | 17178-17644 |
| | | | | | 20468-21126 |
| | | | | | 21810-25012 |
| HBMTM11 | 52 | 589515 | AC005412 | 946 | 1-134 |
| HBMTM11 | 52 | 589515 | AC068025 | 947 | 1-134 |
| HBMTM11 | 52 | 589515 | AC068025 | 948 | 1-3201 |
| HBMWE61 | 56 | 778066 | AL049732 | 949 | 1-248 |
| | | | | | 1363-1656 |
| | | | | | 1738-2707 |
| | | | | | 3831-3892 |
| | | | | | 4148-4228 |
| | | | | | 4752-4846 |
| | | | | | 5021-5344 |
| | | | | | 5573-5654 |
| | | | | | 5744-6267 |
| | | | | | 6828-6945 |
| | | | | | 7178-10598 |
| HBMWE61 | 56 | 778066 | AL049732 | 950 | 1-829 |
| | | | | | 3610-3658 |
| | | | | | 3665-4981 |
| | | | | | 12571-14809 |
| HBNBJ76 | 57 | 810332 | AC004453 | 951 | 1-3544 |
| HBNBJ76 | 57 | 810332 | AC004453 | 952 | 1-309 |
| HBNBJ76 | 57 | 810332 | AC004453 | 953 | 1-468 |
| HBSAK32 | 59 | 856387 | AL161656 | 954 | 1-325 |
| | | | | | 363-460 |
| | | | | | 507-980 |
| | | | | | 1258-1440 |
| | | | | | 1691-2081 |
| | | | | | 2107-2347 |
| | | | | | 2442-2595 |
| | | | | | 2622-3125 |
| | | | | | 3993-4605 |
| | | | | | 4876-5153 |
| | | | | | 5309-5877 |
| HBSAK32 | 59 | 856387 | AL161656 | 955 | 1-186 |
| | | | | | 511-636 |
| HBXCM66 | 60 | 639039 | AC011962 | 956 | 1-102 |
| HCDCY76 | 62 | 837972 | AP001528 | 957 | 1-3072 |
| HCDCY76 | 62 | 837972 | AP001528 | 958 | 1-380 |
| HCE1G78 | 64 | 761204 | AC005005 | 959 | 1-148 |
| | | | | | 1171-1291 |
| | | | | | 1870-3004 |
| | | | | | 3641-3752 |
| | | | | | 3952-4068 |
| | | | | | 4387-4561 |
| | | | | | 4980-5091 |
| | | | | | 5243-5349 |
| | | | | | 5497-5683 |
| | | | | | 5962-6073 |
| | | | | | 6855-7088 |
| | | | | | 9649-9785 |
| | | | | | 10127-10269 |
| | | | | | 10438-10506 |
| | | | | | 10631-10739 |
| | | | | | 10938-11726 |
| HCE1G78 | 64 | 761204 | AC005005 | 960 | 1-432 |
| HCE2H52 | 65 | 847007 | AC022833 | 961 | 1-1271 |
| HCE3B04 | 66 | 831151 | AC021883 | 962 | 1-2450 |
| HCE3B04 | 66 | 831151 | AC021883 | 963 | 1-466 |
| HCE5F78 | 67 | 838101 | AC007318 | 964 | 1-1782 |
| HCE5F78 | 67 | 838101 | AC007318 | 965 | 1-98 |
| HCEEE79 | 68 | 560609 | AC006923 | 966 | 1-1044 |
| HCEEE79 | 68 | 560609 | AC006923 | 967 | 1-207 |
| HCEEU18 | 70 | 688041 | AC008469 | 968 | 1-169 |
| HCEEU18 | 70 | 688041 | AC026400 | 969 | 1-170 |
| HCEEU18 | 70 | 688041 | AC008469 | 970 | 1-304 |
| | | | | | 420-602 |
| | | | | | 1427-2108 |
| | | | | | 2323-2645 |
| | | | | | 3613-3987 |
| | | | | | 4129-4442 |
| | | | | | 4600-4731 |
| | | | | | 4868-5039 |
| | | | | | 5408-5538 |
| | | | | | 5624-5776 |
| | | | | | 6317-7734 |
| HCEEU18 | 70 | 688041 | AC008469 | 971 | 1-294 |
| HCEEU18 | 70 | 688041 | AC026400 | 972 | 1-98 |
| HCEEU18 | 70 | 688041 | AC026400 | 973 | 1-407 |
| HCEFG93 | 71 | 745400 | AC068128 | 974 | 1-2635 |
| HCEFG93 | 71 | 745400 | AC011140 | 975 | 1-2636 |
| HCEGG08 | 73 | 844506 | AC078898 | 976 | 1-640 |
| HCEGG08 | 73 | 844506 | AC074196 | 977 | 1-606 |
| HCEGG08 | 73 | 844506 | AC077693 | 978 | 1-628 |
| HCEGG08 | 73 | 844506 | AC027037 | 979 | 1-640 |
| HCEGG08 | 73 | 844506 | AC026757 | 980 | 1-513 |
| HCEGG08 | 73 | 844506 | AC027036 | 981 | 1-612 |
| HCEGG08 | 73 | 844506 | AC074108 | 982 | 1-462 |
| HCEGG08 | 73 | 844506 | AC074226 | 983 | 1-640 |
| HCEGG08 | 73 | 844506 | AC073166 | 984 | 1-640 |
| HCEGG08 | 73 | 844506 | AC068667 | 985 | 1-654 |
| HCEGG08 | 73 | 844506 | AC024594 | 986 | 1-414 |
| HCEGG08 | 73 | 844506 | AC024261 | 987 | 1-647 |
| HCEGG08 | 73 | 844506 | AC078893 | 988 | 1-640 |
| HCEGG08 | 73 | 844506 | AC073555 | 989 | 1-640 |
| HCEGG08 | 73 | 844506 | AC069474 | 990 | 1-571 |
| HCEGG08 | 73 | 844506 | AC068924 | 991 | 1-640 |
| HCEGG08 | 73 | 844506 | AC066689 | 992 | 1-639 |
| HCEGG08 | 73 | 844506 | AC035249 | 993 | 1-397 |
| HCEGG08 | 73 | 844506 | AC034258 | 994 | 1-648 |
| HCEGG08 | 73 | 844506 | AC027135 | 995 | 1-434 |
| HCEGG08 | 73 | 844506 | AC027035 | 996 | 1-624 |
| HCEGG08 | 73 | 844506 | AC027034 | 997 | 1-509 |
| HCEGG08 | 73 | 844506 | AC026815 | 998 | 1-654 |
| HCEGG08 | 73 | 844506 | AC025781 | 999 | 1-546 |
| HCEGG08 | 73 | 844506 | AC078894 | 1000 | 1-654 |
| HCEGX05 | 74 | 827060 | AL133227 | 1001 | 1-32 |
| | | | | | 712-1071 |
| | | | | | 3453-3870 |
| | | | | | 4197-4326 |
| | | | | | 4639-4751 |
| | | | | | 5131-5202 |
| | | | | | 5588-5638 |
| | | | | | 7454-8108 |
| | | | | | 8670-8767 |
| | | | | | 9511-9692 |
| | | | | | 9754-10134 |
| | | | | | 11109-11226 |
| | | | | | 12456-12607 |
| | | | | | 15237-15316 |
| | | | | | 18143-18311 |
| | | | | | 18429-18478 |
| | | | | | 20682-20982 |
| | | | | | 20988-21295 |
| | | | | | 22686-23061 |
| | | | | | 23358-23495 |
| | | | | | 24076-24612 |
| | | | | | 25196-25334 |
| | | | | | 26760-26926 |
| | | | | | 27041-27152 |
| | | | | | 27271-27379 |
| | | | | | 27697-28289 |
| | | | | | 29024-29340 |
| | | | | | 29761-29840 |
| | | | | | 31168-32681 |
| HCEGX05 | 74 | 827060 | AL161661 | 1002 | 1-130 |
| | | | | | 443-555 |
| | | | | | 935-1006 |
| | | | | | 1392-1442 |
| | | | | | 3258-3912 |
| | | | | | 4474-4571 |
| | | | | | 5315-5496 |
| | | | | | 5558-5938 |
| | | | | | 6915-7032 |
| | | | | | 8262-8413 |
| | | | | | 11042-11121 |
| | | | | | 13948-14116 |
| | | | | | 14234-14283 |
| | | | | | 16487-16787 |
| | | | | | 16793-17100 |
| | | | | | 18494-18869 |
| | | | | | 19166-19303 |
| | | | | | 19884-20420 |
| | | | | | 21002-21140 |
| | | | | | 22566-22732 |
| | | | | | 22847-22958 |
| | | | | | 23077-23185 |
| | | | | | 23503-24095 |
| | | | | | 24826-25142 |
| | | | | | 25563-25642 |
| | | | | | 26969-28482 |
| HCEGX05 | 74 | 827060 | AL133227 | 1003 | 1-51 |
| | | | | | 476-521 |
| | | | | | 842-1226 |
| | | | | | 1375-1490 |
| | | | | | 3745-4016 |
| | | | | | 4046-4229 |
| | | | | | 4430-4855 |
| | | | | | 5300-6053 |
| | | | | | 6598-6883 |
| | | | | | 7406-7446 |
| | | | | | 7461-8437 |
| | | | | | 8550-8681 |
| | | | | | 8888-8919 |
| | | | | | 8943-9353 |
| | | | | | 9458-9544 |
| | | | | | 9834-10607 |
| | | | | | 11550-11629 |
| | | | | | 12196-12374 |
| | | | | | 13532-14886 |
| HCEGX05 | 74 | 827060 | AL161661 | 1004 | 1-418 |
| HCEGX05 | 74 | 827060 | AL161661 | 1005 | 1-50 |
| | | | | | 475-520 |
| | | | | | 841-1225 |
| | | | | | 3744-4014 |
| | | | | | 4044-4227 |
| | | | | | 4428-4853 |
| | | | | | 4925-5089 |
| | | | | | 5298-6051 |
| | | | | | 6649-6801 |
| HCFLN88 | 75 | 610000 | AC005089 | 1006 | 1-594 |
| | | | | | 1779-2065 |
| | | | | | 2224-2411 |
| | | | | | 3295-3588 |
| | | | | | 3962-4463 |
| | | | | | 5317-5561 |
| | | | | | 5835-6210 |
| | | | | | 6750-7793 |
| HCFLN88 | 75 | 610000 | AC005089 | 1007 | 1-141 |
| HCFLN88 | 75 | 610000 | AC005089 | 1008 | 1-215 |
| HCLBK61 | 77 | 845659 | AC009299 | 1009 | 1-1756 |
| HCLBK61 | 77 | 845659 | AC009299 | 1010 | 1-359 |
| HCRBF72 | 81 | 828945 | AL031731 | 1011 | 1-228 |
| | | | | | 470-762 |
| | | | | | 793-916 |
| | | | | | 1138-1283 |
| | | | | | 2101-2241 |
| | | | | | 3646-3723 |
| | | | | | 4316-4418 |
| | | | | | 5123-5221 |
| | | | | | 5531-5609 |
| | | | | | 6090-6192 |
| | | | | | 6447-6790 |
| HCRBF72 | 81 | 828945 | AL031731 | 1012 | 1-742 |
| | | | | | 941-1493 |
| | | | | | 1926-2063 |
| | | | | | 2330-2427 |
| | | | | | 2939-3397 |
| | | | | | 3456-3806 |
| | | | | | 4127-4407 |
| | | | | | 5411-5701 |
| | | | | | 5758-5887 |
| | | | | | 6247-6369 |
| | | | | | 6418-6967 |
| | | | | | 8694-8799 |
| | | | | | 8827-8931 |
| | | | | | 8973-9140 |
| | | | | | 10098-10228 |
| | | | | | 11027-11789 |
| | | | | | 12063-13656 |
| | | | | | 14974-15080 |
| | | | | | 15481-15672 |
| | | | | | 15724-15921 |
| | | | | | 16055-16089 |
| | | | | | 17154-17467 |
| | | | | | 17730-17886 |
| | | | | | 18256-18550 |
| | | | | | 18657-18902 |
| HCUCF89 | 84 | 637986 | AC022554 | 1013 | 1-1066 |
| HCUCF89 | 84 | 637986 | AC022554 | 1014 | 1-692 |
| HCUCF89 | 84 | 637986 | AC022554 | 1015 | 1-643 |
| HCUCK44 | 85 | 790277 | AC007842 | 1016 | 1-1118 |
| HCUCK44 | 85 | 790277 | AC007842 | 1017 | 1-415 |
| HCUCK44 | 85 | 790277 | AC007842 | 1018 | 1-101 |
| HCWAE64 | 87 | 535893 | AL157935 | 1019 | 1-1319 |
| | | | | | 2024-2316 |
| | | | | | 2937-2984 |
| | | | | | 3126-3281 |
| | | | | | 5595-5703 |
| | | | | | 5788-6574 |
| | | | | | 6667-6733 |
| | | | | | 6788-6880 |
| | | | | | 6962-7303 |
| | | | | | 8111-11869 |
| | | | | | 12019-12418 |
| | | | | | 12420-12679 |
| | | | | | 13140-13191 |
| HCWAE64 | 87 | 535893 | AL157935 | 1020 | 1-1316 |
| HCWAE64 | 87 | 535893 | AL157935 | 1021 | 1-309 |
| HCWFU39 | 88 | 651316 | AP000427 | 1022 | 1-2086 |
| | | | | | 2209-2777 |
| | | | | | 3392-4040 |
| | | | | | 5819-5959 |
| HDHAA42 | 89 | 695710 | AC069193 | 1023 | 1-1213 |
| HDHAA42 | 89 | 695710 | AL049629 | 1024 | 1-1213 |
| HDHAA42 | 89 | 695710 | AC069193 | 1025 | 1-807 |
| HDHAA42 | 89 | 695710 | AL049629 | 1026 | 1-807 |
| HDHAA42 | 89 | 695710 | AL049629 | 1027 | 1-129 |
| HDPDI72 | 92 | 897277 | AL139238 | 1028 | 1-76 |
| | | | | | 3170-3542 |
| | | | | | 4724-5613 |
| | | | | | 6598-6719 |
| | | | | | 6954-7373 |
| | | | | | 8256-8349 |
| | | | | | 10408-11003 |
| HDPDI72 | 92 | 897277 | AL139238 | 1029 | 1-279 |
| HDPFY18 | 95 | 779450 | AC011875 | 1030 | 1-1880 |
| HDPFY18 | 95 | 779450 | AP000848 | 1031 | 1-1470 |
| HDPFY18 | 95 | 779450 | AP000663 | 1032 | 1-3332 |
| HDPOO76 | 99 | 838594 | AC006483 | 1033 | 1-109 |
| | | | | | 132-434 |
| | | | | | 604-3482 |
| HDPOO76 | 99 | 838594 | AC026717 | 1034 | 1-1820 |
| HDPOO76 | 99 | 838594 | AC035147 | 1035 | 1-1820 |
| HDPOO76 | 99 | 838594 | AC026692 | 1036 | 1-1823 |
| HDPOO76 | 99 | 838594 | AC073481 | 1037 | 1-2558 |
| HDPOO76 | 99 | 838594 | AC006483 | 1038 | 1-216 |
| HDPOO76 | 99 | 838594 | AC006483 | 1039 | 1-231 |
| HDPOO76 | 99 | 838594 | AC073481 | 1040 | 1-231 |
| HDPXN20 | 102 | 801896 | AP001810 | 1041 | 1-4481 |
| HDPXN20 | 102 | 801896 | AP001649 | 1042 | 1-4481 |
| HDPXN20 | 102 | 801896 | AC021331 | 1043 | 1-4481 |
| HDPXN20 | 102 | 801896 | AP001810 | 1044 | 1-363 |
| HDPXN20 | 102 | 801896 | AP001649 | 1045 | 1-363 |
| HDPXN20 | 102 | 801896 | AC021331 | 1046 | 1-363 |
| HDTAV54 | 104 | 801898 | AC073342 | 1047 | 1-164 |
| | | | | | 208-280 |
| | | | | | 349-1975 |
| | | | | | 1978-2434 |
| | | | | | 2614-2946 |
| | | | | | 4135-9074 |
| | | | | | 9200-9507 |
| HDTAV54 | 104 | 801898 | AC073342 | 1048 | 1-434 |
| HDTFX18 | 105 | 801957 | AC013303 | 1049 | 1-832 |
| | | | | | 1218-1410 |
| | | | | | 2344-2463 |
| | | | | | 3663-3955 |
| | | | | | 4307-4617 |
| | | | | | 5925-6011 |
| | | | | | 10329-10419 |
| | | | | | 11011-11162 |
| | | | | | 12512-12600 |
| | | | | | 13752-13894 |
| | | | | | 14068-14375 |
| | | | | | 14493-15033 |
| | | | | | 15161-15932 |
| HDTGW48 | 106 | 827285 | AL138804 | 1050 | 1-44 |
| | | | | | 712-839 |
| | | | | | 1107-2515 |
| | | | | | 2854-3189 |
| | | | | | 3388-3704 |
| | | | | | 3951-4245 |
| | | | | | 4737-4829 |
| | | | | | 5674-6404 |
| | | | | | 7604-8233 |
| | | | | | 8818-9303 |
| HDTGW48 | 106 | 827285 | AL138804 | 1051 | 1-391 |
| HDTGW48 | 106 | 827285 | AL138804 | 1052 | 1-87 |
| | | | | | 821-1093 |
| HE2CH58 | 107 | 838140 | AC006333 | 1053 | 1-1938 |
| HE2CH58 | 107 | 838140 | AC027585 | 1054 | 1-2368 |
| HE2CH58 | 107 | 838140 | AC006333 | 1055 | 1-430 |
| HE2PO93 | 109 | 771655 | AC020894 | 1056 | 1-353 |
| | | | | | 749-1198 |
| | | | | | 2724-2986 |
| | | | | | 4932-5578 |
| | | | | | 7481-7617 |
| | | | | | 8108-8257 |
| | | | | | 8515-8849 |
| | | | | | 9840-9968 |
| | | | | | 10287-10827 |
| | | | | | 11376-14474 |
| | | | | | 14652-15073 |
| | | | | | 15510-17083 |
| | | | | | 17304-20501 |
| HE2PO93 | 109 | 771655 | AC008590 | 1057 | 1-648 |
| | | | | | 2551-2687 |
| | | | | | 3178-3327 |
| | | | | | 3585-3919 |
| | | | | | 4910-5038 |
| | | | | | 5357-5897 |
| | | | | | 6446-10147 |
| | | | | | 10584-12159 |
| | | | | | 12380-15574 |
| HE2PO93 | 109 | 771655 | AC021468 | 1058 | 1-353 |
| | | | | | 749-1198 |
| | | | | | 2724-2986 |
| | | | | | 4934-5579 |
| | | | | | 7482-7618 |
| | | | | | 8109-8258 |
| | | | | | 8516-8850 |
| | | | | | 9841-9969 |
| | | | | | 10288-10828 |
| | | | | | 11377-13627 |
| | | | | | 13631-13748 |
| | | | | | 13762-15078 |
| | | | | | 15515-17088 |
| | | | | | 17309-20507 |
| HE2PO93 | 109 | 771655 | AC020894 | 1059 | 1-372 |
| HE2PO93 | 109 | 771655 | AC020894 | 1060 | 1-315 |
| | | | | | 893-1242 |
| HE2PO93 | 109 | 771655 | AC021468 | 1061 | 1-350 |
| HE2PO93 | 109 | 771655 | AC021468 | 1062 | 1-372 |
| HE6EY13 | 112 | 847058 | AC003688 | 1063 | 1-449 |
| | | | | | 4037-4176 |
| | | | | | 4301-4366 |
| | | | | | 4461-4586 |
| | | | | | 4781-4860 |
| | | | | | 5274-5391 |
| | | | | | 5498-5619 |
| | | | | | 6604-6940 |
| | | | | | 7008-7096 |
| | | | | | 7103-8056 |
| HE6EY13 | 112 | 847058 | AC011022 | 1064 | 1-1405 |
| HE6EY13 | 112 | 847058 | AC023963 | 1065 | 1-1333 |
| HE6EY13 | 112 | 847058 | AC003688 | 1066 | 1-931 |
| | | | | | 983-1131 |
| | | | | | 1504-2295 |
| HE6EY13 | 112 | 847058 | AC003688 | 1067 | 1-286 |
| HE6EY13 | 112 | 847058 | AC011022 | 1068 | 1-274 |
| HE6EY13 | 112 | 847058 | AC023963 | 1069 | 1-274 |
| HE6FV29 | 113 | 588454 | AL162401 | 1070 | 1-1425 |
| HE8BQ49 | 114 | 589443 | AC009225 | 1071 | 1-1857 |
| HE8SG96 | 115 | 862016 | AL138707 | 1072 | 1-152 |
| | | | | | 684-1297 |
| | | | | | 1697-3720 |
| | | | | | 4478-6193 |
| HE8SG96 | 115 | 862016 | AL138707 | 1073 | 1-336 |
| HEBCI18 | 118 | 831464 | AC013399 | 1074 | 1-3602 |
| HEBCI18 | 118 | 831464 | AC013399 | 1075 | 1-651 |
| HEBDF77 | 119 | 692347 | AL078460 | 1076 | 1-1933 |
| HEBDF77 | 119 | 692347 | AL078460 | 1077 | 1-269 |
| HEBDF77 | 119 | 692347 | AL078460 | 1078 | 1-176 |
| HEBDQ91 | 120 | 840288 | AC008623 | 1079 | 1-2883 |
| HEBDQ91 | 120 | 840288 | AC008623 | 1080 | 1-350 |
| HEBDQ91 | 120 | 840288 | AC008623 | 1081 | 1-555 |
| HEBFR46 | 121 | 847064 | AC006483 | 1082 | 1-70 |
| | | | | | 282-644 |
| | | | | | 789-4243 |
| HEBFR46 | 121 | 847064 | AC073481 | 1083 | 1-2167 |
| | | | | | 2174-3461 |
| HEBFR46 | 121 | 847064 | AC006483 | 1084 | 1-344 |
| HEBFR46 | 121 | 847064 | AC006483 | 1085 | 1-195 |
| HEBGE07 | 122 | 798096 | AC021918 | 1086 | 1-1899 |
| HEBGE07 | 122 | 798096 | AC021918 | 1087 | 1-225 |
| HEBGE23 | 123 | 836129 | AC006486 | 1088 | 1-976 |
| | | | | | 1287-1533 |
| | | | | | 1631-1785 |
| | | | | | 1868-2476 |
| | | | | | 2517-3500 |
| HEBGE23 | 123 | 836129 | AC021858 | 1089 | 1-632 |
| HEBGE23 | 123 | 836129 | AC006486 | 1090 | 1-174 |
| HEBGE23 | 123 | 836129 | AC006486 | 1091 | 1-509 |
| | | | | | 539-830 |
| | | | | | 1796-2057 |
| | | | | | 2096-2262 |
| | | | | | 2409-2658 |
| | | | | | 2862-3403 |
| | | | | | 4612-4900 |
| | | | | | 4910-5022 |
| | | | | | 5115-5768 |
| | | | | | 7511-7738 |
| | | | | | 8302-8392 |
| | | | | | 9165-9436 |
| | | | | | 10716-11025 |
| | | | | | 12552-13090 |
| | | | | | 13282-13789 |
| HELAT35 | 124 | 693175 | AC008880 | 1092 | 1-2115 |
| HELAT35 | 124 | 693175 | AC016613 | 1093 | 1-2115 |
| HELBU54 | 125 | 637624 | AC011004 | 1094 | 1-1736 |
| HELBU54 | 125 | 637624 | AC011004 | 1095 | 1-404 |
| HELBU54 | 125 | 637624 | AC011004 | 1096 | 1-104 |
| HEMEY47 | 126 | 834491 | AL133240 | 1097 | 1-144 |
| | | | | | 3483-4002 |
| | | | | | 4138-4196 |
| | | | | | 4835-5233 |
| | | | | | 8422-9149 |
| | | | | | 10684-10795 |
| | | | | | 11255-11435 |
| | | | | | 12025-12186 |
| | | | | | 12266-12376 |
| | | | | | 13381-13513 |
| | | | | | 14514-14661 |
| | | | | | 16248-16363 |
| | | | | | 17221-17433 |
| | | | | | 18618-18721 |
| | | | | | 20181-20371 |
| | | | | | 21019-21314 |
| | | | | | 22519-22957 |
| | | | | | 24380-25014 |
| | | | | | 25275-25783 |
| | | | | | 29344-29462 |
| | | | | | 30160-30257 |
| | | | | | 32036-32474 |
| | | | | | 33138-34013 |
| | | | | | 34369-35308 |
| | | | | | 35672-35908 |
| | | | | | 36996-37299 |
| | | | | | 39125-39261 |
| | | | | | 39667-43056 |
| HEMEY47 | 126 | 834491 | AL121773 | 1098 | 1-144 |
| | | | | | 3483-4002 |
| | | | | | 4138-4196 |
| | | | | | 4835-5233 |
| | | | | | 8422-9149 |
| | | | | | 11252-11432 |
| | | | | | 12022-12183 |
| | | | | | 12263-12373 |
| | | | | | 13378-13510 |
| | | | | | 14511-14658 |
| | | | | | 16245-16360 |
| | | | | | 17218-17348 |
| | | | | | 17358-17438 |
| | | | | | 20176-20366 |
| | | | | | 21014-21309 |
| | | | | | 22514-22952 |
| | | | | | 24263-25009 |
| | | | | | 25270-25778 |
| | | | | | 29339-29457 |
| | | | | | 30154-30263 |
| | | | | | 32033-32471 |
| | | | | | 33135-34010 |
| | | | | | 34366-35305 |
| | | | | | 35669-35905 |
| | | | | | 36993-37296 |
| | | | | | 39122-39258 |
| | | | | | 39664-43053 |
| HEMEY47 | 126 | 834491 | AL133240 | 1099 | 1-667 |
| HEMEY47 | 126 | 834491 | AL133240 | 1100 | 1-120 |
| | | | | | 216-786 |
| | | | | | 890-1198 |
| | | | | | 1376-1780 |
| | | | | | 2002-2592 |
| | | | | | 2730-2848 |
| | | | | | 3192-4374 |
| | | | | | 4397-4612 |
| | | | | | 4988-5825 |
| HEMEY47 | 126 | 834491 | AL121773 | 1101 | 1-120 |
| | | | | | 215-785 |
| | | | | | 889-1197 |
| | | | | | 1375-1779 |
| | | | | | 2001-2591 |
| | | | | | 2729-2847 |
| | | | | | 3191-4373 |
| | | | | | 4396-4611 |
| | | | | | 4998-5824 |
| HEMEY47 | 126 | 834491 | AL121773 | 1102 | 1-667 |
| HEPBA14 | 128 | 855935 | AC027590 | 1103 | 1-700 |
| | | | | | 959-1716 |
| HEPBA14 | 128 | 855935 | AC027590 | 1104 | 1-491 |
| HEQBF89 | 130 | 786205 | AL160055 | 1105 | 1-801 |
| HEQBF89 | 130 | 786205 | AC009485 | 1106 | 1-800 |
| HEQBF89 | 130 | 786205 | AL158827 | 1107 | 1-827 |
| HEQBF89 | 130 | 786205 | AC009485 | 1108 | 1-100 |
| HEQBF89 | 130 | 786205 | AL158827 | 1109 | 1-279 |
| HEQBF89 | 130 | 786205 | AL158827 | 1110 | 1-138 |
| | | | | | 152-192 |
| HETEY67 | 133 | 704077 | AL133477 | 1111 | 1-89 |
| | | | | | 1074-333 |
| HETEY67 | 133 | 704077 | AL353578 | 1112 | 1-89 |
| | | | | | 107-2184 |
| HETEY67 | 133 | 704077 | AL133477 | 1113 | 1-110 |
| | | | | | 140-243 |
| | | | | | 918-1001 |
| | | | | | 2463-2748 |
| | | | | | 3495-3652 |
| HETEY67 | 133 | 704077 | AL353578 | 1114 | 1-152 |
| HFCDW95 | 134 | 847383 | AC006388 | 1115 | 1-3484 |
| HFCDW95 | 134 | 847383 | AC006388 | 1116 | 1-1218 |
| HFCDW95 | 134 | 847383 | AC006388 | 1117 | 1-158 |
| HFCFE20 | 136 | 701985 | AC044815 | 1118 | 1-746 |
| | | | | | 1575-2050 |
| | | | | | 2508-3293 |
| | | | | | 4818-5412 |
| | | | | | 6081-6547 |
| | | | | | 6748-6935 |
| | | | | | 7843-8192 |
| | | | | | 8425-8581 |
| | | | | | 9095-9217 |
| | | | | | 9266-9407 |
| | | | | | 11036-11432 |
| | | | | | 12081-12179 |
| | | | | | 13701-13787 |
| | | | | | 13976-16347 |
| HFCFE20 | 136 | 701985 | AC026587 | 1119 | 1-2259 |
| HFCFE20 | 136 | 701985 | AL355175 | 1120 | 1-2260 |
| HFEAY59 | 137 | 658685 | AC005919 | 1121 | 1-490 |
| | | | | | 976-1063 |
| | | | | | 1264-1351 |
| | | | | | 1663-1956 |
| | | | | | 2076-2238 |
| | | | | | 2674-2837 |
| | | | | | 2910-3034 |
| | | | | | 4517-4686 |
| | | | | | 4804-5021 |
| | | | | | 5234-5282 |
| | | | | | 5397-5729 |
| | | | | | 7103-7442 |
| HFEAY59 | 137 | 658685 | AC005919 | 1122 | 1-155 |
| HFIJA29 | 139 | 839206 | AL031259 | 1123 | 1-1291 |
| | | | | | 1460-2067 |
| | | | | | 2069-2908 |
| | | | | | 3053-3754 |
| | | | | | 4093-4182 |
| | | | | | 4546-4650 |
| | | | | | 5612-6170 |
| | | | | | 6932-9872 |
| HFIJA29 | 139 | 839206 | AC009954 | 1124 | 1-1294 |
| | | | | | 1463-2070 |
| | | | | | 2072-2911 |
| | | | | | 3056-3757 |
| | | | | | 4096-4185 |
| | | | | | 4549-4653 |
| | | | | | 5614-6172 |
| | | | | | 6935-9878 |
| HFIJA29 | 139 | 839206 | AL031259 | 1125 | 1-426 |
| HFIJA29 | 139 | 839206 | AL031259 | 1126 | 1-829 |
| | | | | | 1325-1871 |
| | | | | | 2204-2663 |
| | | | | | 3085-3251 |
| | | | | | 4136-4238 |
| | | | | | 4289-4388 |
| | | | | | 4564-4997 |
| | | | | | 5413-5945 |
| | | | | | 8022-8401 |
| | | | | | 8405-8923 |
| | | | | | 10401-10602 |
| | | | | | 10628-11074 |
| | | | | | 15099-15200 |
| | | | | | 15346-15984 |
| | | | | | 18400-18491 |
| HFIJA29 | 139 | 839206 | AC009954 | 1127 | 1-829 |
| | | | | | 1325-1871 |
| | | | | | 2204-2663 |
| | | | | | 3087-3253 |
| | | | | | 4262-4399 |
| | | | | | 4571-5004 |
| | | | | | 5420-5952 |
| | | | | | 8016-8395 |
| | | | | | 8399-8917 |
| | | | | | 10395-10596 |
| | | | | | 10622-11056 |
| | | | | | 15325-15963 |
| | | | | | 18377-18495 |
| HFIJA29 | 139 | 839206 | AC009954 | 1128 | 1-426 |
| HFIJA68 | 140 | 847074 | AC010550 | 1129 | 1-127 |
| HFKEU12 | 142 | 634006 | AC010443 | 1130 | 1-1026 |
| HFKEU12 | 142 | 634006 | AC021087 | 1131 | 1-1026 |
| HFKEU12 | 142 | 634006 | AC027825 | 1132 | 1-1026 |
| HFKEU12 | 142 | 634006 | AC027825 | 1133 | 1-263 |
| HFKFX64 | 143 | 566835 | AP001203 | 1134 | 1-870 |
| HFKFX64 | 143 | 566835 | AC025291 | 1135 | 1-868 |
| HFKFX64 | 143 | 566835 | AC010798 | 1136 | 1-868 |
| HFKFX64 | 143 | 566835 | AP001203 | 1137 | 1-750 |
| HFKFX64 | 143 | 566835 | AC025291 | 1138 | 1-750 |
| HFKFX64 | 143 | 566835 | AC010798 | 1139 | 1-750 |
| HFPDR62 | 144 | 839400 | AC024938 | 1140 | 1-2651 |
| HFPDS07 | 145 | 821646 | AC067945 | 1141 | 1-3965 |
| HFPDS07 | 145 | 821646 | AC067945 | 1142 | 1-814 |
| HFPDS07 | 145 | 821646 | AC067945 | 1143 | 1-743 |
| HFTAS49 | 146 | 847386 | AC025405 | 1144 | 1-89 |
| | | | | | 1179-1585 |
| | | | | | 1793-1888 |
| | | | | | 2057-2469 |
| | | | | | 2682-3084 |
| | | | | | 3387-4038 |
| | | | | | 4507-6765 |
| | | | | | 6791-13862 |
| HFTAS49 | 146 | 847386 | AL354740 | 1145 | 1-47 |
| | | | | | 245-499 |
| | | | | | 2148-2236 |
| | | | | | 3326-3732 |
| | | | | | 3940-4035 |
| | | | | | 4204-4616 |
| | | | | | 4829-5231 |
| | | | | | 5536-6187 |
| | | | | | 6656-8914 |
| | | | | | 8941-13186 |
| HFTAS49 | 146 | 847386 | AL354740 | 1146 | 1-187 |
| HFTDH56 | 148 | 862021 | AC023154 | 1147 | 1-1503 |
| | | | | | 1728-2093 |
| | | | | | 2281-2361 |
| | | | | | 3191-3738 |
| | | | | | 3787-4515 |
| HFVGK35 | 149 | 731868 | AC018362 | 1148 | 149 |
| | | | | | 463-1004 |
| | | | | | 2131-2239 |
| | | | | | 2799-3339 |
| | | | | | 3639-3668 |
| | | | | | 3679-6187 |
| | | | | | 7308-7451 |
| | | | | | 7701-7829 |
| | | | | | 8065-8968 |
| HFXBT66 | 151 | 580831 | AL162497 | 1149 | 1-955 |
| HFXBT66 | 151 | 580831 | AL162497 | 1150 | 1-479 |
| HGBER72 | 152 | 826710 | AL157935 | 1151 | 1-1319 |
| | | | | | 2024-2316 |
| | | | | | 2937-2984 |
| | | | | | 3126-3281 |
| | | | | | 5595-5703 |
| | | | | | 5788-6574 |
| | | | | | 6667-6733 |
| | | | | | 6788-6880 |
| | | | | | 6962-7303 |
| | | | | | 8111-11869 |
| | | | | | 12019-12418 |
| | | | | | 12420-12679 |
| | | | | | 13140-13191 |
| HGBER72 | 152 | 826710 | AL157935 | 1152 | 1-1316 |
| HGBER72 | 152 | 826710 | AL157935 | 1153 | 1-309 |
| HHEGS55 | 154 | 858372 | AC009679 | 1154 | 1-565 |
| HHEGS55 | 154 | 858372 | AC016824 | 1155 | 1-902 |
| HHFEB79 | 156 | 1300768 | AC022305 | 1156 | 1-686 |
| HHFEB79 | 156 | 1300768 | AL022167 | 1157 | 1-1796 |
| HHFEB79 | 156 | 1300768 | AL049186 | 1158 | 1-912 |
| HHFEB79 | 156 | 1300768 | AC068470 | 1159 | 1-706 |
| HHFEB79 | 156 | 1300768 | AC018903 | 1160 | 1-631 |
| HHFEB79 | 156 | 1300768 | AL049186 | 1161 | 1-87 |
| HHFFS40 | 159 | 824059 | AC022423 | 1162 | 1-2017 |
| HHFFS40 | 159 | 824059 | AC025178 | 1163 | 1-2017 |
| HHFFS40 | 159 | 824059 | AC022444 | 1164 | 1-2017 |
| HHGDT26 | 161 | 658692 | AC010754 | 1165 | 1-1584 |
| HHGDT26 | 161 | 658692 | AC016127 | 1166 | 1-1584 |
| | | | | | 1639-1876 |
| HHGDT26 | 161 | 658692 | AC023989 | 1167 | 1-1584 |
| | | | | | 1639-1876 |
| HHPFU28 | 163 | 824573 | AC069200 | 1168 | 1-2595 |
| HHPFU28 | 163 | 824573 | AC069200 | 1169 | 1-3998 |
| HHPFU28 | 163 | 824573 | AC069200 | 1170 | 1-777 |
| HHPSA85 | 164 | 658695 | AL354831 | 1171 | 1-291 |
| | | | | | 2324-3412 |
| HHPSA85 | 164 | 658695 | AC018674 | 1172 | 1-291 |
| | | | | | 2324-3412 |
| HHSBI65 | 165 | 801910 | AF205589 | 1173 | 1-1703 |
| | | | | | 1798-2217 |
| | | | | | 2302-3089 |
| HHSBI65 | 165 | 801910 | AF205589 | 1174 | 1-531 |
| | | | | | 571-1759 |
| | | | | | 1862-2104 |
| | | | | | 2219-2722 |
| HHSDI53 | 166 | 862028 | AP001456 | 1175 | 1-1611 |
| | | | | | 1654-2020 |
| | | | | | 2187-2263 |
| HHSDI53 | 166 | 862028 | AL109936 | 1176 | 1-1611 |
| | | | | | 1654-2020 |
| | | | | | 2186-2322 |
| | | | | | 2673-3243 |
| | | | | | 3291-3857 |
| | | | | | 4276-4892 |
| | | | | | 5002-5380 |
| | | | | | 8185-8499 |
| | | | | | 8705-8842 |
| | | | | | 10146-10298 |
| | | | | | 12526-12652 |
| | | | | | 12780-14327 |
| HHSDI53 | 166 | 862028 | AP001456 | 1177 | 1-482 |
| HHSDI53 | 166 | 862028 | AL109936 | 1178 | 1-188 |
| HJMAV41 | 169 | 862029 | AC008998 | 1179 | 1-239 |
| | | | | | 975-1119 |
| | | | | | 1204-1298 |
| | | | | | 3076-3230 |
| | | | | | 4100-4205 |
| | | | | | 5256-5376 |
| | | | | | 5476-5596 |
| | | | | | 6626-6943 |
| | | | | | 7508-8143 |
| HJPCH08 | 173 | 840365 | AC004826 | 1180 | 1-71 |
| | | | | | 475-867 |
| | | | | | 2289-2390 |
| | | | | | 2475-2596 |
| | | | | | 3191-3333 |
| | | | | | 3458-3644 |
| | | | | | 3729-3859 |
| | | | | | 4038-4233 |
| | | | | | 4338-4451 |
| | | | | | 4558-4626 |
| | | | | | 4832-4977 |
| | | | | | 5108-5272 |
| | | | | | 5380-5622 |
| | | | | | 5698-5816 |
| | | | | | 5965-6067 |
| | | | | | 6380-6580 |
| | | | | | 6829-6920 |
| | | | | | 7162-7299 |
| | | | | | 7943-10018 |
| | | | | | 10503-10623 |
| | | | | | 10699-10776 |
| | | | | | 10917-11336 |
| | | | | | 12343-12406 |
| | | | | | 12731-13275 |
| HJPCH08 | 173 | 840365 | AC004826 | 1181 | 1-406 |
| | | | | | 862-1119 |
| | | | | | 1423-1689 |
| | | | | | 2886-2989 |
| | | | | | 5361-5431 |
| | | | | | 5969-6059 |
| | | | | | 6874-7181 |
| | | | | | 9823-9980 |
| | | | | | 10928-11194 |
| | | | | | 12667-12838 |
| | | | | | 17063-18165 |
| | | | | | 18168-18649 |
| | | | | | 18785-19579 |
| | | | | | 19733-19780 |
| | | | | | 20247-20355 |
| | | | | | 21063-21415 |
| | | | | | 21546-22630 |
| | | | | | 23320-23541 |
| | | | | | 24276-24323 |
| | | | | | 24510-24602 |
| | | | | | 24903-25357 |
| | | | | | 26015-27115 |
| | | | | | 27309-28272 |
| | | | | | 28601-28879 |
| | | | | | 29413-29552 |
| | | | | | 30539-30602 |
| | | | | | 30728-31110 |
| | | | | | 31231-31353 |
| | | | | | 32257-32325 |
| | | | | | 33895-34173 |
| | | | | | 35081-35392 |
| | | | | | 37763-37860 |
| | | | | | 38789-38822 |
| | | | | | 38920-39119 |
| HJPCH08 | 173 | 840365 | AC004826 | 1182 | 1-424 |
| | | | | | 2065-2241 |
| HKACI79 | 175 | 853361 | AC006512 | 1183 | 1-658 |
| | | | | | 3090-3543 |
| | | | | | 4479-5105 |
| | | | | | 5885-6846 |
| | | | | | 7103-9707 |
| | | | | | 9914-10293 |
| | | | | | 11523-12034 |
| | | | | | 12067-12181 |
| | | | | | 13769-14031 |
| | | | | | 14199-14291 |
| | | | | | 14584-14790 |
| | | | | | 15123-15154 |
| | | | | | 17039-17482 |
| | | | | | 17539-17987 |
| | | | | | 18697-19052 |
| | | | | | 19112-19380 |
| | | | | | 20023-20268 |
| | | | | | 21158-21598 |
| | | | | | 21817-22221 |
| | | | | | 23565-23665 |
| | | | | | 23906-24076 |
| | | | | | 24981-25506 |
| | | | | | 25510-25861 |
| | | | | | 25981-26645 |
| | | | | | 26661-27449 |
| | | | | | 27717-27812 |
| | | | | | 27991-28024 |
| | | | | | 28437-28888 |
| | | | | | 29651-33442 |
| | | | | | 33621-34089 |
| | | | | | 34245-34808 |
| | | | | | 34819-35284 |
| | | | | | 35854-35960 |
| | | | | | 38525-38771 |
| HKACI79 | 175 | 853361 | AC011841 | 1184 | 1-710 |
| | | | | | 902-1864 |
| | | | | | 1997-2121 |
| | | | | | 2334-3824 |
| | | | | | 4232-5905 |
| HKACI79 | 175 | 853361 | AC011043 | 1185 | 1-712 |
| | | | | | 904-1867 |
| | | | | | 1874-1906 |
| | | | | | 2000-2124 |
| | | | | | 2337-3891 |
| HKACI79 | 175 | 853361 | AC078939 | 1186 | 1-646 |
| | | | | | 837-1797 |
| | | | | | 1804-1836 |
| | | | | | 1930-3820 |
| | | | | | 4161-5834 |
| HKACI79 | 175 | 853361 | AC006512 | 1187 | 1-315 |
| | | | | | 439-531 |
| | | | | | 707-1080 |
| | | | | | 1144-1227 |
| | | | | | 1491-1845 |
| | | | | | 2113-2321 |
| | | | | | 2700-3556 |
| | | | | | 3818-4307 |
| | | | | | 4336-4813 |
| | | | | | 4958-5775 |
| HKACI79 | 175 | 853361 | AC006512 | 1188 | 1-738 |
| HKACI79 | 175 | 853361 | AC011841 | 1189 | 1-541 |
| HKACI79 | 175 | 853361 | AC011841 | 1190 | 1-105 |
| HKACI79 | 175 | 853361 | AC011043 | 1191 | 1-105 |
| HKACI79 | 175 | 853361 | AC078939 | 1192 | 1-564 |
| HKACI79 | 175 | 853361 | AC078939 | 1193 | 1-105 |
| HKGBF25 | 177 | 738797 | AL390999 | 1194 | 1-1996 |
| HKGBF25 | 177 | 738797 | AC012079 | 1195 | 1-1997 |
| HKMLM95 | 178 | 840367 | AC006372 | 1196 | 1-1625 |
| HKMLM95 | 178 | 840367 | AC006372 | 1197 | 1-764 |
| HKMLM95 | 178 | 840367 | AC006372 | 1198 | 1-259 |
| HLDBG17 | 179 | 855953 | AL161798 | 1199 | 1-1403 |
| HLHBS54 | 182 | 837503 | AL020996 | 1200 | 1-122 |
| | | | | | 973-1079 |
| | | | | | 3003-3636 |
| | | | | | 3733-4238 |
| | | | | | 5772-5955 |
| | | | | | 7540-7752 |
| | | | | | 7989-8112 |
| | | | | | 8643-8783 |
| | | | | | 10417-10491 |
| | | | | | 10647-10842 |
| | | | | | 11649-11762 |
| | | | | | 11922-12346 |
| | | | | | 12667-12760 |
| | | | | | 12832-12954 |
| | | | | | 13035-13141 |
| | | | | | 13358-13818 |
| | | | | | 14508-17386 |
| | | | | | 18605-18733 |
| HLHBS54 | 182 | 837503 | AL020996 | 1201 | 1-73 |
| | | | | | 275-708 |
| | | | | | 893-1047 |
| | | | | | 1096-1399 |
| | | | | | 1619-2003 |
| | | | | | 2288-2518 |
| | | | | | 2565-3369 |
| | | | | | 3500-3687 |
| | | | | | 3690-3794 |
| | | | | | 4245-4515 |
| | | | | | 4967-5882 |
| | | | | | 6346-6458 |
| | | | | | 6648-6872 |
| | | | | | 7729-8095 |
| | | | | | 9551-9877 |
| | | | | | 10983-11246 |
| | | | | | 11967-12988 |
| HLHCS23 | 183 | 560663 | AL356385 | 1202 | 1-1419 |
| HLHCS23 | 183 | 560663 | AC016501 | 1203 | 1-1419 |
| HLHCS23 | 183 | 560663 | AL356385 | 1204 | 1-560 |
| HLHCS23 | 183 | 560663 | AC016501 | 1205 | 1-560 |
| HLICO10 | 186 | 658740 | AL031685 | 1206 | 1-165 |
| | | | | | 1532-2565 |
| | | | | | 2618-3686 |
| | | | | | 4070-4320 |
| | | | | | 4665-5083 |
| | | | | | 5172-5547 |
| | | | | | 5902-6305 |
| | | | | | 7276-9100 |
| | | | | | 9742-9863 |
| | | | | | 10008-10531 |
| | | | | | 11381-11716 |
| | | | | | 12759-13260 |
| | | | | | 15686-17570 |
| HLICO10 | 186 | 658740 | AL031685 | 1207 | 1-182 |
| HLICO10 | 186 | 658740 | AL031685 | 1208 | 1-113 |
| HLJBS28 | 187 | 658742 | AC026779 | 1209 | 1-78 |
| | | | | | 2390-2473 |
| | | | | | 5457-7057 |
| HLJBS28 | 187 | 658742 | AC008482 | 1210 | 1-93 |
| | | | | | 1668-1990 |
| | | | | | 3077-4682 |
| HLJBS28 | 187 | 658742 | AC026779 | 1211 | 1-651 |
| HLJBS28 | 187 | 658742 | AC008482 | 1212 | 1-807 |
| HLMJB64 | 188 | 658699 | AL034550 | 1213 | 1-107 |
| | | | | | 122-1264 |
| | | | | | 1513-4478 |
| HLMJB64 | 188 | 658699 | AL034550 | 1214 | 1-147 |
| | | | | | 445-569 |
| | | | | | 1012-1217 |
| | | | | | 5637-5681 |
| HLMMX62 | 189 | 688051 | AL356320 | 1215 | 1-275 |
| HLMMX62 | 189 | 688051 | AL356320 | 1216 | 1-122 |
| HLMMX62 | 189 | 688051 | AL356320 | 1217 | 1-377 |
| HLQCX36 | 191 | 584786 | AC013758 | 1218 | 1-316 |
| HLQCX36 | 191 | 584786 | AC024953 | 1219 | 1-303 |
| HLQCX36 | 191 | 584786 | AC018740 | 1220 | 1-280 |
| | | | | | 942-1052 |
| HLQCX36 | 191 | 584786 | AC016539 | 1221 | 1-293 |
| HLQCX36 | 191 | 584786 | AC012278 | 1222 | 1-272 |
| HLQCX36 | 191 | 584786 | AC068854 | 1223 | 1-183 |
| HLQCX36 | 191 | 584786 | AC019205 | 1224 | 1-149 |
| HLQCX36 | 191 | 584786 | AC011175 | 1225 | 1-318 |
| HLQCX36 | 191 | 584786 | AL157366 | 1226 | 1-140 |
| HLQCX36 | 191 | 584786 | AC067890 | 1227 | 1-223 |
| HLQCX36 | 191 | 584786 | AC032044 | 1228 | 1-281 |
| HLQCX36 | 191 | 584786 | AC016615 | 1229 | 1-300 |
| HLQCX36 | 191 | 584786 | AC018753 | 1230 | 1-205 |
| HLQCX36 | 191 | 584786 | AC015900 | 1231 | 1-167 |
| HLQCX36 | 191 | 584786 | AL162592 | 1232 | 1-300 |
| HLQCX36 | 191 | 584786 | AC073568 | 1233 | 1-226 |
| HLQCX36 | 191 | 584786 | AC026967 | 1234 | 1-305 |
| HLQCX36 | 191 | 584786 | AC026107 | 1235 | 1-275 |
| HLQCX36 | 191 | 584786 | AC011127 | 1236 | 1-1365 |
| HLQCX36 | 191 | 584786 | AC034243 | 1237 | 1-312 |
| | | | | | 2334-2364 |
| HLQCX36 | 191 | 584786 | AL356441 | 1238 | 1-289 |
| HLQCX36 | 191 | 584786 | AC027531 | 1239 | 1-298 |
| HLQCX36 | 191 | 584786 | AC022950 | 1240 | 1-311 |
| HLQCX36 | 191 | 584786 | AC010958 | 1241 | 1-131 |
| HLQCX36 | 191 | 584786 | AC010073 | 1242 | 1-175 |
| HLQCX36 | 191 | 584786 | AP001397 | 1243 | 1-1365 |
| HLQCX36 | 191 | 584786 | AC055119 | 1244 | 1-320 |
| HLQCX36 | 191 | 584786 | AC027105 | 1245 | 1-308 |
| HLQCX36 | 191 | 584786 | AC022795 | 1246 | 1-300 |
| HLQCX36 | 191 | 584786 | AC018445 | 1247 | 1-140 |
| HLQCX36 | 191 | 584786 | AL358115 | 1248 | 1-142 |
| HLQCX36 | 191 | 584786 | AL355975 | 1249 | 1-322 |
| HLQCX36 | 191 | 584786 | AL096841 | 1250 | 1-281 |
| HLQCX36 | 191 | 584786 | AC027414 | 1251 | 1-270 |
| HLQCX36 | 191 | 584786 | AC023008 | 1252 | 1-296 |
| HLQCX36 | 191 | 584786 | AL357125 | 1253 | 1-278 |
| HLQCX36 | 191 | 584786 | AC073446 | 1254 | 1-299 |
| HLQCX36 | 191 | 584786 | AC015989 | 1255 | 1-1365 |
| HLQCX36 | 191 | 584786 | AC020873 | 1256 | 1-306 |
| HLQCX36 | 191 | 584786 | AC068854 | 1257 | 1-1087 |
| HLQCX36 | 191 | 584786 | AC018753 | 1258 | 1-523 |
| HLQCX36 | 191 | 584786 | AC011127 | 1259 | 1-686 |
| HLQCX36 | 191 | 584786 | AP001397 | 1260 | 1-98 |
| HLQCX36 | 191 | 584786 | AL358115 | 1261 | 1-2327 |
| HLQCX36 | 191 | 584786 | AC015989 | 1262 | 1-685 |
| HLQCX36 | 191 | 584786 | AC015989 | 1263 | 1-98 |
| HLQCX36 | 191 | 584786 | AC020873 | 1264 | 1-126 |
| HLWBB73 | 194 | 740757 | AL117352 | 1265 | 1-123 |
| | | | | | 1745-1979 |
| | | | | | 2193-2318 |
| | | | | | 3405-3541 |
| | | | | | 5983-6429 |
| | | | | | 6462-6536 |
| | | | | | 6985-7400 |
| | | | | | 7630-10558 |
| HLWBB73 | 194 | 740757 | AL358784 | 1266 | 1-123 |
| | | | | | 1743-1977 |
| | | | | | 2191-2316 |
| | | | | | 3403-3539 |
| | | | | | 5981-6427 |
| | | | | | 6460-6534 |
| | | | | | 6983-7398 |
| | | | | | 7627-10554 |
| HLWBB73 | 194 | 740757 | AC011945 | 1267 | 1-2915 |
| HLWBB73 | 194 | 740757 | AL117352 | 1268 | 1-1016 |
| HLWBB73 | 194 | 740757 | AL358784 | 1269 | 1-1016 |
| HLWBB73 | 194 | 740757 | AC011945 | 1270 | 1-416 |
| HLWBB73 | 194 | 740757 | AC011945 | 1271 | 1-1016 |
| HLYAR30 | 197 | 781249 | AC018391 | 1272 | 1-3570 |
| | | | | | 3779-3904 |
| | | | | | 4646-5979 |
| | | | | | 6339-6701 |
| | | | | | 6710-8473 |
| HLYAR30 | 197 | 781249 | AC018391 | 1273 | 1-438 |
| HLYAR30 | 197 | 781249 | AC018391 | 1274 | 1-1402 |
| | | | | | 1586-1871 |
| | | | | | 2685-2797 |
| | | | | | 3088-3503 |
| | | | | | 4900-5170 |
| | | | | | 5789-5882 |
| | | | | | 6089-6195 |
| HLYEU59 | 199 | 582084 | AC024338 | 1275 | 1-1121 |
| HLYEU59 | 199 | 582084 | AC023270 | 1276 | 1-1121 |
| HLYEU59 | 199 | 582084 | AC024338 | 1277 | 1-498 |
| HLYEU59 | 199 | 582084 | AC023270 | 1278 | 1-498 |
| HLYGE16 | 201 | 651339 | AC025594 | 1279 | 1-272 |
| | | | | | 301-388 |
| | | | | | 531-1439 |
| | | | | | 1461-3200 |
| HLYGE16 | 201 | 651339 | AC073849 | 1280 | 1-272 |
| | | | | | 301-388 |
| | | | | | 531-1439 |
| | | | | | 1461-3200 |
| HLYGE16 | 201 | 651339 | AC025594 | 1281 | 1-337 |
| HLYGE16 | 201 | 651339 | AC073849 | 1282 | 1-337 |
| HMCFH60 | 202 | 654853 | AL122034 | 1283 | 1-785 |
| | | | | | 1072-3055 |
| HMCFH60 | 202 | 654853 | AC073394 | 1284 | 1-326 |
| | | | | | 1898-2079 |
| | | | | | 2460-2702 |
| | | | | | 4498-4586 |
| | | | | | 5598-7296 |
| | | | | | 7560-7669 |
| | | | | | 8015-8460 |
| | | | | | 8479-8539 |
| | | | | | 8918-9242 |
| | | | | | 10451-10975 |
| | | | | | 13375-13521 |
| | | | | | 13561-15769 |
| | | | | | 16055-18038 |
| HMCFH60 | 202 | 654853 | AL160264 | 1285 | 1-86 |
| | | | | | 1101-2799 |
| | | | | | 3063-3172 |
| | | | | | 3518-3963 |
| | | | | | 3982-4042 |
| | | | | | 4421-4745 |
| | | | | | 5954-6478 |
| | | | | | 8877-9023 |
| | | | | | 9063-11271 |
| | | | | | 11557-13540 |
| HMCFH60 | 202 | 654853 | AC073394 | 1286 | 1-309 |
| HMCFH60 | 202 | 654853 | AC073394 | 1287 | 1-577 |
| HMDAB29 | 203 | 584789 | AC027264 | 1288 | 1-147 |
| HMDAB29 | 203 | 584789 | AC068682 | 1289 | 1-153 |
| HMDAB29 | 203 | 584789 | AL354887 | 1290 | 1-1433 |
| HMDAB29 | 203 | 584789 | AL157408 | 1291 | 1-1434 |
| HMDAB29 | 203 | 584789 | AL354887 | 1292 | 1-577 |
| HMDAB29 | 203 | 584789 | AL354887 | 1293 | 1-196 |
| HMDAB29 | 203 | 584789 | AL157408 | 1294 | 1-577 |
| HMDAB29 | 203 | 584789 | AL157408 | 1295 | 1-196 |
| HMDAD44 | 204 | 566854 | AC012370 | 1296 | 1-145 |
| | | | | | 2813-4454 |
| HMDAD44 | 204 | 566854 | AC034121 | 1297 | 1-1569 |
| HMDAD44 | 204 | 566854 | AC012370 | 1298 | 1-787 |
| HMDAD44 | 204 | 566854 | AC012370 | 1299 | 1-622 |
| HMEDE24 | 205 | 837027 | AC011078 | 1300 | 1-297 |
| | | | | | 359-416 |
| | | | | | 3247-3653 |
| | | | | | 6083-6236 |
| | | | | | 9753-10036 |
| | | | | | 11128-11233 |
| | | | | | 12148-12514 |
| | | | | | 12635-13141 |
| | | | | | 15604-16463 |
| | | | | | 19071-19190 |
| | | | | | 19476-20232 |
| | | | | | 20321-20638 |
| | | | | | 21200-21594 |
| | | | | | 21959-22219 |
| | | | | | 23120-23362 |
| | | | | | 23467-24143 |
| | | | | | 24766-24853 |
| | | | | | 25725-26143 |
| | | | | | 26310-26455 |
| | | | | | 27545-30619 |
| | | | | | 30708-31169 |
| HMIAK10 | 206 | 562774 | AP000817 | 1301 | 1-1044 |
| HMIAK10 | 206 | 562774 | AC024177 | 1302 | 1-1047 |
| HMIAK10 | 206 | 562774 | AC011009 | 1303 | 1-1047 |
| HMICI80 | 207 | 827318 | AC008790 | 1304 | 1-2743 |
| HMICI80 | 207 | 827318 | AC066693 | 1305 | 1-2743 |
| HMICI80 | 207 | 827318 | AC008790 | 1306 | 1-377 |
| HMICI80 | 207 | 827318 | AC066693 | 1307 | 1-377 |
| HMICP65 | 208 | 847403 | AL162741 | 1308 | 1-45 |
| HMICP65 | 208 | 847403 | AL162741 | 1309 | 1-102 |
| HMQAI38 | 210 | 589964 | AC000403 | 1310 | 1-32 |
| | | | | | 225-465 |
| | | | | | 3716-3779 |
| | | | | | 3917-4243 |
| | | | | | 5065-5157 |
| | | | | | 6778-6987 |
| | | | | | 7684-7829 |
| | | | | | 8473-10115 |
| HMQAI38 | 210 | 589964 | AL136440 | 1311 | 1-64 |
| | | | | | 202-528 |
| | | | | | 1350-1439 |
| | | | | | 3073-3276 |
| | | | | | 3973-4099 |
| | | | | | 4762-6404 |
| HMSHU20 | 214 | 847410 | AL354889 | 1312 | 1-43 |
| | | | | | 642-699 |
| | | | | | 1506-4529 |
| HMSHU20 | 214 | 847410 | AL161660 | 1313 | 1-3030 |
| HMSHU20 | 214 | 847410 | AL354889 | 1314 | 1-713 |
| HMSHU20 | 214 | 847410 | AL161660 | 1315 | 1-1063 |
| HNECL22 | 220 | 799541 | AF216674 | 1316 | 1-2837 |
| HNECL22 | 220 | 799541 | AC051642 | 1317 | 1-2201 |
| HNECL22 | 220 | 799541 | AF216674 | 1318 | 1-462 |
| HNECL22 | 220 | 799541 | AF216674 | 1319 | 1-836 |
| HNECL22 | 220 | 799541 | AC051642 | 1320 | 1-462 |
| HNECW49 | 221 | 639117 | AC011864 | 1321 | 1-522 |
| HNECW49 | 221 | 639117 | AC011864 | 1322 | 1-607 |
| HNECW49 | 221 | 639117 | AC011864 | 1323 | 1-741 |
| HNGAM58 | 225 | 688114 | AP000023 | 1324 | 1-104 |
| | | | | | 106-313 |
| HNGAM58 | 225 | 688114 | AL353625 | 1325 | 1-1881 |
| | | | | | 2735-2808 |
| | | | | | 3883-4043 |
| | | | | | 5519-5602 |
| | | | | | 5702-5845 |
| | | | | | 6903-7175 |
| | | | | | 9926-10120 |
| | | | | | 11625-12238 |
| | | | | | 12343-12673 |
| | | | | | 12887-13212 |
| | | | | | 13309-13473 |
| | | | | | 13482-13691 |
| | | | | | 14962-15187 |
| | | | | | 15799-16641 |
| | | | | | 17298-17447 |
| | | | | | 18403-18517 |
| | | | | | 21404-21557 |
| | | | | | 22366-22603 |
| | | | | | 22625-23551 |
| | | | | | 25581-25730 |
| | | | | | 26277-26682 |
| | | | | | 26765-26975 |
| | | | | | 28188-28352 |
| | | | | | 30552-30705 |
| | | | | | 32576-32797 |
| | | | | | 33083-33326 |
| | | | | | 33654-33791 |
| | | | | | 34515-34643 |
| | | | | | 36494-36685 |
| | | | | | 37580-37916 |
| | | | | | 38168-38308 |
| | | | | | 38903-39515 |
| | | | | | 41650-41749 |
| | | | | | 42020-42153 |
| | | | | | 42920-43144 |
| | | | | | 43218-43346 |
| | | | | | 43937-44019 |
| | | | | | 44180-44379 |
| | | | | | 44623-44800 |
| | | | | | 44905-45050 |
| | | | | | 45835-46036 |
| | | | | | 47456-47567 |
| HNGAM58 | 225 | 688114 | AL136325 | 1326 | 1-308 |
| HNGAM58 | 225 | 688114 | AL078472 | 1327 | 1-114 |
| | | | | | 116-323 |
| HNGAM58 | 225 | 688114 | AL049776 | 1328 | 1-229 |
| | | | | | 1654-1686 |
| | | | | | 1809-1912 |
| | | | | | 3738-4062 |
| HNGAM58 | 225 | 688114 | AL031176 | 1329 | 1-310 |
| HNGAM58 | 225 | 688114 | AL022329 | 1330 | 1-255 |
| HNGAM58 | 225 | 688114 | AL022302 | 1331 | 1-97 |
| | | | | | 591-698 |
| | | | | | 4315-4635 |
| HNGAM58 | 225 | 688114 | AF111169 | 1332 | 1-287 |
| HNGAM58 | 225 | 688114 | AF001550 | 1333 | 1-313 |
| HNGAM58 | 225 | 688114 | AC009303 | 1334 | 1-320 |
| | | | | | 5298-5444 |
| | | | | | 5797-6110 |
| HNGAM58 | 225 | 688114 | AC008958 | 1335 | 1-300 |
| | | | | | 1024-1341 |
| | | | | | 2289-2604 |
| HNGAM58 | 225 | 688114 | AC008554 | 1336 | 1-306 |
| HNGAM58 | 225 | 688114 | AC008101 | 1337 | 1-115 |
| | | | | | 165-466 |
| | | | | | 966-1404 |
| | | | | | 1633-1705 |
| | | | | | 1926-2060 |
| | | | | | 3344-3376 |
| | | | | | 3578-3674 |
| | | | | | 3887-4181 |
| | | | | | 6025-6290 |
| | | | | | 10101-10428 |
| | | | | | 10551-10654 |
| | | | | | 11804-11921 |
| | | | | | 12916-13092 |
| | | | | | 14481-14684 |
| | | | | | 15589-15954 |
| | | | | | 16784-17082 |
| | | | | | 17091-17304 |
| | | | | | 18309-18919 |
| | | | | | 19343-19668 |
| | | | | | 20553-20853 |
| | | | | | 25924-26171 |
| | | | | | 26200-26512 |
| | | | | | 27209-27666 |
| HNGAM58 | 225 | 688114 | AC008079 | 1338 | 1-627 |
| | | | | | 2228-2466 |
| | | | | | 3557-3606 |
| | | | | | 4115-4251 |
| | | | | | 4459-4879 |
| | | | | | 5931-6271 |
| | | | | | 6478-6648 |
| | | | | | 7457-7555 |
| | | | | | 9361-9509 |
| | | | | | 9666-9964 |
| | | | | | 10062-10151 |
| | | | | | 12863-13276 |
| | | | | | 13550-13664 |
| | | | | | 13714-14020 |
| | | | | | 14515-14953 |
| | | | | | 15183-15255 |
| | | | | | 15463-15610 |
| | | | | | 16895-16927 |
| | | | | | 17129-17225 |
| | | | | | 17423-17724 |
| | | | | | 19577-19842 |
| | | | | | 23640-23967 |
| | | | | | 24090-24252 |
| | | | | | 26455-26631 |
| | | | | | 29128-29493 |
| | | | | | 30323-30621 |
| | | | | | 30630-30843 |
| | | | | | 31848-32458 |
| | | | | | 32882-33207 |
| | | | | | 34093-34392 |
| | | | | | 39463-39710 |
| | | | | | 39737-40052 |
| | | | | | 40755-41206 |
| HNGAM58 | 225 | 688114 | AC008008 | 1339 | 1-315 |
| HNGAM58 | 225 | 688114 | AC007666 | 1340 | 1-299 |
| HNGAM58 | 225 | 688114 | AC007619 | 1341 | 1-211 |
| HNGAM58 | 225 | 688114 | AC007324 | 1342 | 1-299 |
| HNGAM58 | 225 | 688114 | AC006965 | 1343 | 1-174 |
| HNGAM58 | 225 | 688114 | AC006946 | 1344 | 1-308 |
| HNGAM58 | 225 | 688114 | AC006548 | 1345 | 1-308 |
| HNGAM58 | 225 | 688114 | AC005846 | 1346 | 1-465 |
| HNGAM58 | 225 | 688114 | AC005598 | 1347 | 1-318 |
| HNGAM58 | 225 | 688114 | AC005594 | 1348 | 1-1731 |
| | | | | | 2759-3460 |
| | | | | | 4610-4721 |
| | | | | | 6663-6905 |
| | | | | | 7470-7615 |
| | | | | | 7961-8099 |
| | | | | | 8133-8446 |
| | | | | | 9437-9675 |
| | | | | | 10398-10546 |
| | | | | | 11600-11958 |
| | | | | | 12691-12876 |
| | | | | | 13531-13671 |
| | | | | | 14345-14499 |
| | | | | | 15652-15734 |
| | | | | | 17947-18305 |
| | | | | | 18918-19598 |
| | | | | | 20151-20330 |
| | | | | | 22326-22428 |
| HNGAM58 | 225 | 688114 | AC005342 | 1349 | 1-210 |
| HNGAM58 | 225 | 688114 | AC005221 | 1350 | 1-737 |
| HNGAM58 | 225 | 688114 | AC004477 | 1351 | 1-138 |
| HNGAM58 | 225 | 688114 | AC004460 | 1352 | 1-290 |
| | | | | | 747-4223 |
| | | | | | 4433-4702 |
| HNGAM58 | 225 | 688114 | AC004019 | 1353 | 1-299 |
| HNGAM58 | 225 | 688114 | AC002519 | 1354 | 1-295 |
| HNGAM58 | 225 | 688114 | AC002476 | 1355 | 1-40 |
| | | | | | 4020-4364 |
| HNGAM58 | 225 | 688114 | AC073220 | 1356 | 1-311 |
| | | | | | 766-4242 |
| | | | | | 4507-4721 |
| HNGAM58 | 225 | 688114 | AC019126 | 1357 | 1-1000 |
| | | | | | 1425-1500 |
| | | | | | 3144-3288 |
| | | | | | 4770-5081 |
| | | | | | 5584-5635 |
| HNGAM58 | 225 | 688114 | AC016772 | 1358 | 1-209 |
| HNGAM58 | 225 | 688114 | AC015804 | 1359 | 1-139 |
| HNGAM58 | 225 | 688114 | AC007194 | 1360 | 1-108 |
| HNGAM58 | 225 | 688114 | AC011740 | 1361 | 1-138 |
| HNGAM58 | 225 | 688114 | AL138740 | 1362 | 1-323 |
| HNGAM58 | 225 | 688114 | AL135839 | 1363 | 1-115 |
| | | | | | 161-358 |
| HNGAM58 | 225 | 688114 | AC022148 | 1364 | 1-427 |
| HNGAM58 | 225 | 688114 | Z82199 | 1365 | 1-549 |
| HNGAM58 | 225 | 688114 | AJ239319 | 1366 | 1-335 |
| | | | | | 1031-1609 |
| | | | | | 1922-2102 |
| | | | | | 4742-4918 |
| | | | | | 4925-5059 |
| HNGAM58 | 225 | 688114 | AC023221 | 1367 | 1-129 |
| HNGAM58 | 225 | 688114 | AC011994 | 1368 | 1-1939 |
| HNGAM58 | 225 | 688114 | AC011330 | 1369 | 1-139 |
| HNGAM58 | 225 | 688114 | AL121956 | 1370 | 1-1881 |
| | | | | | 2735-2808 |
| | | | | | 3883-4043 |
| | | | | | 5519-5602 |
| | | | | | 5702-5845 |
| | | | | | 6903-7175 |
| | | | | | 9926-10120 |
| | | | | | 11625-12238 |
| | | | | | 12343-12673 |
| | | | | | 12887-13212 |
| | | | | | 13309-13473 |
| | | | | | 13482-13691 |
| | | | | | 14962-15187 |
| | | | | | 15799-16641 |
| | | | | | 17298-17447 |
| | | | | | 18403-18517 |
| | | | | | 21404-21557 |
| | | | | | 22366-22603 |
| | | | | | 22625-23551 |
| | | | | | 25581-25730 |
| | | | | | 26277-26682 |
| | | | | | 26765-26975 |
| | | | | | 28188-28352 |
| | | | | | 30552-30705 |
| | | | | | 32576-32797 |
| | | | | | 33083-33326 |
| | | | | | 33654-33791 |
| | | | | | 34515-34643 |
| | | | | | 36494-36685 |
| | | | | | 37580-37916 |
| | | | | | 38168-38308 |
| | | | | | 38903-39515 |
| | | | | | 41650-41749 |
| | | | | | 42020-42153 |
| | | | | | 42920-43144 |
| | | | | | 43218-43346 |
| | | | | | 43937-44019 |
| | | | | | 44180-44379 |
| | | | | | 44623-44800 |
| | | | | | 44905-45050 |
| | | | | | 45835-46036 |
| | | | | | 47456-47567 |
| HNGAM58 | 225 | 688114 | AL354950 | 1371 | 1-141 |
| HNGAM58 | 225 | 688114 | AL160471 | 1372 | 1-803 |
| | | | | | 1156-1259 |
| | | | | | 3445-3580 |
| | | | | | 3733-3821 |
| | | | | | 8085-13120 |
| | | | | | 13277-13410 |
| | | | | | 14706-14802 |
| | | | | | 16142-16310 |
| | | | | | 16698-16741 |
| | | | | | 17373-17479 |
| | | | | | 20963-21108 |
| | | | | | 21604-21661 |
| | | | | | 21848-21963 |
| | | | | | 22062-22282 |
| | | | | | 22767-22904 |
| | | | | | 28319-28430 |
| | | | | | 31284-31384 |
| | | | | | 34181-34362 |
| | | | | | 35804-36251 |
| | | | | | 38170-38635 |
| | | | | | 39137-39685 |
| | | | | | 39978-40068 |
| | | | | | 40645-41002 |
| | | | | | 41212-41423 |
| | | | | | 43834-43966 |
| | | | | | 46252-46498 |
| | | | | | 47334-48322 |
| | | | | | 49425-49722 |
| | | | | | 50320-50738 |
| | | | | | 54716-54877 |
| HNGAM58 | 225 | 688114 | AC027130 | 1373 | 1-312 |
| HNGAM58 | 225 | 688114 | AC021669 | 1374 | 1-140 |
| HNGAM58 | 225 | 688114 | AC012620 | 1375 | 1-167 |
| HNGAM58 | 225 | 688114 | AC012124 | 1376 | 1-741 |
| | | | | | 2154-2713 |
| | | | | | 5013-5152 |
| | | | | | 5488-5667 |
| HNGAM58 | 225 | 688114 | AL157832 | 1377 | 1-141 |
| HNGAM58 | 225 | 688114 | AC022454 | 1378 | 1-153 |
| HNGAM58 | 225 | 688114 | AL357518 | 1379 | 1-131 |
| HNGAM58 | 225 | 688114 | AC004971 | 1380 | 1-124 |
| | | | | | 1636-1805 |
| | | | | | 3545-3919 |
| | | | | | 5034-5269 |
| | | | | | 5857-6264 |
| | | | | | 6457-6771 |
| | | | | | 6927-7080 |
| | | | | | 7527-7850 |
| | | | | | 7906-8247 |
| HNGAM58 | 225 | 688114 | AP000023 | 1381 | 1-83 |
| HNGAM58 | 225 | 688114 | AL353625 | 1382 | 1-354 |
| HNGAM58 | 225 | 688114 | AL136325 | 1383 | 1-149 |
| HNGAM58 | 225 | 688114 | AL078472 | 1384 | 1-83 |
| HNGAM58 | 225 | 688114 | AL022329 | 1385 | 1-636 |
| HNGAM58 | 225 | 688114 | AL022302 | 1386 | 1-101 |
| HNGAM58 | 225 | 688114 | AL022302 | 1387 | 1-461 |
| HNGAM58 | 225 | 688114 | AF111169 | 1388 | 1-101 |
| HNGAM58 | 225 | 688114 | AC009303 | 1389 | 1-222 |
| HNGAM58 | 225 | 688114 | AC008958 | 1390 | 1-374 |
| HNGAM58 | 225 | 688114 | AC008554 | 1391 | 1-100 |
| HNGAM58 | 225 | 688114 | AC008101 | 1392 | 1-159 |
| HNGAM58 | 225 | 688114 | AC008079 | 1393 | 1-159 |
| HNGAM58 | 225 | 688114 | AC008079 | 1394 | 1-73 |
| | | | | | 300-338 |
| | | | | | 801-1164 |
| | | | | | 3740-5359 |
| | | | | | 5459-6041 |
| HNGAM58 | 225 | 688114 | AC008008 | 1395 | 1-656 |
| HNGAM58 | 225 | 688114 | AC007666 | 1396 | 1-90 |
| | | | | | 145-413 |
| HNGAM58 | 225 | 688114 | AC007324 | 1397 | 1-214 |
| | | | | | 1219-1829 |
| HNGAM58 | 225 | 688114 | AC007324 | 1398 | 1-300 |
| HNGAM58 | 225 | 688114 | AC006965 | 1399 | 1-168 |
| HNGAM58 | 225 | 688114 | AC006946 | 1400 | 1-83 |
| HNGAM58 | 225 | 688114 | AC006548 | 1401 | 1-83 |
| HNGAM58 | 225 | 688114 | AC005598 | 1402 | 1-279 |
| HNGAM58 | 225 | 688114 | AC005598 | 1403 | 1-471 |
| HNGAM58 | 225 | 688114 | AC005594 | 1404 | 1-232 |
| HNGAM58 | 225 | 688114 | AC005221 | 1405 | 1-334 |
| | | | | | 1068-1453 |
| | | | | | 1964-2261 |
| | | | | | 2279-2734 |
| | | | | | 3142-3837 |
| | | | | | 3844-4120 |
| | | | | | 5655-6150 |
| HNGAM58 | 225 | 688114 | AC004477 | 1406 | 1-114 |
| HNGAM58 | 225 | 688114 | AC004460 | 1407 | 1-327 |
| HNGAM58 | 225 | 688114 | AC004019 | 1408 | 1-90 |
| | | | | | 145-413 |
| HNGAM58 | 225 | 688114 | AC002476 | 1409 | 1-232 |
| HNGAM58 | 225 | 688114 | AC073220 | 1410 | 1-327 |
| HNGAM58 | 225 | 688114 | AC019126 | 1411 | 1-84 |
| HNGAM58 | 225 | 688114 | AC019126 | 1412 | 1-510 |
| HNGAM58 | 225 | 688114 | AC016772 | 1413 | 1-90 |
| | | | | | 270-523 |
| | | | | | 1613-1654 |
| | | | | | 2621-2727 |
| | | | | | 4508-4585 |
| | | | | | 4669-4747 |
| | | | | | 5079-5131 |
| HNGAM58 | 225 | 688114 | AC016772 | 1414 | 1-554 |
| HNGAM58 | 225 | 688114 | AC015804 | 1415 | 1-456 |
| HNGAM58 | 225 | 688114 | AC015804 | 1416 | 1-157 |
| HNGAM58 | 225 | 688114 | AC011740 | 1417 | 1-382 |
| | | | | | 1357-2450 |
| | | | | | 4643-5158 |
| HNGAM58 | 225 | 688114 | AC011740 | 1418 | 1-125 |
| HNGAM58 | 225 | 688114 | AL135839 | 1419 | 1-87 |
| HNGAM58 | 225 | 688114 | AC022148 | 1420 | 1-780 |
| HNGAM58 | 225 | 688114 | Z82199 | 1421 | 1-1459 |
| HNGAM58 | 225 | 688114 | Z82199 | 1422 | 1-396 |
| HNGAM58 | 225 | 688114 | AJ239319 | 1423 | 1-129 |
| HNGAM58 | 225 | 688114 | AC023221 | 1424 | 1-130 |
| HNGAM58 | 225 | 688114 | AC011330 | 1425 | 1-465 |
| HNGAM58 | 225 | 688114 | AL121956 | 1426 | 1-354 |
| HNGAM58 | 225 | 688114 | AL354950 | 1427 | 1-485 |
| HNGAM58 | 225 | 688114 | AL354950 | 1428 | 1-116 |
| HNGAM58 | 225 | 688114 | AL160471 | 1429 | 1-244 |
| | | | | | 834-940 |
| | | | | | 969-1079 |
| | | | | | 1473-1628 |
| HNGAM58 | 225 | 688114 | AL160471 | 1430 | 1-1366 |
| HNGAM58 | 225 | 688114 | AC021669 | 1431 | 1-786 |
| HNGAM58 | 225 | 688114 | AL157832 | 1432 | 1-485 |
| HNGAM58 | 225 | 688114 | AL157832 | 1433 | 1-116 |
| HNGAM58 | 225 | 688114 | AC004971 | 1434 | 1-913 |
| HNGBH53 | 226 | 532614 | AP001095 | 1435 | 1-634 |
| HNGBH53 | 226 | 532614 | AC007902 | 1436 | 1-634 |
| HNGDX18 | 227 | 1145071 | AL391069 | 1437 | 1-1403 |
| HNGDX18 | 227 | 1145071 | AL158846 | 1438 | 1-193 |
| | | | | | 208-577 |
| | | | | | 894-1167 |
| | | | | | 1401-1629 |
| | | | | | 1918-3320 |
| | | | | | 4039-4082 |
| | | | | | 9400-10337 |
| HNGDX18 | 227 | 1145071 | AL391069 | 1439 | 1-274 |
| HNGDX18 | 227 | 1145071 | AL158846 | 1440 | 1-117 |
| HNGDY34 | 228 | 566863 | AC069508 | 1441 | 1-998 |
| HNGDY34 | 228 | 566863 | AC017028 | 1442 | 1-998 |
| HNGDY34 | 228 | 566863 | AC022705 | 1443 | 1-998 |
| HNGDY34 | 228 | 566863 | AC069508 | 1444 | 1-314 |
| HNGDY34 | 228 | 566863 | AC017028 | 1445 | 1-314 |
| HNGDY34 | 228 | 566863 | AC022705 | 1446 | 1-314 |
| HNGEQ75 | 229 | 535723 | AC009729 | 1447 | 1-1899 |
| HNGEQ75 | 229 | 535723 | AC009729 | 1448 | 1-104 |
| HNGFR54 | 230 | 695748 | AC007316 | 1449 | 1-456 |
| HNGFR54 | 230 | 695748 | AC007316 | 1450 | 1-260 |
| HNGHK37 | 233 | 609889 | AC023177 | 1451 | 1-1532 |
| HNGHZ69 | 234 | 899289 | AC011239 | 1452 | 1-1190 |
| HNGHZ69 | 234 | 899289 | AC011239 | 1453 | 1-432 |
| HNGJB41 | 236 | 852178 | AC004542 | 1454 | 1-108 |
| | | | | | 192-278 |
| | | | | | 349-470 |
| | | | | | 678-804 |
| | | | | | 2945-4433 |
| | | | | | 4687-4749 |
| | | | | | 5583-5951 |
| | | | | | 6304-6501 |
| | | | | | 7398-7867 |
| | | | | | 10583-10956 |
| | | | | | 11008-11440 |
| | | | | | 11603-11875 |
| | | | | | 12070-12473 |
| HNGJB41 | 236 | 852178 | AC004542 | 1455 | 1-976 |
| HNGKT41 | 237 | 836061 | AC008581 | 1456 | 1-1099 |
| HNGNK44 | 238 | 834949 | AC011474 | 1457 | 1-1181 |
| HNGNO53 | 239 | 836063 | AC023387 | 1458 | 1-869 |
| HNGNO53 | 239 | 836063 | AL355500 | 1459 | 1-851 |
| HNGPJ25 | 240 | 834942 | AP002781 | 1460 | 1-1472 |
| HNHGK22 | 243 | 597451 | AC073193 | 1461 | 1-898 |
| HNHGK22 | 243 | 597451 | AC073193 | 1462 | 1-306 |
| HNHHB10 | 244 | 634589 | AC006275 | 1463 | 1-886 |
| HNHHB10 | 244 | 634589 | AC006275 | 1464 | 1-103 |
| HNTMH79 | 246 | 801921 | AL354986 | 1465 | 1-105 |
| | | | | | 2142-2322 |
| | | | | | 3037-3115 |
| | | | | | 3592-3934 |
| | | | | | 6365-6476 |
| | | | | | 6825-6912 |
| | | | | | 7486-11168 |
| HNTMH79 | 246 | 801921 | AL357500 | 1466 | 1-402 |
| | | | | | 684-807 |
| | | | | | 1045-1149 |
| | | | | | 1642-1887 |
| | | | | | 3186-3374 |
| | | | | | 4081-4159 |
| | | | | | 4636-4978 |
| | | | | | 7409-7520 |
| | | | | | 7869-7956 |
| | | | | | 8530-12212 |
| HNTMH79 | 246 | 801921 | AC025145 | 1467 | 1-105 |
| | | | | | 1122-4804 |
| HNTMH79 | 246 | 801921 | AL354986 | 1468 | 1-661 |
| HNTMH79 | 246 | 801921 | AL354986 | 1469 | 1-124 |
| HNTMH79 | 246 | 801921 | AL357500 | 1470 | 1-661 |
| HNTMH79 | 246 | 801921 | AL357500 | 1471 | 1-518 |
| HNTMH79 | 246 | 801921 | AC025145 | 1472 | 1-661 |
| HODAG07 | 247 | 655356 | AC004061 | 1473 | 1-875 |
| HODAG07 | 247 | 655356 | AC004061 | 1474 | 1-524 |
| HODBB70 | 248 | 520196 | AC006322 | 1475 | 1-561 |
| HODBB70 | 248 | 520196 | AC073110 | 1476 | 1-561 |
| HODBB70 | 248 | 520196 | AC025553 | 1477 | 1-561 |
| HODBB70 | 248 | 520196 | AC006322 | 1478 | 1-1741 |
| HODBB70 | 248 | 520196 | AC006322 | 1479 | 1-354 |
| HODBB70 | 248 | 520196 | AC073110 | 1480 | 1-1741 |
| HODBB70 | 248 | 520196 | AC073110 | 1481 | 1-354 |
| HODCZ32 | 249 | 836069 | AF064861 | 1482 | 1-124 |
| | | | | | 381-660 |
| | | | | | 1835-2487 |
| | | | | | 2976-3577 |
| | | | | | 3785-3919 |
| HODCZ32 | 249 | 836069 | AF129408 | 1483 | 1-124 |
| | | | | | 397-689 |
| | | | | | 1835-2487 |
| | | | | | 2976-3577 |
| | | | | | 3785-3919 |
| HODCZ32 | 249 | 836069 | AF064861 | 1484 | 1-237 |
| HODCZ32 | 249 | 836069 | AF064861 | 1485 | 1-302 |
| HODCZ32 | 249 | 836069 | AF129408 | 1486 | 1-237 |
| HODCZ32 | 249 | 836069 | AF129408 | 1487 | 1-302 |
| HORBS82 | 255 | 638293 | AL034419 | 1488 | 1-1798 |
| HORBS82 | 255 | 638293 | AL034419 | 1489 | 1-1186 |
| HOSEC25 | 257 | 688055 | AL353685 | 1490 | 1-950 |
| HOSEC25 | 257 | 688055 | AL353685 | 1491 | 1-112 |
| HOSEC25 | 257 | 688055 | AL353685 | 1492 | 1-83 |
| | | | | | 1024-4469 |
| HOUCA21 | 260 | 655359 | AP001915 | 1493 | 1-209 |
| HOUCA21 | 260 | 655359 | AC011168 | 1494 | 1-159 |
| HOUCA21 | 260 | 655359 | AC024518 | 1495 | 1-184 |
| HOUCA21 | 260 | 655359 | AC024490 | 1496 | 1-232 |
| HOUCA21 | 260 | 655359 | AC068588 | 1497 | 1-104 |
| HOUCA21 | 260 | 655359 | AC040977 | 1498 | 1-117 |
| HOUCA21 | 260 | 655359 | AC069267 | 1499 | 1-161 |
| HOUCA21 | 260 | 655359 | AC036207 | 1500 | 1-501 |
| | | | | | 2219-2327 |
| | | | | | 2469-3724 |
| | | | | | 3843-3954 |
| | | | | | 5309-5977 |
| | | | | | 6011-6310 |
| | | | | | 6648-6833 |
| HOUCA21 | 260 | 655359 | AC068588 | 1501 | 1-489 |
| HOUCA21 | 260 | 655359 | AC036207 | 1502 | 1-284 |
| HOUCA21 | 260 | 655359 | AC036207 | 1503 | 1-186 |
| HOUDE92 | 261 | 580866 | AC005865 | 1504 | 1-173 |
| | | | | | 553-629 |
| | | | | | 1941-2042 |
| | | | | | 2757-2891 |
| | | | | | 3294-3378 |
| | | | | | 4606-5498 |
| | | | | | 5550-8125 |
| HOVBD85 | 266 | 827362 | AC026132 | 1505 | 1-1111 |
| HOVBD85 | 266 | 827362 | AC026132 | 1506 | 1-315 |
| HPCAB41 | 267 | 758003 | AC022702 | 1507 | 1-2582 |
| HPCAB41 | 267 | 758003 | AC022702 | 1508 | 1-701 |
| | | | | | 1327-1761 |
| | | | | | 2233-2581 |
| | | | | | 2798-3345 |
| HPCAB41 | 267 | 758003 | AC022702 | 1509 | 1-262 |
| HPCAL26 | 268 | 762822 | AP000654 | 1510 | 1-4150 |
| HPFCI36 | 270 | 855966 | AL161652 | 1511 | 1-174 |
| | | | | | 313-4710 |
| HPJBU43 | 272 | 862058 | AC009285 | 1512 | 1-336 |
| | | | | | 1048-1292 |
| | | | | | 2890-3083 |
| | | | | | 3358-3823 |
| | | | | | 3853-4133 |
| | | | | | 4626-5204 |
| HPMBX22 | 273 | 702012 | AP002360 | 1513 | 1-3049 |
| HPMBX22 | 273 | 702012 | AC015480 | 1514 | 1-1153 |
| HPMBX22 | 273 | 702012 | AC022183 | 1515 | 1-3048 |
| HPMBX22 | 273 | 702012 | AP002000 | 1516 | 1-3043 |
| HPMCJ84 | 274 | 562779 | AC006512 | 1517 | 1-658 |
| | | | | | 3090-3543 |
| | | | | | 4479-5105 |
| | | | | | 5885-6846 |
| | | | | | 7103-9707 |
| | | | | | 9914-10293 |
| | | | | | 11523-12034 |
| | | | | | 12067-12181 |
| | | | | | 13769-14031 |
| | | | | | 14199-14291 |
| | | | | | 14584-14790 |
| | | | | | 15123-15154 |
| | | | | | 17039-17482 |
| | | | | | 17539-17987 |
| | | | | | 18697-19052 |
| | | | | | 19112-19380 |
| | | | | | 20023-20268 |
| | | | | | 21158-21598 |
| | | | | | 21817-22221 |
| | | | | | 23565-23665 |
| | | | | | 23906-24076 |
| | | | | | 24981-25506 |
| | | | | | 25510-25861 |
| | | | | | 25981-26645 |
| | | | | | 26661-27449 |
| | | | | | 27717-27812 |
| | | | | | 27991-28024 |
| | | | | | 28437-28888 |
| | | | | | 29651-33442 |
| | | | | | 33621-34089 |
| | | | | | 34245-34808 |
| | | | | | 34819-35284 |
| | | | | | 35854-35960 |
| | | | | | 38525-38771 |
| HPMCJ84 | 274 | 562779 | AC017104 | 1518 | 1-779 |
| HPMCJ84 | 274 | 562779 | AC006512 | 1519 | 1-315 |
| | | | | | 439-531 |
| | | | | | 707-1080 |
| | | | | | 1144-1227 |
| | | | | | 1491-1845 |
| | | | | | 2113-2321 |
| | | | | | 2700-3556 |
| | | | | | 3818-4307 |
| | | | | | 4336-4813 |
| | | | | | 4958-5775 |
| HPMCJ84 | 274 | 562779 | AC006512 | 1520 | 1-738 |
| HPMCJ84 | 274 | 562779 | AC017104 | 1521 | 1-587 |
| HPMCJ84 | 274 | 562779 | AC017104 | 1522 | 1-753 |
| HPMCV30 | 275 | 612870 | AC006512 | 1523 | 1-658 |
| | | | | | 3090-3543 |
| | | | | | 4479-5105 |
| | | | | | 5885-6846 |
| | | | | | 7103-9707 |
| | | | | | 9914-10293 |
| | | | | | 11523-12034 |
| | | | | | 12067-12181 |
| | | | | | 13769-14031 |
| | | | | | 14199-14291 |
| | | | | | 14584-14790 |
| | | | | | 15123-15154 |
| | | | | | 17039-17482 |
| | | | | | 17539-17987 |
| | | | | | 18697-19052 |
| | | | | | 19112-19380 |
| | | | | | 20023-20268 |
| | | | | | 21158-21598 |
| | | | | | 21817-22221 |
| | | | | | 23565-23665 |
| | | | | | 23906-24076 |
| | | | | | 24981-25506 |
| | | | | | 25510-25861 |
| | | | | | 25981-26645 |
| | | | | | 26661-27449 |
| | | | | | 27717-27812 |
| | | | | | 27991-28024 |
| | | | | | 28437-28888 |
| | | | | | 29651-33442 |
| | | | | | 33621-34089 |
| | | | | | 34245-34808 |
| | | | | | 34819-35284 |
| | | | | | 35854-35960 |
| | | | | | 38525-38771 |
| HPMCV30 | 275 | 612870 | AC005517 | 1524 | 1-945 |
| HPMCV30 | 275 | 612870 | AC006512 | 1525 | 1-315 |
| | | | | | 439-531 |
| | | | | | 707-1080 |
| | | | | | 1144-1227 |
| | | | | | 1491-1845 |
| | | | | | 2113-2321 |
| | | | | | 2700-3556 |
| | | | | | 3818-4307 |
| | | | | | 4336-4813 |
| | | | | | 4958-5775 |
| HPMCV30 | 275 | 612870 | AC006512 | 1526 | 1-738 |
| HPMCV30 | 275 | 612870 | AC005517 | 1527 | 1-352 |
| HPMCV30 | 275 | 612870 | AC005517 | 1528 | 1-177 |
| HPMFH77 | 276 | 702014 | AL357792 | 1529 | 1-78 |
| | | | | | 1506-1910 |
| | | | | | 2138-2352 |
| | | | | | 3564-3655 |
| | | | | | 3894-3990 |
| | | | | | 4679-4802 |
| | | | | | 6730-6826 |
| | | | | | 7263-7346 |
| | | | | | 7463-7531 |
| | | | | | 8845-8944 |
| | | | | | 9220-9407 |
| | | | | | 11682-11793 |
| | | | | | 12453-13057 |
| | | | | | 13114-13869 |
| | | | | | 13880-14347 |
| | | | | | 14370-17543 |
| | | | | | 17664-20113 |
| HPMFH77 | 276 | 702014 | AC012043 | 1530 | 1-78 |
| | | | | | 1506-1910 |
| | | | | | 2138-2352 |
| | | | | | 3564-3655 |
| | | | | | 3894-3990 |
| | | | | | 4679-4802 |
| | | | | | 6730-6826 |
| | | | | | 7263-7346 |
| | | | | | 7463-7531 |
| | | | | | 8845-8944 |
| | | | | | 9220-9407 |
| | | | | | 11682-11793 |
| | | | | | 12453-13057 |
| | | | | | 13114-13869 |
| | | | | | 13880-14347 |
| | | | | | 14370-17540 |
| | | | | | 17661-20110 |
| HPMFH77 | 276 | 702014 | AL357792 | 1531 | 1-423 |
| HPMFH77 | 276 | 702014 | AL357792 | 1532 | 1-974 |
| HPMFH77 | 276 | 702014 | AC012043 | 1533 | 1-974 |
| HPMFH77 | 276 | 702014 | AC012043 | 1534 | 1-423 |
| HPQCB83 | 277 | 740761 | AC069100 | 1535 | 1-2234 |
| HPRCM72 | 279 | 813512 | AC015867 | 1536 | 1-291 |
| | | | | | 634-3334 |
| HPRCM72 | 279 | 813512 | AC010189 | 1537 | 1-3040 |
| | | | | | 3384-6081 |
| HPRCM72 | 279 | 813512 | AC015867 | 1538 | 1-305 |
| HPRCM72 | 279 | 813512 | AC010189 | 1539 | 1-740 |
| HPRCM72 | 279 | 813512 | AC010189 | 1540 | 1-305 |
| HPTRI42 | 281 | 655362 | AC004229 | 1541 | 1-98 |
| | | | | | 1759-1841 |
| | | | | | 2062-2504 |
| | | | | | 2787-2818 |
| | | | | | 2897-2984 |
| | | | | | 3079-3168 |
| | | | | | 3423-3593 |
| | | | | | 3666-3786 |
| | | | | | 4178-4301 |
| | | | | | 4459-4598 |
| | | | | | 5581-5689 |
| | | | | | 5784-5890 |
| | | | | | 6035-6068 |
| | | | | | 6179-6267 |
| | | | | | 6672-7873 |
| HPTRI42 | 281 | 655362 | AC019071 | 1542 | 1-136 |
| | | | | | 1023-1365 |
| | | | | | 2131-2213 |
| | | | | | 2434-2875 |
| | | | | | 3158-3189 |
| | | | | | 3268-3355 |
| | | | | | 3450-3539 |
| | | | | | 3794-3964 |
| | | | | | 4037-4157 |
| | | | | | 4549-4672 |
| | | | | | 4830-4969 |
| | | | | | 5952-6060 |
| | | | | | 6155-6261 |
| | | | | | 6406-6439 |
| | | | | | 6549-6637 |
| | | | | | 7041-8091 |
| HPTRI42 | 281 | 655362 | AC004229 | 1543 | 1-2392 |
| | | | | | 2959-3254 |
| HPTRQ52 | 283 | 655363 | AC021462 | 1544 | 1-763 |
| | | | | | 771-1244 |
| HPTRQ52 | 283 | 655363 | AC068629 | 1545 | 1-916 |
| HPTRQ52 | 283 | 655363 | AL355514 | 1546 | 1-265 |
| | | | | | 397-1368 |
| | | | | | 1377-1655 |
| | | | | | 2338-3396 |
| HPTRQ52 | 283 | 655363 | AC021462 | 1547 | 1-187 |
| HPTRQ52 | 283 | 655363 | AC021462 | 1548 | 1-975 |
| HPWBA29 | 285 | 561956 | AL160011 | 1549 | 1-318 |
| HPWBA29 | 285 | 561956 | AL160011 | 1550 | 1-568 |
| | | | | | 736-1212 |
| HPWDK06 | 286 | 839825 | AC009469 | 1551 | 1-4685 |
| HRADA42 | 288 | 827302 | AC011890 | 1552 | 1-943 |
| | | | | | 1079-1636 |
| | | | | | 2154-2473 |
| | | | | | 3555-4008 |
| | | | | | 4292-4439 |
| | | | | | 6963-7154 |
| | | | | | 8254-8537 |
| | | | | | 8592-8985 |
| HRADA42 | 288 | 827302 | AC011890 | 1553 | 1-478 |
| HRADF49 | 289 | 866481 | AC068946 | 1554 | 1-142 |
| | | | | | 359-1108 |
| | | | | | 1191-1345 |
| | | | | | 1445-2140 |
| | | | | | 2314-2935 |
| | | | | | 3040-3156 |
| | | | | | 3395-4126 |
| | | | | | 4311-4460 |
| | | | | | 4749-5820 |
| HRADF49 | 289 | 866481 | AC060820 | 1555 | 1-142 |
| | | | | | 359-1109 |
| | | | | | 1193-1348 |
| | | | | | 1448-2142 |
| | | | | | 2318-2944 |
| | | | | | 3056-3166 |
| | | | | | 3405-4136 |
| | | | | | 4321-4472 |
| | | | | | 4762-5836 |
| HRADF49 | 289 | 866481 | AC068946 | 1556 | 1-812 |
| | | | | | 1124-1263 |
| | | | | | 1281-2283 |
| | | | | | 2470-2572 |
| | | | | | 2752-2935 |
| | | | | | 3851-3974 |
| | | | | | 4153-4548 |
| | | | | | 4602-4810 |
| | | | | | 4980-5111 |
| | | | | | 5262-5346 |
| | | | | | 5434-5498 |
| | | | | | 5609-5695 |
| | | | | | 5871-5930 |
| | | | | | 6448-6487 |
| HRADF49 | 289 | 866481 | AC060820 | 1557 | 1-686 |
| HRDAI17 | 292 | 560720 | AL139385 | 1558 | 1-99 |
| HRDAI17 | 292 | 560720 | AC008439 | 1559 | 1-125 |
| HRDAI17 | 292 | 560720 | AC034240 | 1560 | 1-141 |
| HRDAI17 | 292 | 560720 | AC015884 | 1561 | 1-207 |
| HRDAI17 | 292 | 560720 | AC008690 | 1562 | 1-164 |
| HRDAI17 | 292 | 560720 | AC022032 | 1563 | 1-146 |
| HRDAI17 | 292 | 560720 | AC027802 | 1564 | 1-117 |
| HRDAI17 | 292 | 560720 | AC060763 | 1565 | 1-129 |
| HRDAI17 | 292 | 560720 | AC073842 | 1566 | 1-165 |
| HRDAI17 | 292 | 560720 | AC023018 | 1567 | 1-145 |
| HRDAI17 | 292 | 560720 | AC021163 | 1568 | 1-97 |
| | | | | | 402-2108 |
| | | | | | 2292-2943 |
| | | | | | 2997-3408 |
| | | | | | 3423-3481 |
| | | | | | 3551-4145 |
| | | | | | 4557-5026 |
| | | | | | 5029-6260 |
| | | | | | 6276-6930 |
| | | | | | 6936-7000 |
| HRDAI17 | 292 | 560720 | AC068013 | 1569 | 1-125 |
| HRDAI17 | 292 | 560720 | AC023398 | 1570 | 1-134 |
| HRDAI17 | 292 | 560720 | AC015884 | 1571 | 1-131 |
| HRDDQ39 | 293 | 840405 | AC009152 | 1572 | 1-755 |
| HRDER22 | 294 | 688056 | AC021153 | 1573 | 1-554 |
| HRDER22 | 294 | 688056 | AC021153 | 1574 | 1-205 |
| HRDFK37 | 295 | 840381 | AL360017 | 1575 | 1-1274 |
| HRGBD54 | 296 | 828436 | AC005035 | 1576 | 1-461 |
| | | | | | 901-1370 |
| | | | | | 3120-3210 |
| | | | | | 3798-3995 |
| | | | | | 4091-4598 |
| | | | | | 4951-5116 |
| | | | | | 5461-6076 |
| | | | | | 6372-6510 |
| | | | | | 7952-8044 |
| | | | | | 8598-8734 |
| | | | | | 9056-9175 |
| | | | | | 10553-10707 |
| | | | | | 11338-12166 |
| | | | | | 13462-15335 |
| | | | | | 15383-15814 |
| | | | | | 17772-17892 |
| | | | | | 18209-18381 |
| | | | | | 20452-20838 |
| | | | | | 21115-21278 |
| | | | | | 21599-22149 |
| | | | | | 22202-23346 |
| | | | | | 26511-26928 |
| | | | | | 27540-27948 |
| | | | | | 29312-29415 |
| | | | | | 29610-30069 |
| | | | | | 30613-31175 |
| | | | | | 31214-31389 |
| | | | | | 31904-32065 |
| | | | | | 32911-33076 |
| | | | | | 35162-38818 |
| | | | | | 39310-39567 |
| HRGBD54 | 296 | 828436 | AC005035 | 1577 | 1-654 |
| HRGBD54 | 296 | 828436 | AC005035 | 1578 | 1-511 |
| HROEA08 | 297 | 866190 | AC010894 | 1579 | 1-3018 |
| HROEA08 | 297 | 866190 | AC010894 | 1580 | 1-138 |
| HROEA08 | 297 | 866190 | AC010894 | 1581 | 1-299 |
| HSAVA08 | 298 | 580870 | AC009030 | 1582 | 1-1052 |
| HSAVA08 | 298 | 580870 | AC009030 | 1583 | 1-431 |
| HSAWZ40 | 300 | 634000 | AC024249 | 1584 | 1-1532 |
| HSAWZ40 | 300 | 634000 | AC024249 | 1585 | 1-409 |
| HSAWZ40 | 300 | 634000 | AC024249 | 1586 | 1-319 |
| HSDBI90 | 301 | 853376 | AC010285 | 1587 | 1-731 |
| | | | | | 1367-3915 |
| | | | | | 4065-5062 |
| HSDBI90 | 301 | 853376 | AC008393 | 1588 | 1-730 |
| | | | | | 961-1358 |
| | | | | | 1366-3914 |
| | | | | | 4064-5061 |
| HSDBI90 | 301 | 853376 | AC010313 | 1589 | 1-731 |
| | | | | | 962-1359 |
| | | | | | 1367-3916 |
| | | | | | 4066-5063 |
| HSDBI90 | 301 | 853376 | AC010285 | 1590 | 1-133 |
| HSDBI90 | 301 | 853376 | AC010285 | 1591 | 1-282 |
| HSDBI90 | 301 | 853376 | AC008393 | 1592 | 1-133 |
| HSDBI90 | 301 | 853376 | AC010313 | 1593 | 1-246 |
| HSDBI90 | 301 | 853376 | AC010313 | 1594 | 1-115 |
| HSHBF76 | 303 | 715838 | AC009000 | 1595 | 1-479 |
| | | | | | 1244-1408 |
| | | | | | 1653-1763 |
| | | | | | 1845-1991 |
| | | | | | 2826-3064 |
| | | | | | 3330-3422 |
| | | | | | 3438-3788 |
| HSHBF76 | 303 | 715838 | AC009000 | 1596 | 1-128 |
| HSHBF76 | 303 | 715838 | AC009000 | 1597 | 1-36 |
| | | | | | 1068-1329 |
| | | | | | 1498-2123 |
| | | | | | 3160-3211 |
| HSJBY32 | 305 | 702020 | AC060812 | 1598 | 1-834 |
| | | | | | 1161-2914 |
| HSJBY32 | 305 | 702020 | AC060812 | 1599 | 1-328 |
| | | | | | 1564-1799 |
| | | | | | 2800-2937 |
| | | | | | 3007-3045 |
| | | | | | 4054-4838 |
| | | | | | 5145-5257 |
| HSJBY32 | 305 | 702020 | AC060812 | 1600 | 1-659 |
| | | | | | 700-1802 |
| HSKDR27 | 306 | 580874 | AC008742 | 1601 | 1-50 |
| | | | | | 1016-1321 |
| | | | | | 1979-2220 |
| | | | | | 2313-3310 |
| HSKDR27 | 306 | 580874 | AC008742 | 1602 | 1-495 |
| HSLHG78 | 307 | 846148 | AL157824 | 1603 | 1-33 |
| | | | | | 5109-7241 |
| | | | | | 7282-11311 |
| HSLHG78 | 307 | 846148 | AC012151 | 1604 | 1-68 |
| | | | | | 2079-2213 |
| | | | | | 2879-2965 |
| | | | | | 3114-3257 |
| | | | | | 4198-4337 |
| | | | | | 6080-6204 |
| | | | | | 8566-8644 |
| | | | | | 13691-19866 |
| HSNAP85 | 308 | 784054 | AC007541 | 1605 | 1-94 |
| | | | | | 2363-2658 |
| | | | | | 3490-3979 |
| | | | | | 4019-7173 |
| HSOAH16 | 309 | 827058 | AC005046 | 1606 | 1-157 |
| | | | | | 1370-1522 |
| | | | | | 1727-1861 |
| | | | | | 2415-2630 |
| | | | | | 3229-3373 |
| | | | | | 3584-3817 |
| | | | | | 6852-7006 |
| | | | | | 7432-7608 |
| | | | | | 9282-9534 |
| | | | | | 10097-10628 |
| | | | | | 10841-11055 |
| | | | | | 11740-11963 |
| | | | | | 13041-13323 |
| | | | | | 13451-13850 |
| | | | | | 14382-15096 |
| | | | | | 16075-16749 |
| | | | | | 18154-18346 |
| | | | | | 18531-18857 |
| | | | | | 19624-20680 |
| | | | | | 20738-21207 |
| | | | | | 22021-22555 |
| | | | | | 22673-23076 |
| | | | | | 25746-25974 |
| | | | | | 26932-27715 |
| | | | | | 27740-30183 |
| | | | | | 30458-30899 |
| | | | | | 31160-32000 |
| | | | | | 32177-32662 |
| | | | | | 33181-33425 |
| | | | | | 33436-33652 |
| | | | | | 33857-34003 |
| | | | | | 34289-34464 |
| | | | | | 34518-34738 |
| | | | | | 36446-37141 |
| | | | | | 37163-38834 |
| | | | | | 38961-39339 |
| HSOAH16 | 309 | 827058 | AC005046 | 1607 | 1-136 |
| HSQDO85 | 310 | 853393 | AL022313 | 1608 | 1-337 |
| | | | | | 3275-3416 |
| | | | | | 3702-3761 |
| | | | | | 3789-4346 |
| | | | | | 4678-4817 |
| | | | | | 5426-5518 |
| | | | | | 6130-6208 |
| | | | | | 7676-8161 |
| | | | | | 8344-8443 |
| | | | | | 8722-8841 |
| | | | | | 9247-10011 |
| | | | | | 10488-10650 |
| | | | | | 11981-12464 |
| | | | | | 12622-12711 |
| | | | | | 12791-13240 |
| | | | | | 13285-13619 |
| | | | | | 14613-15627 |
| | | | | | 15868-16325 |
| | | | | | 16558-17064 |
| | | | | | 17148-17517 |
| | | | | | 17623-17912 |
| | | | | | 17963-18564 |
| HSQDO85 | 310 | 853393 | AL022313 | 1609 | 1-140 |
| HSRBE06 | 312 | 871264 | AP000330 | 1610 | 1-1628 |
| HSRBE06 | 312 | 871264 | AP000330 | 1611 | 1-526 |
| HSSEA64 | 314 | 853395 | AC005865 | 1612 | 1-173 |
| | | | | | 553-629 |
| | | | | | 1941-2042 |
| | | | | | 2757-2891 |
| | | | | | 3294-3378 |
| | | | | | 4606-5498 |
| | | | | | 5550-8125 |
| HSSEF77 | 315 | 658725 | AC005041 | 1613 | 1-68 |
| | | | | | 87-493 |
| | | | | | 711-838 |
| | | | | | 997-1167 |
| | | | | | 2227-2960 |
| | | | | | 3326-4641 |
| | | | | | 4768-5786 |
| HSSEF77 | 315 | 658725 | AC005041 | 1614 | 1-2920 |
| | | | | | 3439-3667 |
| | | | | | 3839-4332 |
| HSSEF77 | 315 | 658725 | AC005041 | 1615 | 1-143 |
| HSSGJ58 | 317 | 747714 | AL355491 | 1616 | 1-1936 |
| HSSGJ58 | 317 | 747714 | AL356112 | 1617 | 1-1936 |
| HSSGJ58 | 317 | 747714 | AL354665 | 1618 | 1-1932 |
| HSVBD37 | 318 | 637110 | AL359554 | 1619 | 1-125 |
| | | | | | 340-404 |
| | | | | | 1268-1408 |
| | | | | | 1655-1862 |
| | | | | | 2328-2417 |
| | | | | | 4005-4354 |
| | | | | | 5438-6584 |
| HSVBD37 | 318 | 637110 | AL354940 | 1620 | 1-145 |
| | | | | | 155-344 |
| | | | | | 1428-2582 |
| HSVBD37 | 318 | 637110 | AL157708 | 1621 | 1-145 |
| | | | | | 155-344 |
| | | | | | 1428-2579 |
| HSVBD37 | 318 | 637110 | AL359554 | 1622 | 1-1191 |
| | | | | | 1690-2151 |
| | | | | | 2730-2963 |
| | | | | | 3372-3513 |
| | | | | | 3977-4114 |
| HSVBD37 | 318 | 637110 | AL359554 | 1623 | 1-240 |
| HSVBD37 | 318 | 637110 | AL354940 | 1624 | 1-1115 |
| HSVBD37 | 318 | 637110 | AL157708 | 1625 | 1-1115 |
| HSYBI06 | 320 | 740766 | AL049795 | 1626 | 1-135 |
| | | | | | 2267-2358 |
| | | | | | 2759-2859 |
| | | | | | 3659-3775 |
| | | | | | 4814-4946 |
| | | | | | 5270-5730 |
| | | | | | 6026-6474 |
| | | | | | 6782-7341 |
| | | | | | 7359-7475 |
| | | | | | 7777-7939 |
| | | | | | 8137-8247 |
| | | | | | 8262-8548 |
| | | | | | 8649-8729 |
| | | | | | 9467-10551 |
| | | | | | 10640-10701 |
| | | | | | 11022-11356 |
| | | | | | 11406-11450 |
| | | | | | 11517-11645 |
| | | | | | 12002-12057 |
| | | | | | 12580-12713 |
| | | | | | 14863-15041 |
| | | | | | 15151-15479 |
| | | | | | 16120-21982 |
| HSYBI06 | 320 | 740766 | AL049795 | 1627 | 1-98 |
| HSYBI06 | 320 | 740766 | AL049795 | 1628 | 1-110 |
| HT1SC27 | 321 | 630647 | AP001077 | 1629 | 1-2841 |
| HT1SC27 | 321 | 630647 | AP001077 | 1630 | 1-758 |
| HT1SC27 | 321 | 630647 | AP001077 | 1631 | 1-625 |
| HT3BF49 | 322 | 838620 | AL355304 | 1632 | 1-2144 |
| HT3BF49 | 322 | 838620 | AL355307 | 1633 | 1-2144 |
| HT3BF49 | 322 | 838620 | AL355304 | 1634 | 1-517 |
| HT3BF49 | 322 | 838620 | AL355307 | 1635 | 1-517 |
| HT5FX79 | 323 | 794169 | AC020978 | 1636 | 1-4351 |
| | | | | | 4423-4590 |
| | | | | | 4875-5061 |
| | | | | | 5211-5413 |
| | | | | | 5519-5726 |
| | | | | | 5755-6138 |
| | | | | | 6281-6319 |
| | | | | | 6402-7114 |
| | | | | | 7359-7460 |
| | | | | | 7715-7918 |
| | | | | | 8030-8144 |
| | | | | | 8612-9037 |
| | | | | | 9280-9760 |
| HT5FX79 | 323 | 794169 | AC020978 | 1637 | 1-431 |
| HT5FX79 | 323 | 794169 | AC020978 | 1638 | 1-38 |
| | | | | | 115-354 |
| HTEDJ28 | 329 | 762845 | AC025974 | 1639 | 1-2357 |
| HTEDJ28 | 329 | 762845 | AC013370 | 1640 | 1-2357 |
| HTEDS12 | 330 | 838621 | AC021491 | 1641 | 1-124 |
| | | | | | 290-781 |
| | | | | | 1447-1562 |
| | | | | | 1650-1767 |
| | | | | | 2309-2417 |
| | | | | | 3273-3466 |
| | | | | | 3935-4120 |
| | | | | | 5213-5358 |
| | | | | | 6216-6605 |
| | | | | | 7621-7744 |
| | | | | | 8491-8761 |
| | | | | | 9044-9175 |
| | | | | | 9353-9523 |
| | | | | | 9966-10843 |
| | | | | | 11395-11839 |
| HTEDS12 | 330 | 838621 | AC021491 | 1642 | 1-228 |
| | | | | | 3662-4225 |
| HTEGS11 | 333 | 862066 | AC018762 | 1643 | 1-2894 |
| HTEHA56 | 334 | 806461 | AC008751 | 1644 | 1-469 |
| | | | | | 1023-1372 |
| | | | | | 1542-1694 |
| | | | | | 1724-3063 |
| | | | | | 3371-3477 |
| | | | | | 3651-3905 |
| | | | | | 4073-4931 |
| | | | | | 4999-6547 |
| HTEHA56 | 334 | 806461 | AC009763 | 1645 | 1-1487 |
| HTEHA56 | 334 | 806461 | AC008749 | 1646 | 1-1487 |
| HTEHA56 | 334 | 806461 | AC008751 | 1647 | 1-575 |
| HTEHA56 | 334 | 806461 | AC009763 | 1648 | 1-577 |
| HTEHA56 | 334 | 806461 | AC009763 | 1649 | 1-859 |
| HTEHA56 | 334 | 806461 | AC008749 | 1650 | 1-575 |
| HTEHA56 | 334 | 806461 | AC008749 | 1651 | 1-582 |
| HTEHU59 | 335 | 840385 | AP001003 | 1652 | 1-3207 |
| HTEHU59 | 335 | 840385 | AP001557 | 1653 | 1-3206 |
| HTEHU59 | 335 | 840385 | AP001156 | 1654 | 1-3207 |
| HTEHU59 | 335 | 840385 | AP001003 | 1655 | 1-863 |
| HTEHU59 | 335 | 840385 | AP001003 | 1656 | 1-1399 |
| | | | | | 1504-1948 |
| | | | | | 1956-2672 |
| | | | | | 2761-2905 |
| | | | | | 3007-3135 |
| | | | | | 3290-3445 |
| | | | | | 3537-3653 |
| | | | | | 3746-3913 |
| | | | | | 4010-4131 |
| | | | | | 4251-4428 |
| HTEHU59 | 335 | 840385 | AP001557 | 1657 | 1-863 |
| HTEHU59 | 335 | 840385 | AP001557 | 1658 | 1-1395 |
| | | | | | 1500-1944 |
| | | | | | 1952-2667 |
| | | | | | 2757-2900 |
| | | | | | 3002-3130 |
| | | | | | 3285-3439 |
| HTEHU59 | 335 | 840385 | AP001156 | 1659 | 1-1396 |
| | | | | | 1502-1945 |
| | | | | | 1953-2668 |
| HTEHU59 | 335 | 840385 | AP001156 | 1660 | 1-863 |
| HTLAP64 | 338 | 603913 | AC004556 | 1661 | 1-1668 |
| | | | | | 2186-3003 |
| | | | | | 3754-4253 |
| | | | | | 4400-4483 |
| | | | | | 5365-5868 |
| | | | | | 8438-8508 |
| | | | | | 8913-9031 |
| | | | | | 9113-9151 |
| HTLAP64 | 338 | 603913 | AC051649 | 1662 | 1-1669 |
| | | | | | 2187-3004 |
| | | | | | 3755-4254 |
| | | | | | 4401-4484 |
| | | | | | 5367-5870 |
| | | | | | 8558-8628 |
| | | | | | 9033-9151 |
| | | | | | 9233-9273 |
| HTLBT80 | 339 | 840045 | AL133227 | 1663 | 1-51 |
| | | | | | 476-521 |
| | | | | | 842-1226 |
| | | | | | 1375-1490 |
| | | | | | 3745-4016 |
| | | | | | 4046-4229 |
| | | | | | 4430-4855 |
| | | | | | 5300-6053 |
| | | | | | 6598-6883 |
| | | | | | 7406-7446 |
| | | | | | 7461-8437 |
| | | | | | 8550-8681 |
| | | | | | 8888-8919 |
| | | | | | 8943-9353 |
| | | | | | 9458-9544 |
| | | | | | 9834-10607 |
| | | | | | 11550-11629 |
| | | | | | 12196-12374 |
| | | | | | 13532-14886 |
| HTLBT80 | 339 | 840045 | AL133227 | 1664 | 1-32 |
| | | | | | 712-1071 |
| | | | | | 3453-3870 |
| | | | | | 4197-4326 |
| | | | | | 4639-4751 |
| | | | | | 5131-5202 |
| | | | | | 5588-5638 |
| | | | | | 7454-8108 |
| | | | | | 8670-8767 |
| | | | | | 9511-9692 |
| | | | | | 9754-10134 |
| | | | | | 11109-11226 |
| | | | | | 12456-12607 |
| | | | | | 15237-15316 |
| | | | | | 18143-18311 |
| | | | | | 18429-18478 |
| | | | | | 20682-20982 |
| | | | | | 20988-21295 |
| | | | | | 22686-23061 |
| | | | | | 23358-23495 |
| | | | | | 24076-24612 |
| | | | | | 25196-25334 |
| | | | | | 26760-26926 |
| | | | | | 27041-27152 |
| | | | | | 27271-27379 |
| | | | | | 27697-28289 |
| | | | | | 29024-29340 |
| | | | | | 29761-29840 |
| | | | | | 31168-32681 |
| HTLCX82 | 340 | 847091 | AC004471 | 1665 | 1-478 |
| | | | | | 1424-1734 |
| | | | | | 1764-1994 |
| | | | | | 2027-2127 |
| | | | | | 2589-2825 |
| | | | | | 4635-4805 |
| | | | | | 4929-5050 |
| | | | | | 5134-5289 |
| | | | | | 5367-5501 |
| | | | | | 6339-6446 |
| | | | | | 6780-6902 |
| | | | | | 7225-7337 |
| | | | | | 9237-9728 |
| | | | | | 10180-10725 |
| | | | | | 11846-13361 |
| HTLCX82 | 340 | 847091 | AC004471 | 1666 | 1-919 |
| HTLDA84 | 341 | 686397 | AC013252 | 1667 | 1-193 |
| | | | | | 1090-1263 |
| | | | | | 2131-2278 |
| | | | | | 2342-2772 |
| | | | | | 3175-3278 |
| | | | | | 3880-4063 |
| | | | | | 5308-5664 |
| | | | | | 6255-6390 |
| | | | | | 6546-6710 |
| | | | | | 8111-8419 |
| | | | | | 8911-9048 |
| | | | | | 9056-9151 |
| | | | | | 9349-9871 |
| | | | | | 10386-10510 |
| | | | | | 10884-11035 |
| | | | | | 11336-11428 |
| | | | | | 12106-12228 |
| | | | | | 13268-14698 |
| HTLDA84 | 341 | 686397 | AC013252 | 1668 | 1-355 |
| HTLDU78 | 342 | 637702 | AC011444 | 1669 | 1-1305 |
| HTLDU78 | 342 | 637702 | AC011444 | 1670 | 1-285 |
| HTLDU78 | 342 | 637702 | AC011444 | 1671 | 1-274 |
| HTLEC82 | 343 | 811992 | AC019337 | 1672 | 1-1139 |
| | | | | | 1384-1619 |
| | | | | | 3675-3800 |
| | | | | | 5094-5426 |
| | | | | | 5777-6057 |
| | | | | | 6169-8159 |
| HTLEC82 | 343 | 811992 | AC025769 | 1673 | 1-1141 |
| | | | | | 1386-1621 |
| | | | | | 3679-3804 |
| | | | | | 5102-5434 |
| | | | | | 5785-6065 |
| | | | | | 6177-8168 |
| | | | | | 8171-9355 |
| | | | | | 9390-9624 |
| | | | | | 9657-10390 |
| | | | | | 11962-12241 |
| | | | | | 12874-13031 |
| | | | | | 13270-13327 |
| HTLEC82 | 343 | 811992 | AC008537 | 1674 | 1-1141 |
| | | | | | 1385-1620 |
| | | | | | 3677-3802 |
| | | | | | 5098-5430 |
| | | | | | 5781-6061 |
| | | | | | 6173-8165 |
| HTLEC82 | 343 | 811992 | AC019337 | 1675 | 1-1182 |
| HTLEC82 | 343 | 811992 | AC008537 | 1676 | 1-1186 |
| HTLEV48 | 345 | 723799 | AL079300 | 1677 | 1-833 |
| | | | | | 1783-2055 |
| | | | | | 2908-3362 |
| | | | | | 3583-4048 |
| HTLEV48 | 345 | 723799 | AL079300 | 1678 | 1-163 |
| HTNAM63 | 348 | 566880 | AL160261 | 1679 | 1-498 |
| | | | | | 786-1786 |
| HTNAM63 | 348 | 566880 | AL160261 | 1680 | 1-141 |
| HTOAI50 | 350 | 638623 | AC040933 | 1681 | 1-1413 |
| HTOAI50 | 350 | 638623 | AC025531 | 1682 | 1-1411 |
| HTOAI50 | 350 | 638623 | AC040933 | 1683 | 1-498 |
| HTOAI50 | 350 | 638623 | AC025531 | 1684 | 1-498 |
| HTOAM11 | 351 | 664508 | AC002369 | 1685 | 1-586 |
| | | | | | 2559-2651 |
| | | | | | 3329-3426 |
| | | | | | 3756-5088 |
| HTOAM11 | 351 | 664508 | AP001486 | 1686 | 1-1191 |
| HTOAM11 | 351 | 664508 | AP000875 | 1687 | 1-1192 |
| HTOAM11 | 351 | 664508 | AC002369 | 1688 | 1-228 |
| HTOAM11 | 351 | 664508 | AP001486 | 1689 | 1-711 |
| HTOAM11 | 351 | 664508 | AP001486 | 1690 | 1-374 |
| HTOAM11 | 351 | 664508 | AP000875 | 1691 | 1-710 |
| HTODH57 | 352 | 823126 | AL136531 | 1692 | 1-1646 |
| HTODH57 | 352 | 823126 | AL136531 | 1693 | 1-510 |
| HTODH83 | 353 | 580884 | AC012046 | 1694 | 1-1972 |
| HTODH83 | 353 | 580884 | AC012046 | 1695 | 1-105 |
| HTOGR38 | 355 | 824639 | AL359923 | 1696 | 1-949 |
| HTOGR38 | 355 | 824639 | AL359923 | 1697 | 1-311 |
| | | | | | 1036-1359 |
| HTOGR38 | 355 | 824639 | AL359923 | 1698 | 1-294 |
| HTOHO21 | 356 | 732808 | AC022221 | 1699 | 1-85 |
| | | | | | 394-740 |
| | | | | | 781-1562 |
| | | | | | 1622-2429 |
| | | | | | 3831-4082 |
| | | | | | 4239-6053 |
| | | | | | 7230-7365 |
| | | | | | 8195-8379 |
| | | | | | 11677-11990 |
| | | | | | 12508-12710 |
| HTOHO21 | 356 | 732808 | AC007897 | 1700 | 1-1586 |
| | | | | | 2763-2898 |
| | | | | | 3728-3912 |
| | | | | | 7210-7523 |
| | | | | | 8041-8243 |
| HTOHO21 | 356 | 732808 | AC022221 | 1701 | 1-184 |
| HTOHO21 | 356 | 732808 | AC007897 | 1702 | 1-184 |
| HTSFJ32 | 358 | 637720 | AC015734 | 1703 | 1-80 |
| | | | | | 562-915 |
| | | | | | 925-4400 |
| HTSFJ32 | 358 | 637720 | AC015734 | 1704 | 1-463 |
| HTSFJ32 | 358 | 637720 | AC015734 | 1705 | 1-359 |
| HTXDB22 | 361 | 853407 | AL031775 | 1706 | 1-701 |
| | | | | | 1446-1660 |
| | | | | | 2327-5963 |
| | | | | | 5998-6343 |
| | | | | | 6348-9247 |
| | | | | | 9973-10269 |
| | | | | | 11408-11597 |
| HTXDB22 | 361 | 853407 | AL133264 | 1707 | 1-590 |
| | | | | | 628-1412 |
| | | | | | 3625-3805 |
| | | | | | 5513-5637 |
| | | | | | 6165-6792 |
| | | | | | 7435-7538 |
| | | | | | 7644-8370 |
| | | | | | 8448-8734 |
| | | | | | 8778-8979 |
| | | | | | 9234-10123 |
| | | | | | 10477-11177 |
| | | | | | 11922-12136 |
| | | | | | 12803-16439 |
| | | | | | 16474-16819 |
| | | | | | 16824-19723 |
| | | | | | 20445-20744 |
| | | | | | 21884-22073 |
| HTXDB22 | 361 | 853407 | AL031775 | 1708 | 1-202 |
| | | | | | 457-1346 |
| HTXDC38 | 362 | 801935 | AC040160 | 1709 | 1-122 |
| | | | | | 511-831 |
| | | | | | 1253-1314 |
| | | | | | 1392-1780 |
| | | | | | 1873-2177 |
| HTXDC38 | 362 | 801935 | AC008594 | 1710 | 1-122 |
| | | | | | 511-831 |
| | | | | | 1253-1314 |
| | | | | | 1392-1780 |
| | | | | | 1873-2177 |
| HTXDC38 | 362 | 801935 | AC040160 | 1711 | 1-1122 |
| | | | | | 1212-2163 |
| | | | | | 2234-2809 |
| | | | | | 2849-3163 |
| | | | | | 4270-5496 |
| | | | | | 5517-6166 |
| | | | | | 7170-7347 |
| | | | | | 7580-7727 |
| | | | | | 7852-7997 |
| | | | | | 8090-8180 |
| | | | | | 8268-8382 |
| | | | | | 8648-8742 |
| | | | | | 8815-8925 |
| HTXDC38 | 362 | 801935 | AC008594 | 1712 | 1-1122 |
| | | | | | 1212-2163 |
| | | | | | 2234-2809 |
| | | | | | 2851-3145 |
| | | | | | 4270-5497 |
| | | | | | 5518-6167 |
| | | | | | 7169-7346 |
| | | | | | 7579-7726 |
| | | | | | 7851-7996 |
| | | | | | 8089-8179 |
| | | | | | 8267-8381 |
| | | | | | 8647-8741 |
| | | | | | 8814-8924 |
| HTXDC77 | 363 | 844258 | AC004182 | 1713 | 1-2744 |
| | | | | | 2917-3357 |
| HTXDC77 | 363 | 844258 | AC018433 | 1714 | 1-2744 |
| | | | | | 2917-3357 |
| HTXET11 | 365 | 581521 | AC011802 | 1715 | 1-984 |
| HTXET11 | 365 | 581521 | AC025414 | 1716 | 1-984 |
| HTXET11 | 365 | 581521 | AC011802 | 1717 | 1-36 |
| | | | | | 836-964 |
| | | | | | 4059-5438 |
| | | | | | 6005-6176 |
| | | | | | 6789-7120 |
| | | | | | 7124-7588 |
| | | | | | 7735-7827 |
| | | | | | 7925-8770 |
| | | | | | 9057-9545 |
| HTXET11 | 365 | 581521 | AC025414 | 1718 | 1-36 |
| | | | | | 836-964 |
| | | | | | 4059-5438 |
| | | | | | 6002-6173 |
| | | | | | 6786-7117 |
| | | | | | 7121-7585 |
| | | | | | 7732-7809 |
| HTXJY08 | 366 | 637774 | AC005962 | 1719 | 1-2075 |
| HTXJY08 | 366 | 637774 | AC004757 | 1720 | 1-2075 |
| HTXJY08 | 366 | 637774 | AC005962 | 1721 | 1-478 |
| HTXJY08 | 366 | 637774 | AC005962 | 1722 | 1-1011 |
| HTXJY08 | 366 | 637774 | AC004757 | 1723 | 1-478 |
| HTXJY08 | 366 | 637774 | AC004757 | 1724 | 1-1011 |
| HTXKF95 | 367 | 834438 | AC004242 | 1725 | 1-981 |
| HTXKF95 | 367 | 834438 | AC008083 | 1726 | 1-981 |
| HTXKF95 | 367 | 834438 | AC004242 | 1727 | 1-984 |
| HTXKF95 | 367 | 834438 | AC004242 | 1728 | 1-118 |
| HTXKF95 | 367 | 834438 | AC008083 | 1729 | 1-984 |
| HTXKF95 | 367 | 834438 | AC008083 | 1730 | 1-173 |
| HTXLT36 | 368 | 843477 | AC006160 | 1731 | 1-175 |
| | | | | | 3693-4007 |
| | | | | | 5248-5429 |
| | | | | | 6946-7065 |
| | | | | | 7636-8072 |
| | | | | | 8959-10995 |
| HTXLT36 | 368 | 843477 | AC006160 | 1732 | 1-461 |
| | | | | | 1144-1986 |
| HTXLT36 | 368 | 843477 | AC006160 | 1733 | 1-81 |
| | | | | | 185-259 |
| | | | | | 314-593 |
| HUFCL31 | 370 | 801938 | AC012255 | 1734 | 1-417 |
| | | | | | 834-1753 |
| | | | | | 1788-1918 |
| | | | | | 2176-2628 |
| | | | | | 2755-2971 |
| | | | | | 3036-5033 |
| HUFCL31 | 370 | 801938 | AC012255 | 1735 | 1-134 |
| HUKBT67 | 371 | 844446 | AC073594 | 1736 | 1-391 |
| | | | | | 604-856 |
| | | | | | 1324-1453 |
| | | | | | 1957-2054 |
| | | | | | 2407-2953 |
| | | | | | 3443-5533 |
| HUKBT67 | 371 | 844446 | AC076968 | 1737 | 1-392 |
| | | | | | 605-858 |
| | | | | | 1326-1455 |
| | | | | | 1959-2056 |
| | | | | | 2409-2956 |
| | | | | | 3447-5543 |
| HUKBT67 | 371 | 844446 | AC010892 | 1738 | 1-391 |
| | | | | | 604-457 |
| | | | | | 1325-1454 |
| | | | | | 1958-2055 |
| | | | | | 2408-2955 |
| | | | | | 3446-5538 |
| HUKBT67 | 371 | 844446 | AC068986 | 1739 | 1-391 |
| | | | | | 604-857 |
| | | | | | 1325-1454 |
| | | | | | 1958-2055 |
| | | | | | 2408-2955 |
| | | | | | 3445-5537 |
| HUKBT67 | 371 | 844446 | AC010892 | 1740 | 1-436 |
| HUKBT67 | 371 | 844446 | AC010892 | 1741 | 1-368 |
| KUKBT67 | 371 | 844446 | AC068986 | 1742 | 1-436 |
| HUSCJ14 | 374 | 894699 | AC007040 | 1743 | 1-149 |
| | | | | | 394-889 |
| | | | | | 1061-1139 |
| | | | | | 2097-2249 |
| | | | | | 2852-3007 |
| | | | | | 5021-5089 |
| | | | | | 5217-5919 |
| | | | | | 6119-8896 |
| HUSCJ14 | 374 | 894699 | AC007040 | 1744 | 1-854 |
| HUSCJ14 | 374 | 894699 | AC007040 | 1745 | 1-397 |
| HUSGU40 | 376 | 684975 | AC072032 | 1746 | 1-364 |
| HUSGU40 | 376 | 684975 | AC022305 | 1747 | 1-686 |
| HUSGU40 | 376 | 684975 | AC078916 | 1748 | 1-364 |
| HUSGU40 | 376 | 684975 | AC072032 | 1749 | 1-288 |
| HUSGU40 | 376 | 684975 | AC078916 | 1750 | 1-288 |
| HUSIR18 | 377 | 762858 | AC068055 | 1751 | 1-149 |
| HUSIR18 | 377 | 762858 | AC022231 | 1752 | 1-151 |
| HUSIR18 | 377 | 762858 | AC010694 | 1753 | 1-202 |
| HUSIR18 | 377 | 762858 | AL160163 | 1754 | 1-258 |
| | | | | | 1798-4171 |
| HUSIR18 | 377 | 762858 | AC027300 | 1755 | 1-158 |
| HUSIR18 | 377 | 762858 | AC073047 | 1756 | 1-170 |
| HUSIR18 | 377 | 762858 | AC009524 | 1757 | 1-151 |
| HUSIR18 | 377 | 762858 | AC068055 | 1758 | 1-77 |
| HUSIR18 | 377 | 762858 | AC010694 | 1759 | 1-77 |
| HUSIR18 | 377 | 762858 | AL160163 | 1760 | 1-117 |
| HWBBQ70 | 380 | 689121 | AL031120 | 1761 | 1-1940 |
| HWBBQ70 | 380 | 689121 | AL137003 | 1762 | 1-292 |
| HWBBQ70 | 380 | 689121 | AL031120 | 1763 | 1-689 |
| HWBBQ70 | 380 | 689121 | AL031120 | 1764 | 1-102 |
| HWBBQ70 | 380 | 689121 | AL137003 | 1765 | 1-689 |
| HWBCN36 | 382 | 722259 | AL031296 | 1766 | 1-670 |
| | | | | | 1590-2584 |
| | | | | | 3609-3751 |
| | | | | | 4204-4803 |
| | | | | | 4847-5271 |
| | | | | | 9874-10146 |
| | | | | | 11847-12328 |
| | | | | | 12493-13051 |
| | | | | | 13395-13635 |
| | | | | | 15455-15917 |
| | | | | | 17288-17739 |
| | | | | | 18945-19908 |
| | | | | | 21414-22006 |
| | | | | | 27737-27823 |
| | | | | | 35955-36575 |
| | | | | | 36643-37204 |
| | | | | | 37341-37504 |
| | | | | | 39154-39312 |
| | | | | | 41736-42263 |
| | | | | | 47221-47669 |
| | | | | | 47712-48167 |
| | | | | | 50898-51095 |
| | | | | | 51163-51655 |
| | | | | | 51716-52580 |
| | | | | | 52706-58181 |
| HWBCN36 | 382 | 722259 | AL109757 | 1767 | 1-670 |
| | | | | | 1590-2583 |
| | | | | | 3578-3751 |
| | | | | | 4203-4802 |
| HWBCN36 | 382 | 722259 | AL031296 | 1768 | 1-274 |
| HWBCN36 | 382 | 722259 | AL109757 | 1769 | 1-425 |
| HWBDJ08 | 383 | 762860 | AL133351 | 1770 | 1-238 |
| | | | | | 2679-2860 |
| | | | | | 6204-6544 |
| | | | | | 6911-7399 |
| | | | | | 7795-7909 |
| | | | | | 8430-8914 |
| | | | | | 9187-9620 |
| | | | | | 9744-10234 |
| | | | | | 11159-11190 |
| | | | | | 11310-11737 |
| | | | | | 12408-16037 |
| HWBDJ08 | 383 | 762860 | AC013339 | 1771 | 1-238 |
| | | | | | 2699-2880 |
| | | | | | 6224-6564 |
| | | | | | 6931-7419 |
| | | | | | 7815-7929 |
| | | | | | 8449-8932 |
| | | | | | 9205-9638 |
| | | | | | 9762-10130 |
| | | | | | 10144-10309 |
| | | | | | 11380-11807 |
| | | | | | 12478-16107 |
| HWBDJ08 | 383 | 762860 | AL133351 | 1772 | 1-466 |
| HWBDJ08 | 383 | 762860 | AC013339 | 1773 | 1-466 |
| HWDAC26 | 385 | 821335 | AC004947 | 1774 | 1-1669 |
| HWDAG96 | 386 | 796743 | AL121753 | 1775 | 1-77 |
| | | | | | 91-640 |
| | | | | | 2531-2639 |
| | | | | | 3380-3625 |
| | | | | | 3692-4433 |
| | | | | | 4677-4862 |
| | | | | | 5043-5355 |
| | | | | | 5532-5893 |
| | | | | | 6299-10579 |
| | | | | | 12966-13230 |
| | | | | | 14676-15242 |
| | | | | | 15749-15996 |
| | | | | | 16066-16393 |
| | | | | | 16675-17238 |
| | | | | | 17381-17885 |
| | | | | | 18029-18260 |
| | | | | | 19347-19477 |
| | | | | | 20064-20199 |
| | | | | | 20849-21010 |
| HWDAG96 | 386 | 796743 | AL356652 | 1776 | 1-77 |
| | | | | | 91-640 |
| | | | | | 2531-2639 |
| | | | | | 3380-3625 |
| | | | | | 3692-4433 |
| | | | | | 4677-4862 |
| | | | | | 5043-5355 |
| | | | | | 5532-5893 |
| | | | | | 6299-10590 |
| | | | | | 12979-13243 |
| | | | | | 14689-15255 |
| | | | | | 15762-16052 |
| | | | | | 16079-16406 |
| | | | | | 16688-17251 |
| | | | | | 17394-17898 |
| | | | | | 18042-18273 |
| | | | | | 19363-19509 |
| | | | | | 20088-20188 |
| | | | | | 20863-21024 |
| HWDAG96 | 386 | 796743 | AL121753 | 1777 | 1-437 |
| HWDAG96 | 386 | 796743 | AL121753 | 1778 | 1-638 |
| | | | | | 793-854 |
| HWDAG96 | 386 | 796743 | AL356652 | 1779 | 1-437 |
| HWDAG96 | 386 | 796743 | AL356652 | 1780 | 1-638 |
| | | | | | 793-854 |
| HWDAJ01 | 387 | 794016 | AC015551 | 1781 | 1-670 |
| HWDAJ01 | 387 | 794016 | AC019214 | 1782 | 1-670 |
| HWHPB78 | 388 | 740778 | AL157945 | 1783 | 1-300 |
| | | | | | 364-790 |
| | | | | | 1344-1519 |
| | | | | | 1584-1709 |
| | | | | | 2403-2580 |
| | | | | | 4780-4968 |
| | | | | | 5485-5559 |
| | | | | | 5960-6128 |
| | | | | | 6243-6955 |
| | | | | | 7258-7317 |
| | | | | | 9073-9145 |
| | | | | | 9404-9544 |
| | | | | | 10342-10513 |
| | | | | | 10746-11354 |
| | | | | | 12004-12578 |
| | | | | | 12863-13087 |
| | | | | | 13224-13382 |
| | | | | | 13993-14047 |
| | | | | | 14319-14444 |
| | | | | | 14753-14878 |
| | | | | | 15465-15713 |
| | | | | | 16007-16123 |
| | | | | | 17413-17740 |
| | | | | | 17817-18127 |
| | | | | | 18231-18634 |
| | | | | | 18771-18881 |
| | | | | | 19945-20231 |
| | | | | | 21024-21169 |
| | | | | | 23112-23363 |
| | | | | | 23692-24413 |
| HWHPB78 | 388 | 740778 | AC026283 | 1784 | 1-292 |
| | | | | | 353-776 |
| | | | | | 1340-1506 |
| | | | | | 1568-1696 |
| | | | | | 2408-2534 |
| | | | | | 4767-4955 |
| | | | | | 5472-5546 |
| | | | | | 5957-6293 |
| | | | | | 6373-7085 |
| | | | | | 7386-7445 |
| | | | | | 9201-9273 |
| | | | | | 9532-9672 |
| | | | | | 10470-10641 |
| | | | | | 10873-11481 |
| | | | | | 12131-12705 |
| | | | | | 12990-13214 |
| | | | | | 13351-13509 |
| | | | | | 14119-14173 |
| | | | | | 14445-14570 |
| | | | | | 14879-15004 |
| | | | | | 15604-15844 |
| | | | | | 16133-16253 |
| | | | | | 17540-17867 |
| | | | | | 17944-18254 |
| | | | | | 18356-18755 |
| | | | | | 18892-19002 |
| | | | | | 20066-20352 |
| | | | | | 21146-21308 |
| | | | | | 23235-23486 |
| | | | | | 23813-24533 |
| HWHPB78 | 388 | 740778 | AL157945 | 1785 | 1-490 |
| HWHPB78 | 388 | 740778 | AC026283 | 1786 | 1-318 |
| HELGG84 | 389 | 851137 | AC025019 | 1787 | 1-2121 |
| | | | | | 1-2121 |
| HELGG84 | 389 | 851137 | AC012202 | 1788 | 1-2122 |
| | | | | | 1-2122 |
| HELGG84 | 389 | 851137 | AC025019 | 1789 | 1-573 |
| | | | | | 1-573 |
| HELGG84 | 389 | 851137 | AC025019 | 1790 | 1-40 |
| | | | | | 1158-2410 |
| | | | | | 1-40 |
| | | | | | 1158-2410 |
| HELGG84 | 389 | 851137 | AC012202 | 1791 | 1-573 |
| | | | | | 1-573 |
| HE2CA60 | 391 | 888705 | AC005921 | 1792 | 1-74 |
| | | | | | 276-1076 |
| | | | | | 1472-2160 |
| | | | | | 3055-3389 |
| | | | | | 3769-3898 |
| | | | | | 4143-4288 |
| | | | | | 4322-4697 |
| | | | | | 4699-4772 |
| | | | | | 6745-6851 |
| | | | | | 7692-9044 |
| | | | | | 9581-9743 |
| | | | | | 13540-17646 |
| | | | | | 1-74 |
| | | | | | 276-1076 |
| | | | | | 1472-2160 |
| | | | | | 3055-3389 |
| | | | | | 3769-3898 |
| | | | | | 4143-4288 |
| | | | | | 4322-4697 |
| | | | | | 4699-4772 |
| | | | | | 6745-6851 |
| | | | | | 7692-9044 |
| | | | | | 9581-9743 |
| | | | | | 13540-17646 |
| HE2CA60 | 391 | 888705 | AC005921 | 1793 | 1-1466 |
| | | | | | 1-1466 |
| HLWAU42 | 392 | 695737 | AC010794 | 1794 | 1-3291 |
| | | | | | 1-3291 |
| HLWAU42 | 392 | 695737 | AC009985 | 1795 | 1-3291 |
| | | | | | 1-3291 |
| HLWAU42 | 392 | 695737 | AC010794 | 1796 | 1-92 |
| | | | | | 1-92 |
| HLWAU42 | 392 | 695737 | AC010794 | 1797 | 1-279 |
| | | | | | 1-279 |
| | | | | | 736-997 |
| | | | | | 736-997 |
| | | | | | 1377-1619 |
| | | | | | 1377-1619 |
| | | | | | 3065-3511 |
| | | | | | 3065-3511 |
| | | | | | 3829-7852 |
| | | | | | 3829-7852 |
| HLWAU42 | 392 | 695737 | AC009985 | 1798 | 1-279 |
| | | | | | 736-997 |
| | | | | | 1320-1633 |
| | | | | | 3065-3511 |
| | | | | | 3829-7851 |
| | | | | | 1-279 |
| | | | | | 736-997 |
| | | | | | 1320-1633 |
| | | | | | 3065-3511 |
| | | | | | 3829-7851 |
| HTOJL95 | 395 | 762851 | AC011859 | 1799 | 1-2853 |
| | | | | | 1-2853 |
| HTOJL95 | 395 | 762851 | AC026347 | 1800 | 1-2853 |
| | | | | | 1-2853 |
| HTOJL95 | 395 | 762851 | AC011859 | 1801 | 1-421 |
| | | | | | 1-421 |
| HTOJL95 | 395 | 762851 | AC011859 | 1802 | 1-340 |
| | | | | | 1-340 |
| HTOJL95 | 395 | 762851 | AC026347 | 1803 | 1-340 |
| | | | | | 1-340 |
| HTOJL95 | 395 | 762851 | AC026347 | 1804 | 1-421 |
| | | | | | 1-421 |
| HTLIF12 | 396 | 901225 | AC011953 | 1805 | 1-126 |
| HTEED26 | 397 | 762846 | AF214634 | 1806 | 1-2149 |
| | | | | | 1-2149 |
| HTEED26 | 397 | 762846 | AC025931 | 1807 | 1-2153 |
| | | | | | 1-2153 |
| HE8FC45 | 401 | 845672 | AC007000 | 1808 | 1-2261 |
| | | | | | 2328-3085 |
| | | | | | 3093-6210 |
| | | | | | 6306-6555 |
| | | | | | 6630-8724 |
| | | | | | 9378-10405 |
| | | | | | 10433-10732 |
| | | | | | 10766-11172 |
| | | | | | 11591-11805 |
| | | | | | 12605-13216 |
| HE8FC45 | 401 | 845672 | AC006014 | 1809 | 1-1533 |
| | | | | | 2260-2403 |
| | | | | | 2894-3811 |
| | | | | | 5391-5478 |
| | | | | | 5645-5945 |
| | | | | | 7052-7659 |
| | | | | | 7903-8408 |
| | | | | | 8681-9613 |
| | | | | | 10033-11894 |
| | | | | | 13474-17953 |
| | | | | | 17961-21161 |
| | | | | | 21163-21418 |
| | | | | | 21506-23629 |
| | | | | | 23876-25000 |
| | | | | | 25330-25629 |
| | | | | | 25806-26108 |
| | | | | | 26527-26741 |
| | | | | | 27724-27832 |
| | | | | | 27877-28134 |
| | | | | | 28505-29118 |
| | | | | | 29179-29698 |
| | | | | | 30220-30471 |
| | | | | | 30918-31476 |
| | | | | | 33359-33446 |
| | | | | | 33613-33723 |
| | | | | | 34757-35010 |
| | | | | | 35021-35442 |
| | | | | | 37343-39068 |
| HE8FC45 | 401 | 845672 | AC005488 | 1810 | 1-1525 |
| | | | | | 2823-3802 |
| | | | | | 5381-5467 |
| | | | | | 5634-5934 |
| | | | | | 7010-7619 |
| | | | | | 7948-8368 |
| | | | | | 8868-11864 |
| | | | | | 11870-12107 |
| | | | | | 12594-12811 |
| | | | | | 12884-13191 |
| | | | | | 13225-13414 |
| | | | | | 13437-14521 |
| | | | | | 14529-17110 |
| | | | | | 17190-17916 |
| | | | | | 17924-21107 |
| | | | | | 21551-23569 |
| | | | | | 23842-24790 |
| | | | | | 25294-25593 |
| | | | | | 25666-26072 |
| | | | | | 27692-27800 |
| | | | | | 27845-28102 |
| | | | | | 28538-29666 |
| | | | | | 30322-30463 |
| | | | | | 30913-31471 |
| | | | | | 33356-33443 |
| | | | | | 33610-33910 |
| | | | | | 34799-35052 |
| | | | | | 35063-35484 |
| | | | | | 36553-37367 |
| | | | | | 38056-39110 |
| HE8FC45 | 401 | 845672 | AC005098 | 1811 | 1-1716 |
| | | | | | 2360-2501 |
| | | | | | 2897-3814 |
| | | | | | 5395-5482 |
| | | | | | 5649-5949 |
| | | | | | 6624-7332 |
| | | | | | 7837-8257 |
| | | | | | 8530-11755 |
| | | | | | 11758-12386 |
| | | | | | 12495-12713 |
| | | | | | 12792-13099 |
| | | | | | 13250-13315 |
| | | | | | 13337-17835 |
| | | | | | 17902-18103 |
| | | | | | 18336-22003 |
| | | | | | 22097-24218 |
| HE8FC45 | 401 | 845672 | AC005071 | 1812 | 1-960 |
| | | | | | 1108-3199 |
| | | | | | 3473-4418 |
| HE8FC45 | 401 | 845672 | AC004878 | 1813 | 1-980 |
| | | | | | 2557-2644 |
| | | | | | 2811-3111 |
| | | | | | 4255-4862 |
| | | | | | 5191-5611 |
| | | | | | 5884-9106 |
| | | | | | 9112-9349 |
| | | | | | 9832-10053 |
| | | | | | 10126-10433 |
| | | | | | 10467-10656 |
| | | | | | 10679-11417 |
| | | | | | 11461-15048 |
| | | | | | 15173-18370 |
| | | | | | 18955-20842 |
| | | | | | 21089-22211 |
| | | | | | 23017-23232 |
| | | | | | 25096-25345 |
| | | | | | 25716-26329 |
| | | | | | 26453-26909 |
| | | | | | 28140-28698 |
| | | | | | 30582-30669 |
| | | | | | 30836-31136 |
| | | | | | 32001-32686 |
| | | | | | 34133-34567 |
| | | | | | 35036-37131 |
| | | | | | 37137-37181 |
| | | | | | 38806-42375 |
| | | | | | 42420-43181 |
| | | | | | 43189-43972 |
| | | | | | 44198-45300 |
| HE8FC45 | 401 | 845672 | AC005073 | 1814 | 1-1255 |
| | | | | | 1403-3494 |
| | | | | | 3768-4713 |
| HE8FC45 | 401 | 845672 | AC007003 | 1815 | 1-539 |
| | | | | | 783-1288 |
| | | | | | 1410-5415 |
| | | | | | 5538-5768 |
| | | | | | 5818-6125 |
| | | | | | 6276-6341 |
| | | | | | 6363-10846 |
| | | | | | 10854-14320 |
| | | | | | 14396-16493 |
| | | | | | 16760-17881 |
| | | | | | 18212-18511 |
| | | | | | 18545-18951 |
| | | | | | 19370-19584 |
| | | | | | 20384-20991 |
| HE8FC45 | 401 | 845672 | AC061712 | 1816 | 1-1876 |
| | | | | | 1884-5086 |
| | | | | | 5088-5343 |
| | | | | | 5431-7528 |
| | | | | | 7801-8923 |
| HE8FC45 | 401 | 845672 | AC006995 | 1817 | 1-2045 |
| | | | | | 2679-3414 |
| | | | | | 3744-4043 |
| | | | | | 4116-4522 |
| | | | | | 6295-6552 |
| | | | | | 6988-8052 |
| | | | | | 8656-8914 |
| | | | | | 15068-15731 |
| | | | | | 19863-22252 |
| | | | | | 27896-28385 |
| | | | | | 28583-29993 |
| | | | | | 30266-30724 |
| HE8FC45 | 401 | 845672 | AC007000 | 1818 | 1-1192 |
| | | | | | 1740-1980 |
| | | | | | 2324-3297 |
| | | | | | 4882-4969 |
| | | | | | 5136-5436 |
| | | | | | 6223-6476 |
| | | | | | 6487-7106 |
| | | | | | 7435-7855 |
| | | | | | 7977-12142 |
| | | | | | 12173-12247 |
| HE8FC45 | 401 | 845672 | AC006014 | 1819 | 1-979 |
| HE8FC45 | 401 | 845672 | AC006014 | 1820 | 1-929 |
| | | | | | 1161-4487 |
| | | | | | 4579-5506 |
| | | | | | 5664-5765 |
| | | | | | 5979-9483 |
| | | | | | 10048-10856 |
| | | | | | 11336-11702 |
| | | | | | 12041-12251 |
| | | | | | 12253-12463 |
| | | | | | 13816-13903 |
| | | | | | 13917-14426 |
| HE8FC45 | 401 | 845672 | AC005488 | 1821 | 1-867 |
| | | | | | 1144-2852 |
| | | | | | 2949-4487 |
| | | | | | 4579-5789 |
| | | | | | 5978-9485 |
| | | | | | 10048-10911 |
| | | | | | 11334-11700 |
| | | | | | 12034-12509 |
| | | | | | 13205-13321 |
| | | | | | 13907-14417 |
| HE8FC45 | 401 | 845672 | AC005488 | 1822 | 1-735 |
| | | | | | 738-975 |
| HE8FC45 | 401 | 845672 | AC005098 | 1823 | 1-866 |
| | | | | | 1143-2850 |
| | | | | | 2949-4489 |
| | | | | | 4581-5793 |
| | | | | | 5905-8184 |
| | | | | | 8255-9460 |
| | | | | | 10026-10834 |
| | | | | | 11078-11157 |
| | | | | | 11307-11672 |
| | | | | | 12131-12486 |
| | | | | | 13183-13299 |
| | | | | | 13912-14426 |
| HE8FC45 | 401 | 845672 | AC005098 | 1824 | 1-937 |
| HE8FC45 | 401 | 845672 | AC005071 | 1825 | 1-300 |
| HE8FC45 | 401 | 845672 | AC005071 | 1826 | 1-319 |
| HE8FC45 | 401 | 845672 | AC004878 | 1827 | 1-255 |
| HE8FC45 | 401 | 845672 | AC004878 | 1828 | 1-741 |
| | | | | | 818-1073 |
| | | | | | 1163-3038 |
| HE8FC45 | 401 | 845672 | AC005073 | 1829 | 1-257 |
| HE8FC45 | 401 | 845672 | AC005073 | 1830 | 1-300 |
| HE8FC45 | 401 | 845672 | AC007003 | 1831 | 1-614 |
| HE8FC45 | 401 | 845672 | AC061712 | 1832 | 1-300 |
| HE8FC45 | 401 | 845672 | AC061712 | 1833 | 1-2326 |
| | | | | | 2349-2538 |
| | | | | | 2572-2879 |
| | | | | | 2952-3169 |
| | | | | | 3656-3893 |
| | | | | | 3896-7121 |
| | | | | | 7394-7814 |
| | | | | | 8143-8752 |
| | | | | | 10017-10119 |
| HE8FC45 | 401 | 845672 | AC006995 | 1834 | 1-256 |

[0106] Tables 1D: The polynucleotides or polypeptides, or agonists or antagonists of the present invention can be used in assays to test for one or more biological activities. If these polynucleotides and polypeptides do exhibit activity in a particular assay, it is likely that these molecules may be involved in the diseases associated with the biological activity. Thus, the polynucleotides or polypeptides, or agonists or antagonists could be used to treat the associated disease.

[0107] The present invention encompasses methods of detecting, preventing, diagnosing, prognosticating, treating, and/or ameliorating a disease or disorder. In preferred embodiments, the present invention encompasses a method of treating cancer and other hyperproliferative disorders comprising administering to a patient in which such detection, treatment, prevention, and/or amelioration is desired a protein, nucleic acid, or antibody of the invention (or fragment or variant thereof) in an amount effective to detect, prevent, diagnose, prognosticate, treat, and/or ameliorate the cancer and other hyperproliferative disorders.

[0108] In another embodiment, the present invention also encompasses methods of detecting, preventing, diagnosing, prognosticating, treating, and/or ameliorating cancer and other hyperproliferative disorders; comprising administering to a patient combinations of the proteins, nucleic acids, or antibodies of the invention (or fragments or variants thereof), sharing similar indications as shown in the corresponding rows in Column 3 of Table 1D.

[0109] Table 1D provides information related to biological activities for polynucleotides and polypeptides of the invention (including antibodies, agonists, and/or antagonists thereof). Table 1D also provides information related to assays which may be used to test polynucleotides and polypeptides of the invention (including antibodies, agonists, and/or antagonists thereof) for the corresponding biological activities. The first column (“Gene No.”) provides the gene number in the application for each clone identifier. The second column (“cDNA Clone ID:”) provides the unique clone identifier for each clone as previously described and indicated in Table 1A through Table 1D. The third column (“AA SEQ ID NO:Y”) indicates the Sequence Listing SEQ ID Number for polypeptide sequences encoded by the corresponding cDNA clones (also as indicated in Tables 1A, Table 1B, and Table 2). The fourth column (“Biological Activity”) indicates a biological activity corresponding to the indicated polypeptides (or polynucleotides encoding said polypeptides). The fifth column (“Exemplary Activity Assay”) further describes the corresponding biological activity and also provides information pertaining to the various types of assays which may be performed to test, demonstrate, or quantify the corresponding biological activity.

[0110] Table 1D describes the use of, inter alia, FMAT technology for testing or demonstrating various biological activities. Fluorometric microvolume assay technology (FMAT) is a fluorescence-based system which provides a means to perform nonradioactive cell- and bead-based assays to detect activation of cell signal transduction pathways. This technology was designed specifically for ligand binding and immunological assays. Using this technology, fluorescent cells or beads at the bottom of the well are detected as localized areas of concentrated fluorescence using a data processing system. Unbound flurophore comprising the background signal is ignored, allowing for a wide variety of homogeneous assays. FMAT technology may be used for peptide ligand binding assays, immunofluorescence, apoptosis, cytotoxicity, and bead-based immunocapture assays. See, Miraglia S et. al., “Homogeneous cell and bead based assays for highthroughput screening using flourometric microvolume assay technology,” Journal of Biomolecular Screening; 4:193-204 (1999). In particular, FMAT technology may be used to test, confirm, and/or identify the ability of polypeptides (including polypeptide fragments and variants) to activate signal transduction pathways. For example, FMAT technology may be used to test, confirm, and/or identify the ability of polypeptides to upregulate production of immunomodulatory proteins (such as, for example, interleukins, GM-CSF, Rantes, and Tumor Necrosis factors, as well as other cellular regulators (e.g. insulin)).

[0111] Table 1D also describes the use of kinase assays for testing, demonstrating, or quantifying biological activity. In this regard, the phosphorylation and de-phosphorylation of specific amino acid residues (e.g. Tyrosine, Serine, Threonine) on cell-signal transduction proteins provides a fast, reversible means for activation and de-activation of cellular signal transduction pathways. Moreover, cell signal transduction via phosphorylation/de-phosphorylation is crucial to the regulation of a wide variety of cellular processes (e.g. proliferation, differentiation, migration, apoptosis, etc.). Accordingly, kinase assays provide a powerful tool useful for testing, confirming, and/or identifying polypeptides (including polypeptide fragments and variants) that mediate cell signal transduction events via protein phosphorylation. See e.g., Forrer, P., Tamaskovic R., and Jaussi, R. “Enzyme-Linked Immunosorbent Assay for Measurement of JNK, ERK, and p38 Kinase Activities” Biol. Chem. 379(8-9): 1101-1110 (1998).

LENGTHY TABLE REFERENCED HERE
US20070042361A1-20070222-T00001
Please refer to the end of the specification for access instructions.

Table 1E

[0112] Polynucleotides encoding polypeptides of the present invention can be used in assays to test for one or more biological activities. One such biological activity which may be tested includes the ability of polynucleotides and polypeptides of the invention to stimulate up-regulation or down-regulation of expression of particular genes and proteins. Hence, if polynucleotides and polypeptides of the present invention exhibit activity in altering particular gene and protein expression patterns, it is likely that these polynucleotides and polypeptides of the present invention may be involved in, or capable of effecting changes in, diseases associated with the altered gene and protein expression profiles. Hence, polynucleotides, polypeptides, or antibodies of the present invention could be used to treat said associated diseases.

[0113] TaqMan® assays may be performed to assess the ability of polynucleotides (and polypeptides they encode) to alter the expression pattern of particular “target” genes. TaqMan® reactions are performed to evaluate the ability of a test agent to induce or repress expression of specific genes in different cell types. TaqMan® gene expression quantification assays (“TaqMan® assays”) are well known to, and routinely performed by, those of ordinary skill in the art. TaqMan® assays are performed in a two step reverse transcription/polymerase chain reaction (RT-PCR). In the first (RT) step, cDNA is reverse transcribed from total RNA samples using random hexamer primers. In the second (PCR) step, PCR products are synthesized from the cDNA using gene specific primers.

[0114] To quantify gene expression the Taqman® PCR reaction exploits the 5′ nuclease activity of AmpliTaq Golds DNA Polymerase to cleave a Taqman® probe (distinct from the primers) during PCR. The Taqman® probe contains a reporter dye at the 5′-end of the probe and a quencher dye at the 3′ end of the probe. When the probe is intact, the proximity of the reporter dye to the quencher dye results in suppression of the reporter fluorescence. During PCR, if the target of interest is present, the probe specifically anneals between the forward and reverse primer sites. AmpliTaq Fold DNA Polymerase then cleaves the probe between the reporter and quencher when the probe hybridizes to the target, resulting in increased fluorescence of the reporter (see FIG. 2). Accumulation of PCR products is detected directly by monitoring the increase in fluorescence of the reporter dye.

[0115] After the probe fragments are displaced from the target, polymerization of the strand continues. The 3′-end of the probe is blocked to prevent extension of the probe during PCR. This process occurs in every cycle and does not interfere with the exponential accumulation of product. The increase in fluorescence signal is detected only if the target sequence is complementary to the probe and is amplified during PCR. Because of these requirements, any nonspecific amplification is not detected.

[0116] For test sample preparation, vector controls or constructs containing the coding sequence for the gene of interest are transfected into cells, such as for example 293T cells, and supernatants collected after 48 hours. For cell treatment and RNA isolation, multiple primary human cells or human cell lines are used; such cells may include but are not limited to, Normal Human Dermal Fibroblasts, Aortic Smooth Muscle, Human Umbilical Vein Endothelial Cells, HepG2, Daudi, Jurkat, U937, Caco, and THP-1 cell lines. Cells are plated in growth media and growth is arrested by culturing without media change for 3 days, or by switching cells to low serum media and incubating overnight. Cells are treated for 1, 6, or 24 hours with either vector control supernatant or sample supernatant (or purified/partially purified protein preparations in buffer). Total RNA is isolated; for example, by using Trizol extraction or by using the Ambion RNAqueous™-4PCR RNA isolation system. Expression levels of multiple genes are analyzed using TAQMAN, and expression in the test sample is compared to control vector samples to identify genes induced or repressed. Each of the above described techniques are well known to, and routinely performed by, those of ordinary skill in the art.

[0117] Table 1E indicates particular disease classes and preferred indications for which polynucleotides, polypeptides, or antibodies of the present invention may be used in detecting, diagnosing, preventing, treating and/or ameliorating said diseases and disorders based on “target” gene expression patterns which may be up- or down-regulated by polynucleotides (and the encoded polypeptides) corresponding to each indicated cDNA Clone ID (shown in Table 1E, Column 2).

[0118] Thus, in preferred embodiments, the present invention encompasses a method of detecting, diagnosing, preventing, treating, and/or ameliorating a disease or disorder listed in the “Disease Class” and/or “Preferred Indication” columns of Table 1E; comprising administering to a patient in which such detection, diagnosis, prevention, or treatment is desired a protein, nucleic acid, or antibody of the invention (or fragment or variant thereof) in an amount effective to detect, diagnose, prevent, treat, or ameliorate the disease or disorder. The first and second columns of Table 1D show the “Gene No.” and “cDNA Clone ID No.”, respectively, indicating certain nucleic acids and proteins (or antibodies against the same) of the invention (including polynucleotide, polypeptide, and antibody fragments or variants thereof) that may be used in detecting, diagnosing, preventing, treating, or ameliorating the disease(s) or disorder(s) indicated in the corresponding row in the “Disease Class” or “Preferred Indication” Columns of Table 1E.

[0119] In another embodiment, the present invention also encompasses methods of detecting, diagnosing, preventing, treating, or ameliorating a disease or disorder listed in the “Disease Class” or “Preferred Indication” Columns of Table 1E; comprising administering to a patient combinations of the proteins, nucleic acids, or antibodies of the invention (or fragments or variants thereof), sharing similar indications as shown in the corresponding rows in the “Disease Class” or “Preferred Indication” Columns of Table 1E.

[0120] The “Disease Class” Column of Table 1E provides a categorized descriptive heading for diseases, disorders, and/or conditions (more fully described below) that may be detected, diagnosed, prevented, treated, or ameliorated by a protein, nucleic acid, or antibody of the invention (or fragment or variant thereof).

[0121] The “Preferred Indication” Column of Table 1E describes diseases, disorders, and/or conditions that may be detected, diagnosed, prevented, treated, or ameliorated by a protein, nucleic acid, or antibody of the invention (or fragment or variant thereof).

[0122] The “Cell Line” and “Exemplary Targets” Columns of Table 1E indicate particular cell lines and target genes, respectively, which may show altered gene expression patterns (i.e., up- or down-regulation of the indicated target gene) in Taqman assays, performed as described above, utilizing polynucleotides of the cDNA Clone ID shown in the corresponding row. Alteration of expression patterns of the indicated “Exemplary Target” genes is correlated with a particular “Disease Class” and/or “Preferred Indication” as shown in the corresponding row under the respective column headings.

[0123] The “Exemplary Accessions” Column indicates GenBank Accessions (available online through the National Center for Biotechnology Information (NCBI) at http://www.ncbi.nlm.nih.gov/) which correspond to the “Exemplary Targets” shown in the adjacent row.

[0124] The recitation of “Cancer” in the “Disease Class” Column indicates that the corresponding nucleic acid and protein, or antibody against the same, of the invention (or fragment or variant thereof) may be used for example, to detect, diagnose, prevent, treat, and/or ameliorate neoplastic diseases and/or disorders (e.g., leukemias, cancers, etc., as described below under “Hyperproliferative Disorders”).

[0125] The recitation of “Immune” in the “Disease Class” column indicates that the corresponding nucleic acid and protein, or antibody against the same, of the invention (or fragment or variant thereof), may be used for example, to detect, diagnose, prevent, treat, and/or ameliorate diseases and/or disorders relating to neoplastic diseases (e.g., as described below under “Hyperproliferative Disorders”), blood disorders (e.g., as described below under “Immune Activity” “Cardiovascular Disorders” and/or “Blood-Related Disorders”), and infections (e.g., as described below under “Infectious Disease”).

[0126] The recitation of “Angiogenesis” in the “Disease Class” column indicates that the corresponding nucleic acid and protein, or antibody against the same, of the invention (or fragment or variant thereof), may be used for example, to detect, diagnose, treat, prevent, and/or ameliorate diseases and/or disorders relating to neoplastic diseases (e.g., as described below under “Hyperproliferative Disorders”), diseases and/or disorders of the cardiovascular system (e.g., as described below under “Cardiovascular Disorders”), diseases and/or disorders involving cellular and genetic abnormalities (e.g., as described below under “Diseases at the Cellular Level”), diseases and/or disorders involving angiogenesis (e.g., as described below under “Anti-Angiogenesis Activity”), to promote or inhibit cell or tissue regeneration (e.g., as described below under “Regeneration”), or to promote wound healing (e.g., as described below under “Wound Healing and Epithelial Cell Proliferation”).

[0127] The recitation of “Diabetes” in the “Disease Class” column indicates that the corresponding nucleic acid and protein, or antibody against the same, of the invention (or fragment or variant thereof), may be used for example, to detect, diagnose, treat, prevent, and/or ameliorate diabetes (including diabetes mellitus types I and II), as well as diseases and/or disorders associated with, or consequential to, diabetes (e.g. as described below under “Endocrine Disorders,” “Renal Disorders,” and “Gastrointestinal Disorders”).

[0128] Table 2 further characterizes certain encoded polypeptides of the invention, by providing the results of comparisons to protein and protein family databases. The first column provides a unique clone identifier, “Clone ID NO:”, corresponding to a cDNA clone disclosed in Table 1A and/or Table 1B. The second column provides the unique contig identifier, “Contig ID:” which allows correlation with the information in Table 1B. The third column provides the sequence identifier, “SEQ ID NO:”, for the contig polynucleotide sequences. The fourth column provides the analysis method by which the homology/identity disclosed in the Table was determined. The fifth column provides a description of the PFAM/NR hit identified by each analysis. Column six provides the accession number of the PFAM/NR hit disclosed in the fifth column. Column seven, score/percent identity, provides a quality score or the percent identity, of the hit disclosed in column five. Comparisons were made between polypeptides encoded by polynucleotides of the invention and a non-redundant protein database (herein referred to as “NR”), or a database of protein families (herein referred to as “PFAM”), as described below.

[0129] The NR database, which comprises the NBRF PIR database, the NCBI GenPept database, and the SIB SwissProt and TrEMBL databases, was made non-redundant using the computer program nrdb2 (Warren Gish, Washington University in Saint Louis). Each of the polynucleotides shown in Table 1B, column 3 (e.g., SEQ ID NO:X or the ‘Query’ sequence) was used to search against the NR database. The computer program BLASTX was used to compare a 6-frame translation of the Query sequence to the NR database (for information about the BLASTX algorithm please see Altshul et al., J. Mol. Biol. 215:403-410 (1990), and Gish and States, Nat. Genet. 3:266-272 (1993). A description of the sequence that is most similar to the Query sequence (the highest scoring ‘Subject’) is shown in column five of Table 2 and the database accession number for that sequence is provided in column six. The highest scoring ‘Subject’ is reported in Table 2 if (a) the estimated probability that the match occurred by chance alone is less than 1.0e-07, and (b) the match was not to a known repetitive element. BLASTX returns alignments of short polypeptide segments of the Query and Subject sequences which share a high degree of similarity; these segments are known as High-Scoring Segment Pairs or HSPs. Table 2 reports the degree of similarity between the Query and the Subject for each HSP as a percent identity in Column 7. The percent identity is determined by dividing the number of exact matches between the two aligned sequences in the HSP, dividing by the number of Query amino acids in the HSP and multiplying by 100. The polynucleotides of SEQ ID NO:X which encode the polypeptide sequence that generates an HSP are delineated by columns 8 and 9 of Table 2.

[0130] The PFAM database, PFAM version 2.1, (Sonnhammer, Nucl. Acids Res., 26:320-322, 1998)) consists of a series of multiple sequence alignments; one alignment for each protein family. Each multiple sequence alignment is converted into a probability model called a Hidden Markov Model, or HMM, that represents the position-specific variation among the sequences that make up the multiple sequence alignment (see, e.g., Durbin, et al., Biological sequence analysis: probabilistic models of proteins and nucleic acids, Cambridge University Press, 1998 for the theory of BHMs). The program HMMER version 1.8 (Sean Eddy, Washington University in Saint Louis) was used to compare the predicted protein sequence for each Query sequence (SEQ ID NO:Y in Table 1B.1) to each of the HMMs derived from PFAM version 2.1. A HMM derived from PFAM version 2.1 was said to be a significant match to a polypeptide of the invention if the score returned by HMMER 1.8 was greater than 0.8 times the HMMER 1.8 score obtained with the most distantly related known member of that protein family. The description of the PFAM family which shares a significant match with a polypeptide of the invention is listed in column 5 of Table 2, and the database accession number of the PFAM hit is provided in column 6. Column 7 provides the score returned by HMMER version 1.8 for the alignment. Columns 8 and 9 delineate the polynucleotides of SEQ ID NO:X which encode the polypeptide sequence which show a significant match to a PFAM protein family.

[0131] As mentioned, columns 8 and 9 in Table 2, “NT From” and “NT To”, delineate the polynucleotides of “SEQ ID NO:X” that encode a polypeptide having a significant match to the PFAM/NR database as disclosed in the fifth column. In one embodiment, the invention provides a protein comprising, or alternatively consisting of, a polypeptide encoded by the polynucleotides of SEQ ID NO:X delineated in columns 8 and 9 of Table 2. Also provided are polynucleotides encoding such proteins, and the complementary strand thereto.

[0132] The nucleotide sequence SEQ ID NO:X and the translated SEQ ID NO:Y are sufficiently accurate and otherwise suitable for a variety of uses well known in the art and described further below. For instance, the nucleotide sequences of SEQ ID NO:X are useful for designing nucleic acid hybridization probes that will detect nucleic acid sequences contained in SEQ ID NO:X or the cDNA contained in ATCC Deposit No:Z. These probes will also hybridize to nucleic acid molecules in biological samples, thereby enabling immediate applications in chromosome mapping, linkage analysis, tissue identification and/or typing, and a variety of forensic and diagnostic methods of the invention. Similarly, polypeptides identified from SEQ ID NO:Y may be used to generate antibodies which bind specifically to these polypeptides, or fragments thereof, and/or to the polypeptides encoded by the cDNA clones identified in, for example, Table 1A and/or 1B.

[0133] Nevertheless, DNA sequences generated by sequencing reactions can contain sequencing errors. The errors exist as misidentified nucleotides, or as insertions or deletions of nucleotides in the generated DNA sequence. The erroneously inserted or deleted nucleotides cause frame shifts in the reading frames of the predicted amino acid sequence. In these cases, the predicted amino acid sequence diverges from the actual amino acid sequence, even though the generated DNA sequence may be greater than 99.9% identical to the actual DNA sequence (for example, one base insertion or deletion in an open reading frame of over 1000 bases).

[0134] Accordingly, for those applications requiring precision in the nucleotide sequence or the amino acid sequence, the present invention provides not only the generated nucleotide sequence identified as SEQ ID NO:X, and a predicted translated amino acid sequence identified as SEQ ID NO:Y, but also a sample of plasmid DNA containing cDNA ATCC Deposit No:Z (e.g., as set forth in columns 2 and 3 of Table 1A and/or as set forth, for example, in Table 1B, 6, and 7). The nucleotide sequence of each deposited clone can readily be determined by sequencing the deposited clone in accordance with known methods. Further, techniques known in the art can be used to verify the nucleotide sequences of SEQ ID NO:X. The predicted amino acid sequence can then be verified from such deposits. Moreover, the amino acid sequence of the protein encoded by a particular clone can also be directly determined by peptide sequencing or by expressing the protein in a suitable host cell containing the deposited human cDNA, collecting the protein, and determining its sequence.

[0135] RACE Protocol for Recovery of Full-Length Genes

[0136] Partial cDNA clones can be made full-length by utilizing the rapid amplification of cDNA ends (RACE) procedure described in Frohman, M. A., et al., Proc. Natl. Acad. Sci. USA, 85:8998-9002 (1988). A cDNA clone missing either the 5′ or 3′ end can be reconstructed to include the absent base pairs extending to the translational start or stop codon, respectively. In some cases, cDNAs are missing the start codon of translation, therefor. The following briefly describes a modification of this original 5′ RACE procedure. Poly A+ or total RNA is reverse transcribed with Superscript II (Gibco/BRL) and an antisense or complementary primer specific to the cDNA sequence. The primer is removed from the reaction with a Microcon Concentrator (Amicon). The first-strand cDNA is then tailed with dATP and terminal deoxynucleotide transferase (Gibco/BRL). Thus, an anchor sequence is produced which is needed for PCR amplification. The second strand is synthesized from the dA-tail in PCR buffer, Taq DNA polymerase (Perkin-Elmer Cetus), an oligo-dT primer containing three adjacent restriction sites (XhoI, SalI and ClaI) at the 5′ end and a primer containing just these restriction sites. This double-stranded cDNA is PCR amplified for 40 cycles with the same primers as well as a nested cDNA-specific antisense primer. The PCR products are size-separated on an ethidium bromide-agarose gel and the region of gel containing cDNA products the predicted size of missing protein-coding DNA is removed. cDNA is purified from the agarose with the Magic PCR Prep kit (Promega), restriction digested with XhoI or Sail, and ligated to a plasmid such as pBluescript SKII (Stratagene) at XhoI and EcoRV sites. This DNA is transformed into bacteria and the plasmid clones sequenced to identify the correct protein-coding inserts. Correct 5′ ends are confirmed by comparing this sequence with the putatively identified homologue and overlap with the partial cDNA clone. Similar methods known in the art and/or commercial kits are used to amplify and recover 3′ ends.

[0137] Several quality-controlled kits are commercially available for purchase. Similar reagents and methods to those above are supplied in kit form from Gibco/BRL for both 5′ and 3′ RACE for recovery of full length genes. A second kit is available from Clontech which is a modification of a related technique, SLIC (single-stranded ligation to single-stranded cDNA), developed by Dumas et al., Nucleic Acids Res., 19:5227-32 (1991). The major differences in procedure are that the RNA is alkaline hydrolyzed after reverse transcription and RNA ligase is used to join a restriction site-containing anchor primer to the first-strand cDNA. This obviates the necessity for the dA-tailing reaction which results in a polyT stretch that is difficult to sequence past.

[0138] An alternative to generating 5′ or 3′ cDNA from RNA is to use cDNA library double-stranded DNA. An asymmetric PCR-amplified antisense cDNA strand is synthesized with an antisense cDNA-specific primer and a plasmid-anchored primer. These primers are removed and a symmetric PCR reaction is performed with a nested cDNA-specific antisense primer and the plasmid-anchored primer.

[0139] RNA Ligase Protocol for Generating the 5′ or 3′ End Sequences to Obtain Full Length Genes

[0140] Once a gene of interest is identified, several methods are available for the identification of the 5′ or 3′ portions of the gene which may not be present in the original cDNA plasmid. These methods include, but are not limited to, filter probing, clone enrichment using specific probes and protocols similar and identical to 5′ and 3′ RACE. While the full length gene may be present in the library and can be identified by probing, a useful method for generating the 5′ or 3′ end is to use the existing sequence information from the original cDNA to generate the missing information. A method similar to 5′ RACE is available for generating the missing 5′ end of a desired full-length gene. (This method was published by Fromont-Racine et al., Nucleic Acids Res., 21(7):1683-1684 (1993)). Briefly, a specific RNA oligonucleotide is ligated to the 5′ ends of a population of RNA presumably containing full-length gene RNA transcript and a primer set containing a primer specific to the ligated RNA oligonucleotide and a primer specific to a known sequence of the gene of interest, is used to PCR amplify the 5′ portion of the desired full length gene which may then be sequenced and used to generate the full length gene. This method starts with total RNA isolated from the desired source, poly A RNA may be used but is not a prerequisite for this procedure. The RNA preparation may then be treated with phosphatase if necessary to eliminate 5′ phosphate groups on degraded or damaged RNA which may interfere with the later RNA ligase step. The phosphatase if used is then inactivated and the RNA is treated with tobacco acid pyrophosphatase in order to remove the cap structure present at the 5′ ends of messenger RNAs. This reaction leaves a 5′ phosphate group at the 5′ end of the cap cleaved RNA which can then be ligated to an RNA oligonucleotide using T4 RNA ligase. This modified RNA preparation can then be used as a template for first strand cDNA synthesis using a gene specific oligonucleotide. The first strand synthesis reaction can then be used as a template for PCR amplification of the desired 5′ end using a primer specific to the ligated RNA oligonucleotide and a primer specific to the known sequence of the gene of interest. The resultant product is then sequenced and analyzed to confirm that the 5′ end sequence belongs to the relevant gene.

[0141] The present invention also relates to vectors or plasmids which include such DNA sequences, as well as the use of the DNA sequences. The material deposited with the ATCC (e.g., as described in columns 2 and 3 of Table 1A, and/or as set forth in Table 1B, Table 6, or Table 7) is a mixture of cDNA clones derived from a variety of human tissue and cloned in either a plasmid vector or a phage vector, as described, for example, in Table 1A and Table 7. These deposits are referred to as “the deposits” herein. The tissues from which some of the clones were derived are listed in Table 7, and the vector in which the corresponding cDNA is contained is also indicated in Table 7. The deposited material includes cDNA clones corresponding to SEQ ID NO:X described, for example, in Table 1A and/or Table 1B (ATCC Deposit No:Z). A clone which is isolatable from the ATCC Deposits by use of a sequence listed as SEQ ID NO:X, may include the entire coding region of a human gene or in other cases such clone may include a substantial portion of the coding region of a human gene. Furthermore, although the sequence listing may in some instances list only a portion of the DNA sequence in a clone included in the ATCC Deposits, it is well within the ability of one skilled in the art to sequence the DNA included in a clone contained in the ATCC Deposits by use of a sequence (or portion thereof) described in, for example Tables 1A and/or Table 1B or Table 2, by procedures hereinafter further described, and others apparent to those skilled in the art.

[0142] Also provided in Table 1A and Table 7 is the name of the vector which contains the cDNA clone. Each vector is routinely used in the art. The following additional information is provided for convenience.

[0143] Vectors Lambda Zap (U.S. Pat. Nos. 5,128,256 and 5,286,636), Uni-Zap XR (U.S. Pat. Nos. 5,128,256 and 5,286,636), Zap Express (U.S. Pat. Nos. 5,128,256 and 5,286,636), pBluescript (pBS) (Short, J. M. et al., Nucleic Acids Res. 16:7583-7600 (1988); Alting-Mees, M. A. and Short, J. M., Nucleic Acids Res. 17:9494 (1989)) and pBK (Alting-Mees, M. A. et al., Strategies 5:58-61 (1992)) are commercially available from Stratagene Cloning Systems, Inc., 11011 N. Torrey Pines Road, La Jolla, Calif., 92037. pBS contains an ampicillin resistance gene and pBK contains a neomycin resistance gene. Phagemid pBS may be excised from the Lambda Zap and Uni-Zap XR vectors, and phagemid pBK may be excised from the Zap Express vector. Both phagemids may be transformed into E. coli strain XL-1 Blue, also available from Stratagene.

[0144] Vectors pSport1, pCMVSport 1.0, pCMVSport 2.0 and pCMVSport 3.0, were obtained from Life Technologies, Inc., P.O. Box 6009, Gaithersburg, Md. 20897. All Sport vectors contain an ampicillin resistance gene and may be transformed into E. coli strain DH10B, also available from Life Technologies. See, for instance, Gruber, C. E., et al., Focus 15:59-(1993). Vector lafmid BA (Bento Soares, Columbia University, New York, N.Y.) contains an ampicillin resistance gene and can be transformed into E. coli strain XL-1 Blue. Vector pCR®2.1, which is available from Invitrogen, 1600 Faraday Avenue, Carlsbad, Calif. 92008, contains an ampicillin resistance gene and may be transformed into E. coli strain DH10B, available from Life Technologies. See, for instance, Clark, J. M., Nuc. Acid; Res. 16:9677-9686 (1988) and Mead, D. et al., Bio/Technology 9: (1991).

[0145] The present invention also relates to the genes corresponding to SEQ ID NO:X, SEQ ID NO:Y, and/or the deposited clone (ATCC Deposit No:Z). The corresponding gene can be isolated in accordance with known methods using the sequence information disclosed herein. Such methods include preparing probes or primers from the disclosed sequence and identifying or amplifying the corresponding gene from appropriate sources of genomic material.

[0146] Also provided in the present invention are allelic variants, orthologs, and/or species homologs. Procedures known in the art can be used to obtain full-length genes, allelic variants, splice variants, full-length coding portions, orthologs, and/or species homologs of genes corresponding to SEQ ID NO:X or the complement thereof, polypeptides encoded by genes corresponding to SEQ ID NO:X or the complement thereof, and/or the cDNA contained in ATCC Deposit No:Z, using information from the sequences disclosed herein or the clones deposited with the ATCC. For example, allelic variants and/or species homologs may be isolated and identified by making suitable probes or primers from the sequences provided herein and screening a suitable nucleic acid source for allelic variants and/or the desired homologue.

[0147] The polypeptides of the invention can be prepared in any suitable manner. Such polypeptides include isolated naturally occurring polypeptides, recombinantly produced polypeptides, synthetically produced polypeptides, or polypeptides produced by a combination of these methods. Means for preparing such polypeptides are well understood in the art.

[0148] The polypeptides may be in the form of the secreted protein, including the mature form, or may be a part of a larger protein, such as a fusion protein (see below). It is often advantageous to include an additional amino acid sequence which contains secretory or leader sequences, pro-sequences, sequences which aid in purification, such as multiple histidine residues, or an additional sequence for stability during recombinant production.

[0149] The polypeptides of the present invention are preferably provided in an isolated form, and preferably are substantially purified. A recombinantly produced version of a polypeptide, including the secreted polypeptide, can be substantially purified using techniques described herein or otherwise known in the art, such as, for example, by the one-step method described in Smith and Johnson, Gene 67:31-40 (1988). Polypeptides of the invention also can be purified from natural, synthetic or recombinant sources using techniques described herein or otherwise known in the art, such as, for example, antibodies of the invention raised against the polypeptides of the present invention in methods which are well known in the art.

[0150] The present invention provides a polynucleotide comprising, or alternatively consisting of, the nucleic acid sequence of SEQ ID NO:X, and/or the cDNA sequence contained in ATCC Deposit No:Z. The present invention also provides a polypeptide comprising, or alternatively, consisting of, the polypeptide sequence of SEQ ID NO:Y, a polypeptide encoded by SEQ ID NO:X or a complement thereof, a polypeptide encoded by the cDNA contained in ATCC Deposit No:Z, and/or the polypeptide sequence encoded by a nucleotide sequence in SEQ ID NO:B as defined in column 6 of Table 1C. Polynucleotides encoding a polypeptide comprising, or alternatively consisting of the polypeptide sequence of SEQ ID NO:Y, a polypeptide encoded by SEQ ID NO:X, a polypeptide encoded by the cDNA contained in ATCC Deposit No:Z, and/or a polypeptide sequence encoded by a nucleotide sequence in SEQ ID NO:B as defined in column 6 of Table 1C are also encompassed by the invention. The present invention further encompasses a polynucleotide comprising, or alternatively consisting of, the complement of the nucleic acid sequence of SEQ ID NO:X, a nucleic acid sequence encoding a polypeptide encoded by the complement of the nucleic acid sequence of SEQ ID NO:X, and/or the cDNA contained in ATCC Deposit No:Z.

[0151] Moreover, representative examples of polynucleotides of the invention comprise, or alternatively consist of, one, two, three, four, five, six, seven, eight, nine, ten, or more of the sequences delineated in Table 1C column 6, or any combination thereof. Additional, representative examples of polynucleotides of the invention comprise, or alternatively consist of, one, two, three, four, five, six, seven, eight, nine, ten, or more of the complementary strand(s) of the sequences delineated in Table 1C column 6, or any combination thereof. In further embodiments, the above-described polynucleotides of the invention comprise, or alternatively consist of, sequences delineated in Table 1C, column 6, and have a nucleic acid sequence which is different from that of the BAC fragment having the sequence disclosed in SEQ ID NO:B (see Table 1C, column 5). In additional embodiments, the above-described polynucleotides of the invention comprise, or alternatively consist of, sequences delineated in Table 1C, column 6, and have a nucleic acid sequence which is different from that published for the BAC clone identified as BAC ID NO:A (see Table 1C, column 4). In additional embodiments, the above-described polynucleotides of the invention comprise, or alternatively consist of, sequences delineated in Table 1C, column 6, and have a nucleic acid sequence which is different from that contained in the BAC clone identified as BAC ID NO:A (see Table 1C, column 4). Polypeptides encoded by these polynucleotides, other polynucleotides that encode these polypeptides, and antibodies that bind these polypeptides are also encompassed by the invention. Additionally, fragments and variants of the above-described polynucleotides and polypeptides are also encompassed by the invention.

[0152] Further, representative examples of polynucleotides of the invention comprise, or alternatively consist of, one, two, three, four, five, six, seven, eight, nine, ten, or more of the sequences delineated in column 6 of Table 1C which correspond to the same Clone ID (see Table 1C, column 1), or any combination thereof. Additional, representative examples of polynucleotides of the invention comprise, or alternatively consist of, one, two, three, four, five, six, seven, eight, nine, ten, or more of the complementary strand(s) of the sequences delineated in column 6 of Table 1C which correspond to the same Clone ID (see Table 1C, column 1), or any combination thereof. In further embodiments, the above-described polynucleotides of the invention comprise, or alternatively consist of, sequences delineated in column 6 of Table 1C which correspond to the same Clone ID (see Table 1C, column 1) and have a nucleic acid sequence which is different from that of the BAC fragment having the sequence disclosed in SEQ ID NO:B (see Table 1C, column 5). In additional embodiments, the above-described polynucleotides of the invention comprise, or alternatively consist of, sequences delineated in column 6 of Table 1C which correspond to the same Clone ID (see Table 1C, column 1) and have a nucleic acid sequence which is different from that published for the BAC clone identified as BAC ID NO:A (see Table 1C, column 4). In additional embodiments, the above-described polynucleotides of the invention comprise, or alternatively consist of, sequences delineated in column 6 of Table 1C which correspond to the same Clone ID (see Table 1C, column 1) and have a nucleic acid sequence which is different from that contained in the BAC clone identified as BAC ID NO:A (see Table 1C, column 4). Polypeptides encoded by these polynucleotides, other polynucleotides that encode these polypeptides, and antibodies that bind these polypeptides are also encompassed by the invention. Additionally, fragments and variants of the above-described polynucleotides and polypeptides are also encompassed by the invention.

[0153] Further, representative examples of polynucleotides of the invention comprise, or alternatively consist of, one, two, three, four, five, six, seven, eight, nine, ten, or more of the sequences delineated in column 6 of Table 1C which correspond to the same contig sequence identifier SEQ ID NO:X (see Table 1C, column 2), or any combination thereof. Additional, representative examples of polynucleotides of the invention comprise, or alternatively consist of, one, two, three, four, five, six, seven, eight, nine, ten, or more of the complementary strand(s) of the sequences delineated in column 6 of Table 1C which correspond to the same contig sequence identifier SEQ ID NO:X (see Table 1C, column 2), or any combination thereof. In further embodiments, the above-described polynucleotides of the invention comprise, or alternatively consist of, sequences delineated in column 6 of Table 1C which correspond to the same contig sequence identifier SEQ ID NO:X (see Table 1C, column 2) and have a nucleic acid sequence which is different from that of the BAC fragment having the sequence disclosed in SEQ ED NO:B (see Table 1C, column 5). In additional embodiments, the above-described polynucleotides of the invention comprise, or alternatively consist of, sequences delineated in column 6 of Table 1C which correspond to the same contig sequence identifier SEQ ID NO:X (see Table 1C, column 2) and have a nucleic acid sequence which is different from that published for the BAC clone identified as BAC ID NO:A (see Table 1C, column 4). In additional embodiments, the above-described polynucleotides of the invention comprise, or alternatively consist of, sequences delineated in column 6 of Table 1C which correspond to the same contig sequence identifier SEQ ID NO:X (see Table 1C, column 2) and have a nucleic acid sequence which is different from that contained in the BAC clone identified as BAC ID NO:A (See Table 1C, column 4). Polypeptides encoded by these polynucleotides, other polynucleotides that encode these polypeptides, and antibodies that bind these polypeptides are also encompassed by the invention. Additionally, fragments and variants of the above-described polynucleotides and polypeptides are also encompassed by the invention.

[0154] Moreover, representative examples of polynucleotides of the invention comprise, or alternatively consist of, one, two, three, four, five, six, seven, eight, nine, ten, or more of the sequences delineated in the same row of Table 1C column 6, or any combination thereof. Additional, representative examples of polynucleotides of the invention comprise, or alternatively consist of, one, two, three, four, five, six, seven, eight, nine, ten, or more of the complementary strand(s) of the sequences delineated in the same row of Table 1C column 6, or any combination thereof. In preferred embodiments, the polynucleotides of the invention comprise, or alternatively consist of, one, two, three, four, five, six, seven, eight, nine, ten, or more of the complementary strand(s) of the sequences delineated in the same row of Table 1C column 6, wherein sequentially delineated sequences in the table (i.e. corresponding to those exons located closest to each other) are directly contiguous in a 5′ to 3′ orientation. In further embodiments, above-described polynucleotides of the invention comprise, or alternatively consist of, sequences delineated in the same row of Table 1C, column 6, and have a nucleic acid sequence which is different from that of the BAC fragment having the sequence disclosed in SEQ ID NO:B (see Table 1C, column 5). In additional embodiments, the above-described polynucleotides of the invention comprise, or alternatively consist of, sequences delineated in the same row of Table 1C, column 6, and have a nucleic acid sequence which is different from that published for the BAC clone identified as BAC ID NO:A (see Table 1C, column 4). In additional embodiments, the above-described polynucleotides of the invention comprise, or alternatively consist of, sequences delineated in the same row of Table 1C, column 6, and have a nucleic acid sequence which is different from that contained in the BAC clone identified as BAC ID NO:A (see Table 1C, column 4). Polypeptides encoded by these polynucleotides, other polynucleotides that encode these polypeptides, and antibodies that bind these polypeptides are also encompassed by the invention.

[0155] In additional specific embodiments, polynucleotides of the invention comprise, or alternatively consist of, one, two, three, four, five, six, seven, eight, nine, ten, or more of the sequences delineated in column 6 of Table 1C, and the polynucleotide sequence of SEQ ID NO:X (e.g., as defined in Table 1C, column 2) or fragments or variants thereof. Polypeptides encoded by these polynucleotides, other polynucleotides that encode these polypeptides, and antibodies that bind these polypeptides are also encompassed by the invention.

[0156] In additional specific embodiments, polynucleotides of the invention comprise, or alternatively consist of, one, two, three, four, five, six, seven, eight, nine, ten, or more of the sequences delineated in column 6 of Table 1C which correspond to the same Clone ID (see Table 1C, column 1), and the polynucleotide sequence of SEQ ID NO:X (e.g., as defined in Table 1A, Table 1B, or Table 1C) or fragments or variants thereof. In preferred embodiments, the delineated sequence(s) and polynucleotide sequence of SEQ ID NO:X correspond to the same Clone ID. Polypeptides encoded by these polynucleotides, other polynucleotides that encode these polypeptides, and antibodies that bind these polypeptides are also encompassed by the invention.

[0157] In further specific embodiments, polynucleotides of the invention comprise, or alternatively consist of, one, two, three, four, five, six, seven, eight, nine, ten, or more of the sequences delineated in the same row of column 6 of Table 1C, and the polynucleotide sequence of SEQ ID NO:X (e.g., as defined in Table 1A, Table 1B, or Table 1C) or fragments or variants thereof. In preferred embodiments, the delineated sequence(s) and polynucleotide sequence of SEQ ID NO:X correspond to the same row of column 6 of Table 1C. Polypeptides encoded by these polynucleotides, other polynucleotides that encode these polypeptides, and antibodies that bind these polypeptides are also encompassed by the invention.

[0158] In additional specific embodiments, polynucleotides of the invention comprise, or alternatively consist of a polynucleotide sequence in which the 3′ 10 polynucleotides of one of the sequences delineated in column 6 of Table 1C and the 5′ 10 polynucleotides of the sequence of SEQ ID NO:X are directly contiguous. Nucleic acids which hybridize to the complement of these 20 contiguous polynucleotides under stringent hybridization conditions or alternatively, under lower stringency conditions, are also encompassed by the invention. Polypeptides encoded by these polynucleotides and/or nucleic acids, other polynucleotides and/or nucleic acids that encode these polypeptides, and antibodies that bind these polypeptides are also encompassed by the invention. Additionally, fragments and variants of the above-described polynucleotides, nucleic acids, and polypeptides are also encompassed by the invention.

[0159] In additional specific embodiments, polynucleotides of the invention comprise, or alternatively consist of, a polynucleotide sequence in which the 3′ 10 polynucleotides of one of the sequences delineated in column 6 of Table 1C and the 5′ 10 polynucleotides of a fragment or variant of the sequence of SEQ ID NO:X are directly contiguous Nucleic acids which hybridize to the complement of these 20 contiguous polynucleotides under stringent hybridization conditions or alternatively, under lower stringency conditions, are also encompassed by the invention. Polypeptides encoded by these polynucleotides and/or nucleic acids, other polynucleotides and/or nucleic acids encoding these polypeptides, and antibodies that bind these polypeptides are also encompassed by the invention. Additionally, fragments and variants of the above-described polynucleotides, nucleic acids, and polypeptides are also encompassed by the invention.

[0160] In specific embodiments, polynucleotides of the invention comprise, or alternatively consist of, a polynucleotide sequence in which the 3′ 10 polynucleotides of the sequence of SEQ ID NO:X and the 5′ 10 polynucleotides of the sequence of one of the sequences delineated in column 6 of Table 1C are directly contiguous. Nucleic acids which hybridize to the complement of these 20 contiguous polynucleotides under stringent hybridization conditions or alternatively, under lower stringency conditions, are also encompassed by the invention. Polypeptides encoded by these polynucleotides and/or nucleic acids, other polynucleotides and/or nucleic acids encoding these polypeptides, and antibodies that bind these polypeptides are also encompassed by the invention. Additionally, fragments and variants of the above-described polynucleotides, nucleic acids, and polypeptides are also encompassed by the invention.

[0161] In specific embodiments, polynucleotides of the invention comprise, or alternatively consist of, a polynucleotide sequence in which the 3′ 10 polynucleotides of a fragment or variant of the sequence of SEQ ID NO:X and the 5′ 10 polynucleotides of the sequence of one of the sequences delineated in column 6 of Table 1C are directly contiguous. Nucleic acids which hybridize to the complement of these 20 contiguous polynucleotides under stringent hybridization conditions or alternatively, under lower stringency conditions, are also encompassed by the invention. Polypeptides encoded by these polynucleotides and/or nucleic acids, other polynucleotides and/or nucleic acids encoding these polypeptides, and antibodies that bind these polypeptides are also encompassed by the invention. Additionally, fragments and variants of the above-described polynucleotides, nucleic acids, and polypeptides, are also encompassed by the invention.

[0162] In further specific embodiments, polynucleotides of the invention comprise, or alternatively consist of, a polynucleotide sequence in which the 3′ 10 polynucleotides of one of the sequences delineated in column 6 of Table 1C and the 5′ 10 polynucleotides of another sequence in column 6 are directly contiguous. Nucleic acids which hybridize to the complement of these 20 contiguous polynucleotides under stringent hybridization conditions or alternatively, under lower stringency conditions, are also encompassed by the invention. Polypeptides encoded by these polynucleotides and/or nucleic acids, other polynucleotides and/or nucleic acids encoding these polypeptides, and antibodies that bind these polypeptides are also encompassed by the invention. Additionally, fragments and variants of the above-described polynucleotides, nucleic acids, and polypeptides are also encompassed by the invention.

[0163] In specific embodiments, polynucleotides of the invention comprise, or alternatively consist of, a polynucleotide sequence in which the 3′ 10 polynucleotides of one of the sequences delineated in column 6 of Table 1C and the 5′ 10 polynucleotides of another sequence in column 6 corresponding to the same Clone ID (see Table 1C, column 1) are directly contiguous. Nucleic acids which hybridize to the complement of these 20 lower stringency conditions, are also encompassed by the invention. Polypeptides encoded by these polynucleotides and/or nucleic acids, other polynucleotides and/or nucleic acids encoding these polypeptides, and antibodies that bind these polypeptides are also encompassed by the invention. Additionally, fragments and variants of the above-described polynucleotides, nucleic acids, and polypeptides are also encompassed by the invention.

[0164] In specific embodiments, polynucleotides of the invention comprise, or alternatively consist of, a polynucleotide sequence in which the 3′ 10 polynucleotides of one sequence in column 6 corresponding to the same contig sequence identifer SEQ ID NO:X (see Table 1C, column 2) are directly contiguous. Nucleic acids which hybridize to the complement of these 20 contiguous polynucleotides under stringent hybridization conditions or alternatively, under lower stringency conditions, are also encompassed by the invention. Polypeptides encoded by these polynucleotides and/or nucleic acids, other polynucleotides and/or nucleic acids encoding these polypeptides, and antibodies that bind these polypeptides are also encompassed by the invention. Additionally, fragments and variants of the above-described polynucleotides, nucleic acids, and polypeptides are also encompassed by the invention.

[0165] In specific embodiments, polynucleotides of the invention comprise, or alternatively consist of a polynucleotide sequence in which the 3′ 10 polynucleotides of one of the sequences delineated in column 6 of Table 1C and the 5′ 10 polynucleotides of another sequence in column 6 corresponding to the same row are directly contiguous. In preferred embodiments, the 3′ 10 polynucleotides of one of the sequences delineated in column 6 of Table 1C is directly contiguous with the 5′ 10 polynucleotides of the next sequential exon delineated in Table 1C, column 6. Nucleic acids which hybridize to the complement of these 20 contiguous polynucleotides under stringent hybridization conditions or alternatively, under lower stringency conditions, are also encompassed by the invention. Polypeptides encoded by these polynucleotides and/or nucleic acids, other polynucleotides and/or nucleic acids encoding these polypeptides, and antibodies that bind these polypeptides are also encompassed by the invention. Additionally, fragments and variants of the above-described polynucleotides, nucleic acids, and polypeptides are also encompassed by the invention.

[0166] Table 3

[0167] Many polynucleotide sequences, such as EST sequences, are publicly available and accessible through sequence databases and may have been publicly available prior to conception of the present invention. Preferably, such related polynucleotides are specifically excluded from the scope of the present invention. Accordingly, for each contig sequence (SEQ ID NO:X) listed in the fifth column of Table 1A and/or the fourth column of Table 1B, preferably excluded are one or more polynucleotides comprising a nucleotide sequence described by the general formula of a−b, where a is any integer between 1 and the final nucleotide minus 15 of SEQ ID NO:X, b is an integer of 15 to the final nucleotide of SEQ ID NO:X, where both a and b correspond to the positions of nucleotide residues shown in SEQ ID NO:X, and where b is greater than or equal to a+14. More specifically, preferably excluded are one or more polynucleotides comprising a nucleotide sequence described by the general formula of a−b, where a and b are integers as defined in columns 4 and 5, respectively, of Table 3. In specific embodiments, the polynucleotides of the invention do not consist of at least one, two, three, four, five, ten, or more of the specific polynucleotide sequences referenced by the Genbank Accession No. as disclosed in column 6 of Table 3 (including for example, published sequence in connection with a particular BAC clone). In further embodiments, preferably excluded from the invention are the specific polynucleotide sequence(s) contained in the clones corresponding to at least one, two, three, four, five, ten, or more of the available material having the accession numbers identified in the sixth column of this Table (including for example, the actual sequence contained in an identified BAC clone). In no way is this listing meant to encompass all of the sequences which may be excluded by the general formula, it is just a representative example. All references available through these accessions are hereby incorporated by reference in their entirety.

LENGTHY TABLE REFERENCED HERE
US20070042361A1-20070222-T00002
Please refer to the end of the specification for access instructions.

[0168] Description of Table 4

[0169] Table 4 provides a key to the tissue/cell source identifier code disclosed in Table 1B.2, column 5. Column 1 of Table 4 provides the tissue/cell source identifier code disclosed in Table 1B.2, Column 5. Columns 2-5 provide a description of the tissue or cell source. Note that “Description” and “Tissue” sources (i.e. columns 2 and 3) having the prefix “a_” indicates organs, tissues, or cells derived from “adult” sources. Codes corresponding to diseased tissues are indicated in column 6 with the word “disease.” The use of the word “disease” in column 6 is non-limiting. The tissue or cell source may be specific (e.g. a neoplasm), or may be disease-associated (e.g., a tissue sample from a normal portion of a diseased organ). Furthermore, tissues and/or cells lacking the “disease” designation may still be derived from sources directly or indirectly involved in a disease state or disorder, and therefore may have a further utility in that disease state or disorder. In numerous cases where the tissue/cell source is a library, column 7 identifies the vector used to generate the library.

Description of Table 5

[0170] Table 5 provides a key to the OMIM reference identification numbers disclosed in Table 1B.1, column 9. OMIM reference identification numbers (Column 1) were derived from Online Mendelian Inheritance in Man (Online Mendelian Inheritance in Man, OMIM. McKusick-Nathans Institute for Genetic Medicine, Johns Hopkins University (Baltimore, Md.) and National Center for Biotechnology Information, National Library of Medicine, (Bethesda, Md.) 2000. World Wide Web URL: http://www.ncbi.nlm.nih.gov/omim/). Column 2 provides diseases associated with the cytologic band disclosed in Table 1B.1, column 8, as determined using the Morbid Map database.

TABLE 5

| OMIM Reference | Description |
|---|---|
| 100678 | ACAT2 deficiency |
| 100690 | Myasthenic syndrome, slow-channel congenital, 601462 |
| 100730 | Myasthenia gravis, neonatal transient |
| 101000 | Meningioma, NF2-related, sporadic Schwannoma, sporadic |
| 101000 | Neurofibromatosis, type 2 |
| 101000 | Neurolemmomatosis |
| 101000 | Malignant mesothelioma, sporadic |
| 102700 | Severe combined immunodeficiency due to ADA deficiency |
| 102700 | Hemolytic anemia due to ADA excess |
| 102770 | Myoadenylate deaminase deficiency |
| 102772 | [AMP deaminase deficiency, erythrocytic] |
| 103050 | Autism, succinylpurinemic |
| 103050 | Adenylosuccinase deficiency |
| 103600 | [Dysalbuminemic hyperthyroxinemia] |
| 103600 | [Dysalbuminemic hyperzincemia], 194470 |
| 103600 | Analbuminemia |
| 103850 | Aldolase A deficiency |
| 103950 | Emphysema due to alpha-2-macroglobulin deficiency |
| 104150 | [AFP deficiency, congenital] |
| 104150 | [Hereditary persistence of alpha-fetoprotein] |
| 104311 | Alzheimer disease-3 |
| 104500 | Amelogenesis imperfecta-2, hypoplastic local type |
| 104770 | Amyloidosis, secondary, susceptibility to |
| 106100 | Angioedema, hereditary |
| 106150 | Hypertension, essential, susceptibility to |
| 106150 | Preeclampsia, susceptibility to |
| 106165 | Hypertension, essential, 145500 |
| 106180 | Myocardial infarction, susceptibility to |
| 106210 | Peters anomaly |
| 106210 | Cataract, congenital, with late-onset corneal dystrophy |
| 106210 | Foveal hypoplasia, isolated, 136520 |
| 106210 | Aniridia |
| 107250 | Anterior segment mesenchymal dysgenesis |
| 107271 | CD59 deficiency |
| 107300 | Antithrombin III deficiency |
| 107670 | Apolipoprotein A-II deficiency |
| 107741 | Hyperlipoproteinemia, type III |
| 107777 | Diabetes insipidus, nephrogenic, autosomal recessive, 222000 |
| 107970 | Arrhythmogenic right ventricular dysplasia-1 |
| 108120 | Distal arthrogryposis-1 |
| 108725 | Atherosclerosis, susceptibility to |
| 108730 | Brody myopathy, 601003 |
| 109150 | Machado-Joseph disease |
| 109270 | Renal tubular acidosis, distal, 179800 |
| 109270 | Spherocytosis, hereditary |
| 109270 | [Acanthocytosis, one form] |
| 109270 | [Elliptocytosis, Malaysian-Melanesian type] |
| 109270 | Hemolytic anemia due to band 3 defect |
| 110700 | Vivax malaria, susceptibility to |
| 112250 | Bone dysplasia with medullary fibrosarcoma |
| 112410 | Hypertension with brachydactyly |
| 113900 | Heart block, progressive familial, type I |
| 114240 | Muscular dystrophy, limb-girdle, type 2A, 253600 |
| 114290 | Campomelic dysplasia with autosomal sex reversal |
| 114400 | Lynch cancer family syndrome II |
| 114550 | Hepatocellular carcinoma |
| 114835 | Monocyte carboxyesterase deficiency |
| 115500 | Acatalasemia |
| 116800 | Cataract, Marner type |
| 116806 | Colorectal cancer |
| 116860 | Cavernous angiomatous malformations |
| 117700 | [Hypoceruloplasminemia, hereditary] |
| 117700 | Hemosiderosis, systemic, due to aceruloplasminemia |
| 118210 | Charcot-Marie-Tooth neuropathy-2A |
| 118425 | Myotonia congenita, dominant, 160800 |
| 118425 | Myotonia congenita, recessive, 255700 |
| 118425 | Myotonia levior, recessive |
| 118485 | Polycystic ovary syndrome with hyperandrogenemia |
| 118800 | Choreoathetosis, familial paroxysmal |
| 120070 | Alport syndrome, autosomal recessive, 203780 |
| 120110 | Metaphyseal chondrodysplasia, Schmid type |
| 120120 | Epidermolysis bullosa dystrophica, dominant, 131750 |
| 120120 | Epidermolysis bullosa dystrophica, recessive, 226600 |
| 120120 | Epidermolysis bullosa, pretibial, 131850 |
| 120131 | Alport syndrome, autosomal recessive, 203780 |
| 120131 | Hematuria, familial benign |
| 120140 | Osteoarthrosis, precocious |
| 120140 | SED congenita |
| 120140 | SMED Strudwick type |
| 120140 | Stickler syndrome, type I |
| 120140 | Wagner syndrome, type II |
| 120140 | Achondrogenesis-hypochondrogenesis, type II |
| 120140 | Kniest dysplasia |
| 120150 | Osteogenesis imperfecta, 4 clinical forms, 166200, 166210, |
| | 259420, 166220 |
| 120150 | Osteoporosis, idiopathic, 166710 |
| 120150 | Ehlers-Danlos syndrome, type VIIA1, 130060 |
| 120260 | Epiphyseal dysplasia, multiple, type 2, 600204 |
| 120280 | Stickler syndrome, type III |
| 120280 | Marshall syndrome, 154780 |
| 120436 | Muir-Torre family cancer syndrome, 158320 |
| 120436 | Turcot syndrome with glioblastoma, 276300 |
| 120436 | Colorectal cancer, hereditary nonpolyposis, type 2 |
| 120550 | C1q deficiency, type A |
| 120570 | C1q deficiency, type B |
| 120575 | C1q deficiency, type C |
| 120700 | C3 deficiency |
| 121014 | Heterotaxia, visceroatrial, autosomal recessive |
| 121800 | Corneal dystrophy, crystalline, Schnyder |
| 122720 | Nicotine addiction, protection from |
| 122720 | Coumarin resistance, 122700 |
| 123000 | Craniometaphyseal dysplasia |
| 123270 | [Creatine kinase, brain type, ectopic expression of] |
| 123620 | Cataract, cerulean, type 2, 601547 |
| 123660 | Cataract, Coppock-like |
| 123940 | White sponge nevus, 193900 |
| 124030 | Parkinsonism, susceptibility to |
| 124030 | Debrisoquine sensitivity |
| 125852 | Insulin-dependent diabetes mellitus-2 |
| 126337 | Myxoid liposarcoma |
| 126340 | Xeroderma pigmentosum, group D, 278730 |
| 126391 | DNA ligase I deficiency |
| 126451 | Schizophrenia, susceptibility to |
| 126452 | Autonomic nervous system dysfunction |
| 126452 | [Novelty seeking personality] |
| 126650 | Chloride diarrhea, congenital, Finnish type, 214700 |
| 126650 | Colon cancer |
| 129900 | EEC syndrome-1 |
| 130500 | Elliptocytosis-1 |
| 130650 | Beckwith-Wiedemann syndrome |
| 131210 | Atherosclerosis, susceptibility to |
| 132700 | Cylindromatosis |
| 133171 | [Erythrocytosis, familial], 133100 |
| 133200 | Erythrokeratodermia variabilis |
| 133450 | Neuroepithelioma |
| 133450 | Ewing sarcoma |
| 133701 | Exostoses, multiple, type 2 |
| 133780 | Vitreoretinopathy, exudative, familial |
| 134790 | Hyperferritinemia-cataract syndrome, 600886 |
| 134820 | Dysfibrinogenemia, alpha type, causing bleeding diathesis |
| 134820 | Dysfibrinogenemia, alpha type, causing recurrent thrombosis |
| 134820 | Amyloidosis, hereditary renal, 105200 |
| 134830 | Dysfibrinogenemia, beta type |
| 134850 | Dysfibrinogenemia, gamma type |
| 134850 | Hypofibrinogenemia, gamma type |
| 135600 | Ehlers-Danlos syndrome, type X |
| 135700 | Fibrosis of extraocular muscles, congenital, 1 |
| 135940 | Ichthyosis vulgaris, 146700 |
| 136132 | [Fish-odor syndrome], 602079 |
| 136530 | Male infertility, familial |
| 136836 | Fucosyltransferase-6 deficiency |
| 138030 | [Hyperproglucagonemia] |
| 138033 | Diabetes mellitus, type II |
| 138079 | Hyperinsulinism, familial, 602485 |
| 138079 | MODY, type 2, 125851 |
| 138140 | Glucose transport defect, blood-brain barrier |
| 138190 | Diabetes mellitus, noninsulin-dependent |
| 138300 | Hemolytic anemia due to glutathione reductase deficiency |
| 138320 | Hemolytic anemia due to glutathione peroxidase deficiency |
| 138700 | [Apolipoprotein H deficiency] |
| 138720 | Bernard-Soulier syndrome, type B |
| 138981 | Pulmonary alveolar proteinosis, 265120 |
| 139250 | Isolated growth hormone deficiency, Illig type with absent GH and |
| | Kowarski type with bioinactive GH |
| 139350 | Epidermolytic hyperkeratosis, 113800 |
| 139350 | Keratoderma, palmoplantar, nonepidermolytic |
| 140100 | [Anhaptoglobinemia] |
| 140100 | [Hypohaptogloginemia] |
| 141750 | Alpha-thalassemia/mental retardation syndrome, type 1 |
| 141800 | Methemoglobinemias, alpha- |
| 141800 | Thalassemias, alpha- |
| 141800 | Erythremias, alpha- |
| 141800 | Heinz body anemias, alpha- |
| 141850 | Thalassemia, alpha- |
| 141850 | Erythrocytosis |
| 141850 | Heinz body anemia |
| 141850 | Hemoglobin H disease |
| 141850 | Hypochromic microcytic anemia |
| 141900 | Methemoglobinemias, beta- |
| 141900 | Sickle cell anemia |
| 141900 | Thalassemias, beta- |
| 141900 | Erythremias, beta- |
| 141900 | HPFH, deletion type |
| 141900 | Heinz body anemias, beta- |
| 142000 | Thalassemia due to Hb Lepore |
| 142000 | Thalassemia, delta- |
| 142200 | HPFH, nondeletion type A |
| 142250 | HPFH, nondeletion type G |
| 142270 | Hereditary persistence of fetal hemoglobin |
| 142989 | Synpolydactyly, type II, 186000 |
| 143890 | Hypercholesterolemia, familial |
| 145001 | Hyperparathyroidism-jaw tumor syndrome |
| 145260 | Pseudohypoaldosteronism, type II |
| 145410 | Opitz G syndrome, type II |
| 145981 | Hypocalciuric hypercalcemia, type II |
| 146760 | [IgG receptor I, phagocytic, familial deficiency of] |
| 146790 | Lupus nephritis, susceptibility to |
| 147050 | Atopy |
| 147141 | Leukemia, acute lymphoblastic |
| 147200 | [Kappa light chain deficiency] |
| 147545 | Diabetes mellitus, noninsulin-dependent |
| 147670 | Rabson-Mendenhall syndrome |
| 147670 | Diabetes mellitus, insulin-resistant, with acanthosis nigricans |
| 147670 | Leprechaunism |
| 147781 | Atopy, susceptibility to |
| 148040 | Epidermolysis bullosa simplex, Koebner, Dowling-Meara, and |
| | Weber-Cockayne types, 131900, 131760, 131800 |
| 148041 | Pachyonychia congenita, Jadassohn-Lewandowsky type, 167200 |
| 148043 | Meesmann corneal dystrophy, 122100 |
| 148065 | White sponge nevus, 193900 |
| 148070 | Liver disease, susceptibility to, from hepatotoxins or viruses |
| 148080 | Epidermolytic hyperkeratosis, 113800 |
| 148370 | Keratolytic winter erythema |
| 150000 | Exertional myoglobinuria due to deficiency of LDH-A |
| 150200 | [Placental lactogen deficiency] |
| 150210 | Lactoferrin-deficient neutrophils, 245480 |
| 150270 | Laryngeal adductor paralysis |
| 150292 | Epidermolysis bullosa, Herlitz junctional type, 226700 |
| 151390 | Leukemia, acute T-cell |
| 151410 | Leukemia, chronic myeloid |
| 151440 | Leukemia, T-cell acute lymphoblastoid |
| 152427 | Long QT syndrome-2 |
| 152445 | Vohwinkel syndrome, 124500 |
| 152445 | Erythrokeratoderma, progressive symmetric, 602036 |
| 153880 | Macular dystrophy, dominant cystoid |
| 154275 | Malignant hyperthermia susceptibility 2 |
| 154276 | Malignant hyperthermia susceptibility 3 |
| 154705 | Marfan syndrome, type II |
| 155600 | Malignant melanoma, cutaneous |
| 156225 | Muscular dystrophy, congenital merosin-deficient |
| 156232 | Mesomelic dysplasia, Kantaputra type |
| 156850 | Cataract, congenital, with microphthalmia |
| 157640 | PEO with mitochondrial DNA deletions, type 1 |
| 157655 | Lactic acidosis due to defect in iron-sulfur cluster of complex I |
| 157900 | Moebius syndrome |
| 159001 | Muscular dystrophy, limb-girdle, type 1B |
| 160781 | Cardiomyopathy, hypertrophic, mid-left ventricular chamber type |
| 160900 | Myotonic dystrophy |
| 162100 | Neuralgic amyotrophy with predilection for brachial plexus |
| 162200 | Neurofibromatosis, type 1 |
| 162200 | Watson syndrome, 193520 |
| 164200 | Oculodentodigital dysplasia |
| 164200 | Syndactyly, type III, 186100 |
| 164731 | Ovarian carcinoma, 167000 |
| 164790 | Colorectal cancer |
| 164920 | Piebaldism |
| 164920 | Mast cell leukemia |
| 164920 | Mastocytosis with associated hematologic disorder |
| 164953 | Liposarcoma |
| 165240 | Pallister-Hall syndrome, 146510 |
| 165240 | Postaxial polydactyly type A1, 174200 |
| 165240 | Greig cephalopolysyndactyly syndrome, 175700 |
| 165320 | Hepatocellular carcinoma |
| 166600 | Osteopetrosis, AD, type II |
| 168360 | Paraneoplastic sensory neuropathy |
| 168468 | Metaphyseal chondrodysplasia, Murk Jansen type, 156400 |
| 168470 | Humoral hypercalcemia of malignancy |
| 168500 | Parietal foramina |
| 169600 | Hailey-Hailey disease |
| 170500 | Myotonia congenita, atypical acetazolamide-responsive |
| 170500 | Paramyotonia congenita, 168300 |
| 170500 | Hyperkalemic periodic paralysis |
| 170650 | Periodontitis, juvenile |
| 170995 | Zellweger syndrome-2 |
| 171190 | Hypertension, essential, 145500 |
| 171650 | Lysosomal acid phosphatase deficiency |
| 171760 | Hypophosphatasia, adult, 146300 |
| 171760 | Hypophosphatasia, infantile, 241500 |
| 172400 | Hemolytic anemia due to glucosephosphate isomerase deficiency |
| 172400 | Hydrops fetalis, one form |
| 172471 | Glycogenosis, hepatic, autosomal |
| 172490 | Phosphorylase kinase deficiency of liver and muscle, 261750 |
| 173360 | Thrombophilia due to excessive plasminogen activator inhibitor |
| 173360 | Hemorrhagic diathesis due to PAI1 deficiency |
| 173610 | Platelet alpha/delta storage pool deficiency |
| 173850 | Polio, susceptibility to |
| 173870 | Xeroderma pigmentosum |
| 173870 | Fanconi anemia |
| 174000 | Medullary cystic kidney disease, AD |
| 174900 | Polyposis, juvenile intestinal |
| 176100 | Porphyria cutanea tarda |
| 176100 | Porphyria, hepatoerythropoietic |
| 176730 | Diabetes mellitus, rare form |
| 176730 | Hyperproinsulinemia, familial |
| 176730 | MODY, one form |
| 176830 | Obesity, adrenal insufficiency, and red hair |
| 176830 | ACTH deficiency |
| 176930 | Dysprothrombinemia |
| 176930 | Hypoprothrombinemia |
| 176943 | Apert syndrome, 101200 |
| 176943 | Pfeiffer syndrome, 101600 |
| 176943 | Beare-Stevenson cutis gyrata syndrome, 123790 |
| 176943 | Crouzon craniofacial dysostosis, 123500 |
| 176943 | Jackson-Weiss syndrome, 123150 |
| 176960 | Pituitary tumor, invasive |
| 177070 | Spherocytosis, hereditary, Japanese type |
| 177070 | Hermansky-Pudlak syndrome, 203300 |
| 178300 | Ptosis, hereditary congenital, 1 |
| 178600 | Pulmonary hypertension, familial primary |
| 178640 | Pulmonary alveolar proteinosis, congenital, 265120 |
| 179615 | Reticulosis, familial histiocytic, 267700 |
| 179615 | Severe combined immunodeficiency, B cell-negative, 601457 |
| 179616 | Severe combined immunodeficiency, B cell-negative, 601457 |
| 179755 | Renal cell carcinoma, papillary, 1 |
| 180020 | Retinal cone dystrophy-1 |
| 180100 | Retinitis pigmentosa-1 |
| 180104 | Retinitis pigmentosa-9 |
| 180105 | Retinitis pigmentosa-10 |
| 180380 | Night blindness, congenital stationery, rhodopsin-related |
| 180380 | Retinitis pigmentosa, autosomal recessive |
| 180380 | Retinitis pigmentosa-4, autosomal dominant |
| 180385 | Leukemia, acute T-cell |
| 180860 | Russell-Silver syndrome |
| 180901 | Malignant hyperthermia susceptibility 1, 145600 |
| 180901 | Central core disease, 117000 |
| 181405 | Scapuloperoneal spinal muscular atrophy, New England type |
| 181430 | Scapuloperoneal syndrome, myopathic type |
| 181600 | Sclerotylosis |
| 182138 | Anxiety-related personality traits |
| 182280 | Small-cell cancer of lung |
| 182380 | Glucose/galactose malabsorption |
| 182381 | Renal glucosuria, 253100 |
| 182500 | Cataract, congenital |
| 182600 | Spastic paraplegia-3A |
| 182601 | Spastic paraplegia-4 |
| 182860 | Pyropoikilocytosis |
| 182860 | Spherocytosis, recessive |
| 182860 | Elliptocytosis-2 |
| 182870 | Spherocytosis-1 |
| 182870 | Elliptocytosis-3 |
| 182870 | Anemia, neonatal hemolytic, fatal and near-fatal |
| 185470 | Myopathy due to succinate dehydrogenase deficiency |
| 185800 | Symphalangism, proximal |
| 186580 | Arthrocutaneouveal granulomatosis |
| 186860 | Leukemia/lymphoma, T-cell |
| 188070 | Bleeding disorder due to defective thromboxane A2 receptor |
| 188450 | Goiter, adolescent multinodular |
| 188450 | Goiter, nonendemic, simple |
| 188450 | Hypothyroidism, hereditary congenital |
| 188826 | Sorsby fundus dystrophy, 136900 |
| 189800 | Preeclampsia/eclampsia |
| 190020 | Bladder cancer, 109800 |
| 190040 | Meningioma, SIS-related |
| 190040 | Dermatofibrosarcoma protuberans |
| 190040 | Giant-cell fibroblastoma |
| 190160 | Thyroid hormone resistance, 274300, 188570 |
| 190900 | Colorblindness, tritan |
| 191044 | Cardiomyopathy, familial hypertrophic |
| 191092 | Tuberous sclerosis-2 |
| 191170 | Colorectal cancer, 114500 |
| 191170 | Li-Fraumeni syndrome |
| 191290 | Segawa syndrome, recessive |
| 191315 | Insensitivity to pain, congenital, with anhidrosis, 256800 |
| 191540 | [Urate oxidase deficiency] |
| 192090 | Ovarian carcinoma |
| 192090 | Breast cancer, lobular |
| 192090 | Endometrial carcinoma |
| 192090 | Gastric cancer, familial, 137215 |
| 192340 | Diabetes insipidus, neurohypophyseal, 125700 |
| 192500 | Jervell and Lange-Nielsen syndrome, 220400 |
| 192500 | Long QT syndrome-1 |
| 193100 | Hypophosphatemic rickets, autosomal dominant |
| 193400 | von Willebrand disease |
| 194070 | Wilms tumor, type 1 |
| 194070 | Denys-Drash syndrome |
| 194070 | Frasier syndrome, 136680 |
| 194071 | Wilms tumor, type 2 |
| 194071 | Adrenocortical carcinoma, hereditary, 202300 |
| 200990 | Acrocallosal syndrome |
| 201460 | Acyl-CoA dehydrogenase, long chain, deficiency of |
| 203100 | Waardenburg syndrome/ocular albinism, digenic, 103470 |
| 203100 | Albinism, oculocutaneous, type IA |
| 203500 | Alkaptonuria |
| 203740 | Alpha-ketoglutarate dehydrogenase deficiency |
| 203800 | Alstrom syndrome |
| 204500 | Ceroid-lipofuscinosis, neuronal 2, classic late infantile |
| 205100 | Amyotrophic lateral sclerosis, juvenile |
| 207750 | Hyperlipoproteinemia, type Ib |
| 208250 | Jacobs syndrome |
| 211420 | Breast cancer, ductal |
| 212138 | Carnitine-acylcarnitine translocase deficiency |
| 214500 | Chediak-Higashi syndrome |
| 216900 | Achromatopsia |
| 218000 | Andermann syndrome |
| 219800 | Cystinosis, nephropathic |
| 221770 | Polycystic lipomembranous osteodysplasia with sclerosing |
| | leukencephalopathy |
| 221820 | Gliosis, familial progressive subcortical |
| 222800 | Hemolytic anemia due to bisphosphoglycerate mutase deficiency |
| 224120 | Dyserythropoietic anemia, contenital, type I |
| 225500 | Ellis-van Creveld syndrome |
| 227220 | [Eye color, brown] |
| 227646 | Fanconi anemia, type D |
| 229800 | [Fructosuria] |
| 230000 | Fucosidosis |
| 230350 | Galactose epimerase deficiency |
| 230800 | Gaucher disease |
| 230800 | Gaucher disease with cardiovascular calcification |
| 231550 | Achalasia-addisonianism-alacrimia syndrome |
| 231670 | Glutaricaciduria, type I |
| 231680 | Glutaricaciduria, type IIA |
| 231950 | Glutathioninuria |
| 232050 | Propionicacidemia, type II or pccB type |
| 232400 | Glycogen storage disease IIIa |
| 232400 | Glycogen storage disease IIIb |
| 232800 | Glycogen storage disease VII |
| 233700 | Chronic granulomatous disease due to deficiency of NCF-1 |
| 234200 | Neurodegeneration with brain iron accumulation |
| 236730 | Urofacial syndrome |
| 238600 | Chylomicronemia syndrome, familial |
| 238600 | Combined hyperlipemia, familial |
| 238600 | Hyperlipoproteinemia I |
| 238600 | Lipoprotein lipase deficiency |
| 239100 | Van Buchem disease |
| 239500 | Hyperprolinemia, type I |
| 240400 | Scurvy |
| 243500 | Isovalericacidemia |
| 245000 | Papillon-Lefevre syndrome |
| 245200 | Krabbe disease |
| 245349 | Lacticacidemia due to PDX1 deficiency |
| 245900 | Norum disease |
| 245900 | Fish-eye disease |
| 246450 | HMG-CoA lyase deficiency |
| 246900 | Lipoamide dehydrogenase deficiency |
| 247640 | Leukemia, acute lymphoblastic |
| 248600 | Maple syrup urine disease, type Ia |
| 248611 | Maple syrup urine disease, type Ib |
| 249000 | Meckel syndrome |
| 249270 | Thiamine-responsive megaloblastic anemia |
| 251600 | Microphthalmia, autosomal recessive |
| 253250 | Mulibrey nanism |
| 254210 | Myasthenia gravis, familial infantile |
| 255800 | Schwartz-Jampel syndrome |
| 257200 | Niemann-Pick disease, type A |
| 257200 | Niemann-Pick disease, type B |
| 257220 | Niemann-Pick disease, type C |
| 257220 | Niemann-Pick disease, type D, 257250 |
| 258501 | 3-methylglutaconicaciduria, type III |
| 258870 | Gyrate atrophy of choroid and retina with ornithinemia, B6 |
| | responsive or unresponsive |
| 259700 | Osteopetrosis, recessive |
| 259770 | Osteoporosis-pseudoglioma syndrome |
| 259900 | Hyperoxaluria, primary, type 1 |
| 261510 | Pseudo-Zellweger syndrome |
| 261670 | Myopathy due to phosphoglycerate mutase deficiency |
| 262000 | Bjornstad syndrome |
| 263700 | Porphyria, congenital erythropoietic |
| 264470 | Adrenoleukodystrophy, pseudoneonatal |
| 266200 | Anemia, hemolytic, due to PK deficiency |
| 266300 | [Hair color, red] |
| 266600 | Inflammatory bowel disease-1 |
| 270100 | Situs inversus viscerum |
| 271900 | Canavan disease |
| 272800 | Tay-Sachs disease |
| 272800 | [Hex A pseudodeficiency] |
| 272800 | GM2-gangliosidosis, juvenile, adult |
| 274180 | Thromboxane synthase deficiency |
| 274270 | Thymine-uraciluria |
| 274270 | Fluorouracil toxicity, sensitivity to |
| 275350 | Transcobalamin II deficiency |
| 276000 | Pancreatitis, hereditary, 167800 |
| 276000 | Trypsinogen deficiency |
| 276600 | Tyrosinemia, type II |
| 276700 | Tyrosinemia, type I |
| 276900 | Usher syndrome, type 1A |
| 276901 | Usher syndrome, type 2 |
| 276902 | Usher syndrome, type 3 |
| 278250 | Wrinkly skin syndrome |
| 278700 | Xeroderma pigmentosum, group A |
| 300008 | Nephrolithiasis, type I, 310468 |
| 300008 | Proteinuria, low molecular weight, with hypercalciuric |
| | nephrocalcinosis |
| 300008 | Dent disease, 300009 |
| 300008 | Hypophosphatemia, type III |
| 300046 | Mental retardation, X-linked 23, nonspecific |
| 300047 | Mental retardation, X-linked 20 |
| 300088 | Epilepsy, female restricted, with mental retardation |
| 300123 | Mental retardation with isolated growth hormone deficiency |
| 300300 | XLA and isolated growth hormone deficiency, 307200 |
| 300300 | Agammaglobulinemia, type 1, X-linked |
| 301000 | Thrombocytopenia, X-linked, 313900 |
| 301000 | Wiskott-Aldrich syndrome |
| 301201 | Amelogenesis imperfecta-3, hypoplastic type |
| 301300 | Anemia, sideroblastic/hypochromic |
| 301500 | Fabry disease |
| 301590 | Anophthalmos-1 |
| 301830 | Arthrogryposis, X-linked (spinal muscular atrophy, infantile, X- |
| | linked) |
| 301835 | Arts syndrome |
| 301845 | Bazex syndrome |
| 301900 | Borjeson-Forssman-Lehmann syndrome |
| 303400 | Cleft palate, X-linked |
| 303630 | Alport syndrome, 301050 |
| 303630 | Leiomyomatosis-nephropathy syndrome, 308940 |
| 303631 | Leiomyomatosis, diffuse, with Alport syndrome |
| 304340 | Mental retardation, X-linked, syndromic-5, with Dandy-Walker |
| | malformation, basal ganglia disease, and seizures |
| 304500 | Deafness, X-linked 2, perceptive congenital |
| 304700 | Mohr-Tranebjaerg syndrome |
| 304700 | Deafness, X-linked 1, progressive |
| 304700 | Jensen syndrome, 311150 |
| 305400 | Aarskog-Scott syndrome |
| 305450 | FG syndrome |
| 306900 | Hemophilia B |
| 307150 | Hypertrichosis, congenital generalized |
| 307700 | Hypoparathyroidism, X-linked |
| 308000 | HPRT-related gout |
| 308000 | Lesch-Nyhan syndrome |
| 308300 | Incontinentia pigmenti, sporadic type |
| 309000 | Lowe syndrome |
| 309300 | Megalocornea, X-linked |
| 309470 | Mental retardation, X-linked, syndromic-3, with spastic diplegia |
| 309500 | Renpenning syndrome-1 |
| 309605 | Mental retardation, X-linked, syndromic-4, with congenital |
| | contractures and low fingertip arches |
| 309610 | Mental retardation, X-linked, syndromic-2, with dysmorphism and |
| | cerebral atrophy |
| 310490 | Cowchock syndrome |
| 311050 | Optic atrophy, X-linked |
| 311850 | Phosphoribosyl pyrophosphate synthetase-related gout |
| 312080 | Pelizaeus-Merzbacher disease |
| 312080 | Spastic paraplegia-2, 312920 |
| 313850 | Thoracoabdominal syndrome |
| 600040 | Colorectal cancer |
| 600045 | Xeroderma pigmentosum, group E, subtype 2 |
| 600079 | Colon cancer |
| 600119 | Muscular dystrophy, Duchenne-like, type 2 |
| 600119 | Adhalinopathy, primary |
| 600138 | Retinitis pigmentosa-11 |
| 600140 | Rubenstein-Taybi syndrome, 180849 |
| 600143 | Epilepsy, progressive, with mental retardation |
| 600160 | Melanoma, 155601 |
| 600163 | Long QT syndrome-3 |
| 600179 | Leber congenital amaurosis, type I, 204000 |
| 600185 | Pancreatic cancer |
| 600185 | Breast cancer 2, early onset |
| 600194 | Ichthyosis bullosa of Siemens, 146800 |
| 600221 | Venous malformations, multiple cutaneous and mucosal, 600195 |
| 600223 | Spinocerebellar ataxia-4 |
| 600231 | Palmoplantar keratoderma, Bothnia type |
| 600258 | Colorectal cancer, hereditary nonpolyposis, type 3 |
| 600273 | Polycystic kidney disease, infantile severe, with tuberous sclerosis |
| 600276 | Cerebral arteriopathy with subcortical infarcts and |
| | leukoencephalopathy, 125310 |
| 600281 | Non-insulin-dependent diabetes mellitus, 125853 |
| 600281 | MODY, type 1, 125850 |
| 600309 | Atrioventricular canal defect-1 |
| 600320 | Insulin-dependent diabetes mellitus-5 |
| 600332 | Rippling muscle disease-1 |
| 600510 | Pigment dispersion syndrome |
| 600512 | Epilepsy, partial |
| 600525 | Trichodontoosseous syndrome, 190320 |
| 600536 | Myopathy, congenital |
| 600593 | Craniosynostosis, Adelaide type |
| 600623 | Prostate cancer, 176807 |
| 600759 | Alzheimer disease-4 |
| 600760 | Pseudohypoaldosteronism, type I, 264350 |
| 600760 | Liddle syndrome, 177200 |
| 600761 | Pseudohypoaldosteronism, type I, 264350 |
| 600761 | Liddle syndrome, 177200 |
| 600808 | Enuresis, nocturnal, 2 |
| 600811 | Xeroderma pigmentosum, group E, DDB-negative subtype, |
| | 278740 |
| 600839 | Bartter syndrome, 241200 |
| 600850 | Schizophrenia disorder-4 |
| 600856 | Beckwith-Wiedemann syndrome, 130650 |
| 600881 | Cataract, congenital, zonular, with sutural opacities |
| 600882 | Charcot-Marie-Tooth neuropathy-2B |
| 600883 | Diabetes mellitus, insulin-dependent, 8 |
| 600897 | Cataract, zonular pulverulent-1, 116200 |
| 600900 | Muscular dystrophy, limb-girdle, type 2E |
| 600918 | Cystinuria, type III |
| 600956 | Persistent Mullerian duct syndrome, type II, 261550 |
| 600957 | Persistent Mullerian duct syndrome, type I, 261550 |
| 600958 | Cardiomyopathy, familial hypertrophic, 4, 115197 |
| 600968 | Gitelman syndrome, 263800 |
| 600977 | Cone dystrophy, progressive |
| 600995 | Nephrotic syndrome, idiopathic, steroid-resistant |
| 600996 | Arrhythmogenic right ventricular dysplasia-2 |
| 601105 | Pycnodysostosis, 265800 |
| 601154 | Cardiomyopathy, dilated, 1E |
| 601199 | Neonatal hyperparathyroidism, 239200 |
| 601199 | Hypocalcemia, autosomal dominant, 601198 |
| 601199 | Hypocalciuric hypercalcemia, type I, 145980 |
| 601202 | Cataract, anterior polar-2 |
| 601208 | Insulin-dependent diabetes mellitus-11 |
| 601238 | Cerebellar ataxia, Cayman type |
| 601277 | Ichthyosis, lamellar, type 2 |
| 601284 | Hereditary hemorrhagic telangiectasia-2, 600376 |
| 601313 | Polycystic kidney disease, adult type I, 173900 |
| 601318 | Diabetes mellitus, insulin-dependent, 13 |
| 601385 | Prostate cancer |
| 601410 | Diabetes mellitus, transient neonatal |
| 601412 | Deafness, autosomal dominant 7 |
| 601414 | Retinitis pigmentosa-18 |
| 601458 | Inflammatory bowel disease-2 |
| 601471 | Moebius syndrome-2 |
| 601606 | Trichoepithelioma, multiple familial |
| 601649 | Blepharophimosis, epicanthus inversus, and ptosis, type 2 |
| 601650 | Paraganglioma, familial nonchromaffin, 2 |
| 601652 | Glaucoma 1A, primary open angle, juvenile-onset, 137750 |
| 601666 | Insulin-dependent diabetes mellitus-15 |
| 601669 | Hirschsprung disease, one form |
| 601680 | Distal arthrogryposis, type 2B |
| 601682 | Glaucoma 1C, primary open angle |
| 601690 | Platelet-activating factor acetylhydrolase deficiency |
| 601691 | Retinitis pigmentosa-19, 601718 |
| 601691 | Stargardt disease-1, 248200 |
| 601691 | Cone-rod dystrophy 3 |
| 601691 | Fundus flavimaculatus with macular dystrophy, 248200 |
| 601718 | Retinitis pigmentosa-19 |
| 601744 | Systemic lupus erythematosus, susceptibility to, 1 |
| 601757 | Rhizomelic chondrodysplasia punctata, type 1, 215100 |
| 601769 | Osteoporosis, involutional |
| 601769 | Rickets, vitamin D-resistant, 277440 |
| 601777 | Cone dystrophy, progressive |
| 601785 | Carbohydrate-deficient glycoprotein syndrome, type I, 212065 |
| 601800 | [Hair color, brown] |
| 601843 | Hypothyroidism, congenital, 274400 |
| 601844 | Pseudohypoaldosteronism type II |
| 601846 | Muscular dystrophy with rimmed vacuoles |
| 601863 | Bare lymphocyte syndrome, complementation group C |
| 601884 | [High bone mass] |
| 601928 | Monilethrix, 158000 |
| 601954 | Muscular dystrophy, limb-girdle, type 2G |
| 601969 | Medulloblastoma, 155255 |
| 601969 | Glioblastoma multiforme, 137800 |
| 601975 | Ectodermal dysplasia/skin fragility syndrome |
| 601990 | Neuroblastoma |
| 602023 | Bartter syndrome, type 3 |
| 602025 | Obesity/hyperinsulinism, susceptibility to |
| 602066 | Convulsions, infantile and paroxysmal choreoathetosis |
| 602084 | Endometrial carcinoma |
| 602088 | Nephronophthisis, infantile |
| 602094 | Lipodystrophy, familial partial |
| 602096 | Alzheimer disease-5 |
| 602099 | Amytrophic lateral sclerosis-5 |
| 602116 | Glioma |
| 602134 | Tremor, familial essential, 2 |
| 602136 | Refsum disease, infantile, 266510 |
| 602136 | Zellweger syndrome-1, 214100 |
| 602136 | Adrenoleukodystrophy, neonatal, 202370 |
| 602153 | Monilethrix, 158000 |
| 602216 | Peutz-Jeghers syndrome, 175200 |
| 602363 | Ellis-van Creveld-like syndrome |
| 602403 | Alzheimer disease, susceptibility to |
| 602447 | Coronary artery disease, susceptibility to |
| 602477 | Febrile convulsions, familial, 2 |
| 602491 | Hyperlipidemia, familial combined, 1 |
| 602544 | Parkinson disease, juvenile, type 2, 600116 |
| 602568 | Homocystinuria-megaloblastic anemia, cbl E type, 236270 |
| 602574 | Deafness, autosomal dominant 12, 601842 |
| 602574 | Deafness, autosomal dominant 8, 601543 |
| 602629 | Dystonia-6, torsion |
| 602631 | Rhabdomyosarcoma, 268210 |
| 602631 | Breast Cancer |
| 602685 | Mental retardation, severe, with spasticity and tapetoretinal |
| | degeneration |
| 602716 | Nephrosis-1, congenital, Finnish type, 256300 |
| 602759 | Prostate cancer, hereditary, 2, 176807 |
| 602771 | Muscular dystrophy, congenital, with early spine rigidity |
| 602772 | Retinitis pitmentosa-24 |

[0171] Mature Polypeptides

[0172] The present invention also encompasses mature forms of a polypeptide having the amino acid sequence of SEQ ID NO:Y and/or the amino acid sequence encoded by the cDNA in a deposited clone. Polynucleotides encoding the mature forms (such as, for example, the polynucleotide sequence in SEQ ID NO:X and/or the polynucleotide sequence contained in the cDNA of a deposited clone) are also encompassed by the invention. Moreover, fragments or variants of these polypeptides (such as, fragments as described herein, polypeptides at least 80%, 85%, 90%, 95%, 96%, 97%, 98%, 99%, or 100% identical to these polypeptides, or polypeptides encoded by a polynucleotide that hybridizes under stringent conditions to the complementary strand of the polynucleotide encoding these polypeptides) are also encompassed by the invention. In preferred embodiments, these fragments or variants retain one or more functional acitivities of the full-length or mature form of the polypeptide (e.g., biological activity (such as, for example, activity useful in detecting, preventing, diagnosing, prognosticating, treating, and/or ameliorating cancer and other hyperproliferative disorders), antigenicity (ability to bind, or compete with a polypeptide of the invention for binding, to an anti-polypeptide of the invention antibody), immunogenicity (ability to generate antibody which binds to a specific polypeptide of the invention), ability to form multimers with polypeptides of the invention, and ability to bind to a receptor or ligand for a polypeptide of the invention). Antibodies that bind the polypeptides of the invention, and polynucleotides encoding these polypeptides are also encompassed by the invention.

[0173] According to the signal hypothesis, proteins secreted by mammalian cells have a signal or secretary leader sequence which is cleaved from the mature protein once export of the growing protein chain across the rough endoplasmic reticulum has been initiated. Most mammalian cells and even insect cells cleave secreted proteins with the same specificity. However, in some cases, cleavage of a secreted protein is not entirely uniform, which results in two or more mature species of the protein. Further, it has long been known that cleavage specificity of a secreted protein is ultimately determined by the primary structure of the complete protein, that is, it is inherent in the amino acid sequence of the polypeptide.

[0174] Methods for predicting whether a protein has a signal sequence, as well as the cleavage point for that sequence, are available. For instance, the method of McGeoch, Virus Res. 3:271-286 (1985), uses the information from a short N-terminal charged region and a subsequent uncharged region of the complete (uncleaved) protein. The method of von Heinje, Nucleic Acids Res. 14:4683-4690 (1986) uses the information from the residues surrounding the cleavage site, typically residues −13 to +2, where +1 indicates the amino terminus of the secreted protein. The accuracy of predicting the cleavage points of known mammalian secretory proteins for each of these methods is in the range of 75-80%. (von Heinje, supra.) However, the two methods do not always produce the same predicted cleavage point(s) for a given protein.

[0175] In the present case, the deduced amino acid sequence of the secreted polypeptide was analyzed by a computer program called SignalP (Henrik Nielsen et al., Protein Engineering 10: 1-6 (1997)), which predicts the cellular location of a protein based on the amino acid sequence. As part of this computational prediction of localization, the methods of McGeoch and von Heinje are incorporated. The analysis of the amino acid sequences of the secreted proteins described herein by this program provided the results shown in Table 1A.

[0176] In specific embodiments, polypeptides of the invention comprise, or alternatively consist of, the predicted mature form of the polypeptide as delineated in columns 14 and 15 of Table 1A. Moreover, fragments or variants of these polypeptides (such as, fragments as described herein, polypeptides at least 80%, 85%, 90%, 95%, 96%, 97%, 98%, 99%, or 100% identical to these polypeptides, or polypeptides encoded by a polynucleotide that hybridizes under stringent conditions to the complementary strand of the polynucleotide encoding these polypeptides) are also encompassed by the invention. In preferred embodiments, these fragments or variants retain one or more functional acitivities of the full-length or mature form of the polypeptide (e.g., biological activity (such as, for example, activity useful in detecting, preventing, diagnosing, prognosticating, treating, and/or ameliorating cancer and other hyperproliferative disorders), antigenicity (ability to bind, or compete with a polypeptide of the invention for binding, to an anti-polypeptide of the invention antibody), immunogenicity (ability to generate antibody which binds to a specific polypeptide of the invention), ability to form multimers with polypeptides of the invention, and ability to bind to a receptor or ligand for a polypeptide of the invention). Antibodies that bind the polypeptides of the invention, and polynucleotides encoding these polypeptides are also encompassed by the invention.

[0177] Polynucleotides encoding proteins comprising, or consisting of, the predicted mature form of polypeptides of the invention (e.g., polynucleotides having the sequence of SEQ ID NO: X (Table 1A, column 4), the sequence delineated in columns 7 and 8 of Table 1A, and a sequence encoding the mature polypeptide delineated in columns 14 and 15 of Table 1A (e.g., the sequence of SEQ ID NO:X encoding the mature polypeptide delineated in columns 14 and 15 of Table 1)) are also encompassed by the invention, as are fragments or variants of these polynucleotides (such as, fragments as described herein, polynucleotides at least 80%, 85%, 90%, 95%, 96%, 97%, 98%, 99%, or 100% identical to these polyncueotides, and nucleic acids which hybridizes under stringent conditions to the complementary strand of the polynucleotide).

[0178] As one of ordinary skill would appreciate, however, cleavage sites sometimes vary from organism to organism and cannot be predicted with absolute certainty. Accordingly, the present invention provides secreted polypeptides having a sequence shown in SEQ ID NO:Y which have an N-terminus beginning within 15 residues of the predicted cleavage point (i.e., having 1, 2, 3, 4, 5, 6, 7, 8, 9, 10, 11, 12, 13, 14, or 15 more or less contiguous residues of SEQ ID NO:Y at the N-terminus when compared to the predicted mature form of the polypeptide (e.g., the mature polypeptide delineated in columns 14 and 15 of Table 1). Similarly, it is also recognized that in some cases, cleavage of the signal sequence from a secreted protein is not entirely uniform, resulting in more than one secreted species. These polypeptides, and the polynucleotides encoding such polypeptides, are contemplated by the present invention.

[0179] Moreover, the signal sequence identified by the above analysis may not necessarily predict the naturally occurring signal sequence. For example, the naturally occurring signal sequence may be further upstream from the predicted signal sequence. However, it is likely that the predicted signal sequence will be capable of directing the secreted protein to the ER. Nonetheless, the present invention provides the mature protein produced by expression of the polynucleotide sequence of SEQ ID NO:X and/or the polynucleotide sequence contained in the cDNA of a deposited clone, in a mammalian cell (e.g., COS cells, as desribed below). These polypeptides, and the polynucleotides encoding such polypeptides, are contemplated by the present invention.

[0180] Polynucleotide and Polypeptide Variants

[0181] The present invention is also directed to variants of the polynucleotide sequence disclosed in SEQ ID NO:X or the complementary strand thereto, nucleotide sequences encoding the polypeptide of SEQ ID NO:Y, the nucleotide sequence of SEQ ID NO:X that encodes the polypeptide sequence as defined in columns 13 and 14 of Table 1A, nucleotide sequences encoding the polypeptide sequence as defined in columns 13 and 14 of Table 1A, the nucleotide sequence of SEQ ID NO:X encoding the polypeptide sequence as defined in Table 1B, the nucleotide sequence as defined in columns 8 and 9 of Table 2, nucleotide sequences encoding the polypeptide encoded by the nucleotide sequence as defined in columns 8 and 9 of Table 2, the nucleotide sequence as defined in column 6 of Table 1C, nucleotide sequences encoding the polypeptide encoded by the nucleotide sequence as defined in column 6 of Table 1C, the cDNA sequence contained in ATCC Deposit No:Z, nucleotide sequences encoding the polypeptide encoded by the cDNA sequence contained in ATCC Deposit No:Z, and/or nucleotide sequences encoding a mature (secreted) polypeptide encoded by the cDNA sequence contained in ATCC Deposit No:Z.

[0182] The present invention also encompasses variants of the polypeptide sequence disclosed in SEQ ID NO:Y, the polypeptide as defined in columns 13 and 14 of Table 1A, the polypeptide sequence as defined in columns 6 and 7 of Table 1B.1, a polypeptide sequence encoded by the polynucleotide sequence in SEQ ID NO:X, a polypeptide sequence encoded by the nucleotide sequence as defined in columns 8 and 9 of Table 2, a polypeptide sequence encoded by the nucleotide sequence as defined in column 6 of Table 1C, a polypeptide sequence encoded by the complement of the polynucleotide sequence in SEQ ID NO:X, the polypeptide sequence encoded by the cDNA sequence contained in ATCC Deposit No:Z and/or a mature (secreted) polypeptide encoded by the cDNA sequence contained in ATCC Deposit No:Z.

[0183] “Variant” refers to a polynucleotide or polypeptide differing from the polynucleotide or polypeptide of the present invention, but retaining essential properties thereof. Generally, variants are overall closely similar, and, in many regions, identical to the polynucleotide or polypeptide of the present invention.

[0184] Thus, one aspect of the invention provides an isolated nucleic acid molecule comprising, or alternatively consisting of, a polynucleotide having a nucleotide sequence selected from the group consisting of: (a) a nucleotide sequence described in SEQ ID NO:X or contained in the cDNA sequence of ATCC Deposit No:Z; (b) a nucleotide sequence in SEQ ID NO:X or the cDNA in ATCC Deposit No:Z which encodes the complete amino acid sequence of SEQ ID NO:Y or the complete amino acid sequence encoded by the cDNA in ATCC Deposit No:Z; (c) a nucleotide sequence in SEQ ID NO:X or the cDNA in ATCC Deposit No:Z which encodes a mature polypeptide (i.e., a secreted polypeptide (e.g., as delineated in columns 14 and 15 of Table 1A)); (d) a nucleotide sequence in SEQ ID NO:X or the cDNA sequence of ATCC Deposit No:Z, which encodes a biologically active fragment of a polypeptide; (e) a nucleotide sequence in SEQ ID NO:X or the cDNA sequence of ATCC Deposit No:Z, which encodes an antigenic fragment of a polypeptide; (f) a nucleotide sequence encoding a polypeptide comprising the complete amino acid sequence of SEQ ID NO:Y or the complete amino acid sequence encoded by the cDNA in ATCC Deposit No:Z; (g) a nucleotide sequence encoding a mature polypeptide of the amino acid sequence of SEQ ID NO:Y (i.e., a secreted polypeptide (e.g., as delineated in columns 14 and 15 of Table 1A)) or a mature polypeptide of the amino acid sequence encoded by the cDNA in ATCC Deposit No:Z; (h) a nucleotide sequence encoding a biologically active fragment of a polypeptide having the complete amino acid sequence of SEQ ID NO:Y or the complete amino acid sequence encoded by the cDNA in ATCC Deposit No:Z; (i) a nucleotide sequence encoding an antigenic fragment of a polypeptide having the complete amino acid sequence of SEQ ID NO:Y or the complete amino acid sequence encoded by the cDNA in ATCC Deposit No:Z; and (O) a nucleotide sequence complementary to any of the nucleotide sequences in (a), (b), (c), (d), (e), (f), (g), (h), or (i) above.

[0185] The present invention is also directed to nucleic acid molecules which comprise, or alternatively consist of, a nucleotide sequence which is at least 80%, 85%, 90%, 95%, 96%, 97%, 98%, 99% or 100%, identical to, for example, any of the nucleotide sequences in (a), (b), (c), (d), (e), (f), (g), (h), (i), or (O) above, the nucleotide coding sequence in SEQ ID NO:X or the complementary strand thereto, the nucleotide coding sequence of the cDNA contained in ATCC Deposit No:Z or the complementary strand thereto, a nucleotide sequence encoding the polypeptide of SEQ ID NO:Y, a nucleotide sequence encoding a polypeptide sequence encoded by the nucleotide sequence in SEQ ID NO:X, a polypeptide sequence encoded by the complement of the polynucleotide sequence in SEQ ID NO:X, a nucleotide sequence encoding the polypeptide encoded by the cDNA contained in ATCC Deposit No:Z, the nucleotide coding sequence in SEQ ID NO:X as defined in columns 8 and 9 of Table 2 or the complementary strand thereto, a nucleotide sequence encoding the polypeptide encoded by the nucleotide sequence in SEQ ID NO:X as defined in columns 8 and 9 of Table 2 or the complementary strand thereto, the nucleotide coding sequence in SEQ ID NO:B as defined in column 6 of Table 1C or the complementary strand thereto, a nucleotide sequence encoding the polypeptide encoded by the nucleotide sequence in SEQ ID NO:B as defined in column 6 of Table 1C or the complementary strand thereto, the nucleotide sequence in SEQ ID NO:X encoding the polypeptide sequence as defined in columns 6 and 7 of Table 1B.1 or the complementary strand thereto, nucleotide sequences encoding the polypeptide as defined in column 6 and 7 of Table 1B.1 or the complementary strand thereto, and/or polynucleotide fragments of any of these nucleic acid molecules (e.g., those fragments described herein). Polynucleotides which hybridize to the complement of these nucleic acid molecules under stringent hybridization conditions or alternatively, under lower stringency conditions, are also encompassed by the invention, as are polypeptides encoded by these polynucleotides and nucleic acids.

[0186] In a preferred embodiment, the invention encompasses nucleic acid molecules which comprise, or alternatively, consist of a polynucleotide which hybridizes under stringent hybridization conditions, or alternatively, under lower stringency conditions, to a polynucleotide in (a), (b), (c), (d), (e), (f), (g), (h), or (i), above, as are polypeptides encoded by these polynucleotides. In another preferred embodiment, polynucleotides which hybridize to the complement of these nucleic acid molecules under stringent hybridization conditions, or alternatively, under lower stringency conditions, are also encompassed by the invention, as are polypeptides encoded by these polynucleotides.

[0187] In another embodiment, the invention provides a purified protein comprising, or alternatively consisting of, a polypeptide having an amino acid sequence selected from the group consisting of: (a) the complete amino acid sequence of SEQ ID NO:Y or the complete amino acid sequence encoded by the cDNA in ATCC Deposit No:Z; (b) the amino acid sequence of a mature (secreted) form of a polypeptide having the amino acid sequence of SEQ ID NO:Y (e.g., as delineated in columns 14 and 15 of Table 1A) or a mature form of the amino acid sequence encoded by the cDNA in ATCC Deposit No:Z mature; (c) the amino acid sequence of a biologically active fragment of a polypeptide having the complete amino acid sequence of SEQ ID NO:Y or the complete amino acid sequence encoded by the cDNA in ATCC Deposit No:Z; and (d) the amino acid sequence of an antigenic fragment of a polypeptide having the complete amino acid sequence of SEQ ID NO:Y or the complete amino acid sequence encoded by the cDNA in ATCC Deposit No:Z.

[0188] The present invention is also directed to proteins which comprise, or alternatively consist of, an amino acid sequence which is at least 80%, 85%, 90%, 95%, 96%, 97%, 98%, 99% or 100%, identical to, for example, any of the amino acid sequences in (a), (b), (c), or (d), above, the amino acid sequence shown in SEQ ID NO:Y, the amino acid sequence encoded by the cDNA contained in ATCC Deposit No:Z, the amino acid sequence of the polypeptide encoded by the nucleotide sequence in SEQ ID NO:X as defined in columns 8 and 9 of Table 2, the amino acid sequence of the polypeptide encoded by the nucleotide sequence in SEQ ID NO:B as defined in column 6 of Table 1C, the amino acid sequence as defined in columns 6 and 7 of Table 1B.1, an amino acid sequence encoded by the nucleotide sequence in SEQ D NO:X, and an amino acid sequence encoded by the complement of the polynucleotide sequence in SEQ D NO:X. Fragments of these polypeptides are also provided (e.g., those fragments described herein). Further proteins encoded by polynucleotides which hybridize to the complement of the nucleic acid molecules encoding these amino acid sequences under stringent hybridization conditions or alternatively, under lower stringency conditions, are also encompassed by the invention, as are the polynucleotides encoding these proteins.

[0189] By a nucleic acid having a nucleotide sequence at least, for example, 95% “identical” to a reference nucleotide sequence of the present invention, it is intended that the nucleotide sequence of the nucleic acid is identical to the reference sequence except that the nucleotide sequence may include up to five point mutations per each 100 nucleotides of the reference nucleotide sequence encoding the polypeptide. In other words, to obtain a nucleic acid having a nucleotide sequence at least 95% identical to a reference nucleotide sequence, up to 5% of the nucleotides in the reference sequence may be deleted or substituted with another nucleotide, or a number of nucleotides up to 5% of the total nucleotides in the reference sequence may be inserted into the reference sequence. The query sequence may be an entire sequence referred to in Table 1B or 2 as the ORF (open reading frame), or any fragment specified as described herein.

[0190] As a practical matter, whether any particular nucleic acid molecule or polypeptide is at least 80%, 85%, 90%, 95%, 96%, 97%, 98% or 99% identical to a nucleotide sequence of the present invention can be determined conventionally using known computer programs. A preferred method for determining the best overall match between a query sequence (a sequence of the present invention) and a subject sequence, also referred to as a global sequence alignment, can be determined using the FASTDB computer program based on the algorithm of Brutlag et al. (Comp. App. Biosci. 6:237-245 (1990)). In a sequence alignment the query and subject sequences are both DNA sequences. An RNA sequence can be compared by converting U's to T's. The result of said global sequence alignment is expressed as percent identity. Preferred parameters used in a FASTDB alignment of DNA sequences to calculate percent identity are: Matrix=Unitary, k-tuple=4, Mismatch Penalty=1, Joining Penalty-30, Randomization Group Length=0, Cutoff Score=1, Gap Penalty=5, Gap Size Penalty 0.05, Window Size=500 or the length of the subject nucleotide sequence, whichever is shorter.

[0191] If the subject sequence is shorter than the query sequence because of 5′ or 3′ deletions, not because of internal deletions, a manual correction must be made to the results. This is because the FASTDB program does not account for 5′ and 3′ truncations of the subject sequence when calculating percent identity. For subject sequences truncated at the 5′ or 3′ ends, relative to the query sequence, the percent identity is corrected by calculating the number of bases of the query sequence that are 5′ and 3′ of the subject sequence, which are not matched/aligned, as a percent of the total bases of the query sequence. Whether a nucleotide is matched/aligned is determined by results of the FASTDB sequence alignment. This percentage is then subtracted from the percent identity, calculated by the above FASTDB program using the specified parameters, to arrive at a final percent identity score. This corrected score is what is used for the purposes of the present invention. Only bases outside the 5′ and 3′ bases of the subject sequence, as displayed by the FASTDB alignment, which are not matched/aligned with the query sequence, are calculated for the purposes of manually adjusting the percent identity score.

[0192] For example, a 90 base subject sequence is aligned to a 100 base query sequence to determine percent identity. The deletions occur at the 5′ end of the subject sequence and therefore, the FASTDB alignment does not show a matched/alignment of the first 10 bases at 5′ end. The 10 unpaired bases represent 10% of the sequence (number of bases at the 5′ and 3′ ends not matched/total number of bases in the query sequence) so 10% is subtracted from the percent identity score calculated by the FASTDB program. If the remaining 90 bases were perfectly matched the final percent identity would be 90%. In another example, a 90 base subject sequence is compared with a 100 base query sequence. This time the deletions are internal deletions so that there are no bases on the 5′ or 3′ of the subject sequence which are not matched/aligned with the query. In this case the percent identity calculated by FASTDB is not manually corrected. Once again, only bases 5′ and 3′ of the subject sequence which are not matched/aligned with the query sequence are manually corrected for. No other manual corrections are to be made for the purposes of the present invention.

[0193] By a polypeptide having an amino acid sequence at least, for example, 95% “identical” to a query amino acid sequence of the present invention, it is intended that the amino acid sequence of the subject polypeptide is identical to the query sequence except that the subject polypeptide sequence may include up to five amino acid alterations per each 100 amino acids of the query amino acid sequence. In other words, to obtain a polypeptide having an amino acid sequence at least 95% identical to a query amino acid sequence, up to 5% of the amino acid residues in the subject sequence may be inserted, deleted, (indels) or substituted with another amino acid. These alterations of the reference sequence may occur at the amino or carboxy terminal positions of the reference amino acid sequence or anywhere between those terminal positions, interspersed either individually among residues in the reference sequence or in one or more contiguous groups within the reference sequence.

[0194] As a practical matter, whether any particular polypeptide is at least 80%, 85%, 90%, 95%, 96%, 97%, 98% or 99% identical to, for instance, the amino acid sequence of a polypeptide referred to in Table 1A (e.g., the amino acid sequence delineated in columns 14 and 15) or a fragment thereof, Table 1B.1 (e.g., the amino acid sequence identified in column 6) or a fragment thereof, Table 2 (e.g., the amino acid sequence of the polypeptide encoded by the polynucleotide sequence defined in columns 8 and 9 of Table 2) or a fragment thereof, the amino acid sequence of the polypeptide encoded by the polynucleotide sequence in SEQ ID NO:B as defined in column 6 of Table 1C or a fragment thereof, the amino acid sequence of the polypeptide encoded by the nucleotide sequence in SEQ ID NO:X or a fragment thereof, or the amino acid sequence of the polypeptide encoded by cDNA contained in ATCC Deposit No:Z, or a fragment thereof, the amino acid sequence of a mature (secreted) polypeptide encoded by cDNA contained in ATCC Deposit No:Z, or a fragment thereof, can be determined conventionally using known computer programs. A preferred method for determining the best overall match between a query sequence (a sequence of the present invention) and a subject sequence, also referred to as a global sequence alignment, can be determined using the FASTDB computer program based on the algorithm of Brutlag et al. (Comp. App. Biosci. 6:237-245 (1990)). In a sequence alignment the query and subject sequences are either both nucleotide sequences or both amino acid sequences. The result of said global sequence alignment is expressed as percent identity. Preferred parameters used in a FASTDB amino acid alignment are: Matrix=PAM 0, k-tuple=2, Mismatch Penalty=1, Joining Penalty=20, Randomiization Group Length=0, Cutoff Score=1, Window Size=sequence length, Gap Penalty=5, Gap Size Penalty=0.05, Window Size=500 or the length of the subject amino acid sequence, whichever is shorter.

[0195] If the subject sequence is shorter than the query sequence due to N- or C-terminal deletions, not because of internal deletions, a manual correction must be made to the results. This is because the FASTDB program does not account for N- and C-terminal truncations of the subject sequence when calculating global percent identity. For subject sequences truncated at the N- and C-termini, relative to the query sequence, the percent identity is corrected by calculating the number of residues of the query sequence that are N- and C-terminal of the subject sequence, which are not matched/aligned with a corresponding subject residue, as a percent of the total bases of the query sequence. Whether a residue is matched/aligned is determined by results of the FASTDB sequence alignment. This percentage is then subtracted from the percent identity, calculated by the above FASTDB program using the specified parameters, to arrive at a final percent identity score. This final percent identity score is what is used for the purposes of the present invention. Only residues to the N- and C-termini of the subject sequence, which are not matched/aligned with the query sequence, are considered for the purposes of manually adjusting the percent identity score. That is, only query residue positions outside the farthest N- and C-terminal residues of the subject sequence.

[0196] For example, a 90 amino acid residue subject sequence is aligned with a 100 residue query sequence to determine percent identity. The deletion occurs at the N-terminus of the subject sequence and therefore, the FASTDB alignment does not show a matching/alignment of the first 10 residues at the N-terminus. The 10 unpaired residues represent 10% of the sequence (number of residues at the N- and C-termini not matched/total number of residues in the query sequence) so 10% is subtracted from the percent identity score calculated by the FASTDB program. If the remaining 90 residues were perfectly matched the final percent identity would be 90%. In another example, a 90 residue subject sequence is compared with a 100 residue query sequence. This time the deletions are internal deletions so there are no residues at the N- or C-termini of the subject sequence which are not matched/aligned with the query. In this case the percent identity calculated by FASTDB is not manually corrected. Once again, only residue positions outside the N- and C-terminal ends of the subject sequence, as displayed in the FASTDB alignment, which are not matched/aligned with the query sequence are manually corrected for. No other manual corrections are to made for the purposes of the present invention.

[0197] The polynucleotide variants of the invention may contain alterations in the coding regions, non-coding regions, or both. Especially preferred are polynucleotide variants containing alterations which produce silent substitutions, additions, or deletions, but do not alter the properties or activities of the encoded polypeptide. Nucleotide variants produced by silent substitutions due to the degeneracy of the genetic code are preferred. Moreover, polypeptide variants in which less than 50, less than 40, less than 30, less than 20, less than 10, or 5-50, 5-25, 5-10, 1-5, or 1-2 amino acids are substituted, deleted, or added in any combination are also preferred. Polynucleotide variants can be produced for a variety of reasons, e.g., to optimize codon expression for a particular host (change codons in the human mRNA to those preferred by a bacterial host such as E. coli).

[0198] Naturally occurring variants are called “allelic variants,” and refer to one of several alternate forms of a gene occupying a given locus on a chromosome of an organism. (Genes II, Lewin, B., ed., John Wiley & Sons, New York (1985)). These allelic variants can vary at either the polynucleotide and/or polypeptide level and are included in the present invention. Alternatively, non-naturally occurring variants may be produced by mutagenesis techniques or by direct synthesis.

[0199] Using known methods of protein engineering and recombinant DNA technology, variants may be generated to improve or alter the characteristics of the polypeptides of the present invention. For instance, one or more amino acids can be deleted from the N-terminus or C-terminus of the polypeptide of the present invention without substantial loss of biological function. As an example, Ron et al. (J. Biol. Chem. 268: 2984-2988 (1993)) reported variant KGF proteins having heparin binding activity even after deleting 3, 8, or 27 amino-terminal amino acid residues. Similarly, Interferon gamma exhibited up to ten times higher activity after deleting 8-10 amino acid residues from the carboxy terminus of this protein. (Dobeli et al., J. Biotechnology 7:199-216 (1988).)

[0200] Moreover, ample evidence demonstrates that variants often retain a biological activity similar to that of the naturally occurring protein. For example, Gayle and coworkers (J. Biol. Chem. 268:22105-22111 (1993)) conducted extensive mutational analysis of human cytokine IL-1a. They used random mutagenesis to generate over 3,500 individual IL-1a mutants that averaged 2.5 amino acid changes per variant over the entire length of the molecule. Multiple mutations were examined at every possible amino acid position. The investigators found that “[m]ost of the molecule could be altered with little effect on either [binding or biological activity].” In fact, only 23 unique amino acid sequences, out of more than 3,500 nucleotide sequences examined, produced a protein that significantly differed in activity from wild-type.

[0201] Furthermore, even if deleting one or more amino acids from the N-terminus or C-terminus of a polypeptide results in modification or loss of one or more biological functions, other biological activities may still be retained. For example, the ability of a deletion variant to induce and/or to bind antibodies which recognize the secreted form will likely be retained when less than the majority of the residues of the secreted form are removed from the N-terminus or C-terminus. Whether a particular polypeptide lacking N- or C-terminal residues of a protein retains such immunogenic activities can readily be determined by routine methods described herein and otherwise known in the art. Thus, the invention further includes polypeptide variants which show a biological or functional activity of the polypeptides of the invention (such as, for example, activity useful in detecting, preventing, diagnosing, prognosticating, treating, and/or ameliorating cardiovascular disorders). Such variants include deletions, insertions, inversions, repeats, and substitutions selected according to general rules known in the art so as have little effect on activity.

[0202] The present application is directed to nucleic acid molecules at least 80%, 85%, 90%, 95%, 96%, 97%, 98%, 99% or 100% identical to the nucleic acid sequences disclosed herein, (e.g., encoding a polypeptide having the amino acid sequence of an N and/or C terminal deletion), irrespective of whether they encode a polypeptide having functional activity. This is because even where a particular nucleic acid molecule does not encode a polypeptide having functional activity, one of skill in the art would still know how to use the nucleic acid molecule, for instance, as a hybridization probe or a polymerase chain reaction (PCR) primer. Uses of the nucleic acid molecules of the present invention that do not encode a polypeptide having functional activity include, inter alia, (1) isolating a gene or allelic or splice variants thereof in a cDNA library; (2) in situ hybridization (e.g., “FISH”) to metaphase chromosomal spreads to provide precise chromosomal location of the gene, as described in Verma et al., Human Chromosomes: A Manual of Basic Techniques, Pergamon Press, New York (1988); (3) Northern Blot analysis for detecting mRNA expression in specific tissues (e.g., normal or diseased tissues); and (4) in situ hybridization (e.g., histochemistry) for detecting mRNA expression in specific tissues (e.g., normal or diseased tissues).

[0203] Preferred, however, are nucleic acid molecules having sequences at least 80%, 85%, 90%, 95%, 96%, 97%, 98%, 99% or 100% identical to the nucleic acid sequences disclosed herein, which do, in fact, encode a polypeptide having functional activity. By a polypeptide having “functional activity” is meant, a polypeptide capable of displaying one or more known functional activities associated with a full-length (complete) protein and/or a mature (secreted) protein of the invention. Such functional activities include, but are not limited to, biological activity (such as, for example, activity useful in detecting, preventing, diagnosing, prognosticating, treating, and/or ameliorating cancer and other hyperproliferative diseases and disorders), antigenicity (ability to bind, or compete with a polypeptide of the invention for binding, to an anti-polypeptide of the invention antibody), immunogenicity (ability to generate antibody which binds to a specific polypeptide of the invention), ability to form multimers with polypeptides of the invention, and ability to bind to a receptor or ligand for a polypeptide of the invention.

[0204] The functional activity of the polypeptides, and fragments, variants and derivatives of the invention, can be assayed by various methods.

[0205] For example, in one embodiment where one is assaying for the ability to bind or compete with a full-length polypeptide of the present invention for binding to an anti-polypetide antibody, various immunoassays known in the art can be used, including but not limited to, competitive and non-competitive assay systems using techniques such as radioimmunoassays, ELISA (enzyme linked immunosorbent assay), “sandwich” immunoassays, immunoradiometric assays, gel diffusion precipitation reactions, immunodiffusion assays, in situ immunoassays (using colloidal gold, enzyme or radioisotope labels, for example), western blots, precipitation reactions, agglutination assays (e.g., gel agglutination assays, hemagglutination assays), complement fixation assays, immunofluorescence assays, protein A assays, and immunoelectrophoresis assays, etc. In one embodiment, antibody binding is detected by detecting a label on the primary antibody. In another embodiment, the primary antibody is detected by detecting binding of a secondary antibody or reagent to the primary antibody. In a further embodiment, the secondary antibody is labeled. Many means are known in the art for detecting binding in an immunoassay and are within the scope of the present invention.

[0206] In another embodiment, where a ligand is identified, or the ability of a polypeptide fragment, variant or derivative of the invention to multimerize is being evaluated, binding can be assayed, e.g., by means well-known in the art, such as, for example, reducing and non-reducing gel chromatography, protein affinity chromatography, and affinity blotting. See generally, Phizicky et al., Microbiol. Rev. 59:94-123 (1995). In another embodiment, the ability of physiological correlates of a polypeptide of the present invention to bind to a substrate(s) of the polypeptide of the invention can be routinely assayed using techniques known in the art.

[0207] In addition, assays described herein (see Examples) and otherwise known in the art may routinely be applied to measure the ability of polypeptides of the present invention and fragments, variants and derivatives thereof to elicit polypeptide related biological activity (either in vitro or in vivo). Other methods will be known to the skilled artisan and are within the scope of the invention.

[0208] Of course, due to the degeneracy of the genetic code, one of ordinary skill in the art win immediately recognize that a large number of the nucleic acid molecules having a sequence at least 80%, 85%, 90%, 95%, 96%, 97%, 98%, 99%, or 100% identical to, for example, the nucleic acid sequence of the cDNA contained in ATCC Deposit No:Z, the nucleic acid sequence referred to in Table 1B (SEQ ID NO:X), the nucleic acid sequence disclosed in Table 1A (e.g., the nucleic acid sequence delineated in columns 7 and 8), the nucleic acid sequence disclosed in Table 2 (e.g., the nucleic acid sequence delineated in columns 8 and 9) or fragments thereof, will encode polypeptides “having functional activity.” In fact, since degenerate variants of any of these nucleotide sequences all encode the same polypeptide, in many instances, this will be clear to the skilled artisan even without performing the above described comparison assay. It will be further recognized in the art that, for such nucleic acid molecules that are not degenerate variants, a reasonable number will also encode a polypeptide having functional activity. This is because the skilled artisan is fully aware of amino acid substitutions that are either less likely or not likely to significantly effect protein function (e.g., replacing one aliphatic amino acid with a second aliphatic amino acid), as further described below.

[0209] For example, guidance concerning how to make phenotypically silent amino acid substitutions is provided in Bowie et al., “Deciphering the Message in Protein Sequences: Tolerance to Amino Acid Substitutions,” Science 247:1306-1310 (1990), wherein the authors indicate that there are two main strategies for studying the tolerance of an amino acid sequence to change.

[0210] The first strategy exploits the tolerance of amino acid substitutions by natural selection during the process of evolution. By comparing amino acid sequences in different species, conserved amino acids can be identified. These conserved amino acids are likely important for protein function. In contrast, the amino acid positions where substitutions have been tolerated by natural selection indicates that these positions are not critical for protein function. Thus, positions tolerating amino acid substitution could be modified while still maintaining biological activity of the protein.

[0211] The second strategy uses genetic engineering to introduce amino acid changes at specific positions of a cloned gene to identify regions critical for protein function. For example, site directed mutagenesis or alanine-scanning mutagenesis (introduction of single alanine mutations at every residue in the molecule) can be used. See Cunningham and Wells, Science 244:1081-1085 (1989). The resulting mutant molecules can then be tested for biological activity.

[0212] As the authors state, these two strategies have revealed that proteins are surprisingly tolerant of amino acid substitutions. The authors further indicate which amino acid changes are likely to be permissive at certain amino acid positions in the protein. For example, most buried (within the tertiary structure of the protein) amino acid residues require nonpolar side chains, whereas few features of surface side chains are generally conserved. Moreover, tolerated conservative amino acid substitutions involve replacement of the aliphatic or hydrophobic amino acids Ala, Val, Leu and Ile; replacement of the hydroxyl residues Ser and Thr-, replacement of the acidic residues Asp and Glu; replacement of the amide residues Asn and Gln, replacement of the basic residues Lys, Arg, and His; replacement of the aromatic residues Phe, Tyr, and Trp, and replacement of the small-sized amino acids Ala, Ser, Thr, Met, and Gly.

[0213] Besides conservative amino acid substitution, variants of the present invention include (i) substitutions with one or more of the non-conserved amino acid residues, where the substituted amino acid residues may or may not be one encoded by the genetic code, or (ii) substitutions with one or more of the amino acid residues having a substituent group, or (iii) fusion of the mature polypeptide with another compound, such as a compound to increase the stability and/or solubility of the polypeptide (for example, polyethylene glycol), (iv) fusion of the polypeptide with additional amino acids, such as, for example, an IgG Fc fusion region peptide, serum albumin (preferably human serum albumin) or a fragment thereof, or leader or secretory sequence, or a sequence facilitating purification, or (v) fusion of the polypeptide with another compound, such as albumin (including but not limited to recombinant albumin (see, e.g., U.S. Pat. No. 5,876,969, issued Mar. 2, 1999, EP Patent 0 413 622, and U.S. Pat. No. 5,766,883, issued Jun. 16, 1998, herein incorporated by reference in their entirety)). Such variant polypeptides are deemed to be within the scope of those skilled in the art from the teachings herein.

[0214] For example, polypeptide variants containing amino acid substitutions of charged amino acids with other charged or neutral amino acids may produce proteins with improved characteristics, such as less aggregation. Aggregation of pharmaceutical formulations both reduces activity and increases clearance due to the aggregate's immunogenic activity. See Pinckard et al., Clin. Exp. Immunol. 2:331-340 (1967); Robbins et al., Diabetes 36: 838-845 (1987); Cleland et al., Crit. Rev. Therapeutic Drug Carrier Systems 10:307-377 (1993).

[0215] A further embodiment of the invention relates to polypeptides which comprise the amino acid sequence of a polypeptide having an amino acid sequence which contains at least one amino acid substitution, but not more than 50 amino acid substitutions, even more preferably, not more than 40 amino acid substitutions, still more preferably, not more than 30 amino acid substitutions, and still even more preferably, not more than 20 amino acid substitutions from a polypeptide sequence disclosed herein. Of course it is highly preferable for a polypeptide to have an amino acid sequence which, for example, comprises the amino acid sequence of a polypeptide of SEQ ID NO:Y, the amino acid sequence of the mature (e.g., secreted) polypeptide of SEQ ID NO:Y, an amino acid sequence encoded by SEQ ID NO:X, an amino acid sequence encoded by the portion of SEQ ID NO:X as defined in columns 8 and 9 of Table 2, an amino acid sequence encoded by the complement of SEQ ID NO:X, an amino acid sequence encoded by cDNA contained in ATCC Deposit No:Z, and/or the amino acid sequence of a mature (secreted) polypeptide encoded by cDNA contained in ATCC Deposit No:Z, or a fragment thereof, which contains, in order of ever-increasing preference, at least one, but not more than 10, 9, 8, 7, 6, 5, 4, 3, 2 or 1 amino acid substitutions.

[0216] In specific embodiments, the polypeptides of the invention comprise, or alternatively, consist of, fragments or variants of a reference amino acid sequence selected from: (a) the amino acid sequence of SEQ ID NO:Y or fragments thereof (e.g., the mature form and/or other fragments described herein); (b) the amino acid sequence encoded by SEQ ID NO:X or fragments thereof; (c) the amino acid sequence encoded by the complement of SEQ ID NO:X or fragments thereof; (d) the amino acid sequence encoded by the portion of SEQ ID NO:X as defined in columns 8 and 9 of Table 2 or fragments thereof; and (e) the amino acid sequence encoded by cDNA contained in ATCC Deposit No:Z or fragments thereof, wherein the fragments or variants have 1-5, 5-10, 5-25, 5-50, 10-50 or 50-150, amino acid residue additions, substitutions, and/or deletions when compared to the reference amino acid sequence. In preferred embodiments, the amino acid substitutions are conservative. Polynucleotides encoding these polypeptides are also encompassed by the invention.

[0217] Polynucleotide and Polypeptide Fragments

[0218] The present invention is also directed to polynucleotide fragments of the polynucleotides (nucleic acids) of the invention. In the present invention, a “polynucleotide fragment” refers to a polynucleotide having a nucleic acid sequence which, for example: is a portion of the cDNA contained in ATCC Deposit No:Z or the complementary strand thereto; is a portion of the polynucleotide sequence encoding the polypeptide encoded by the cDNA contained in ATCC Deposit No:Z or the complementary strand thereto; is a portion of the polynucleotide sequence encoding the mature (secreted) polypeptide encoded by the cDNA contained in ATCC Deposit No:Z or the complementary strand thereto; is a portion of a polynucleotide sequence encoding the mature amino acid sequence as defined in columns 14 and 15 of Table 1A or the complementary strand thereto; is a portion of a polynucleotide sequence encoding the amino acid sequence encoded by the region of SEQ ID NO:X as defined in columns 8 and 9 of Table 2 or the complementary strand thereto; is a portion of the polynucleotide sequence of SEQ ID NO:X as defined in columns 8 and 9 of Table 2 or the complementary strand thereto; is a portion of the polynucleotide sequence in SEQ ID NO:X or the complementary strand thereto; is a polynucleotide sequence encoding a portion of the polypeptide of SEQ ID NO:Y; is a polynucleotide sequence encoding a portion of a polypeptide encoded by SEQ ID NO:X; is a polynucleotide sequence encoding a portion of a polypeptide encoded by the complement of the polynucleotide sequence in SEQ ID NO:X; is a portion of a polynucleotide sequence encoding the amino acid sequence encoded by the region of SEQ ID NO:B as defined in column 6 of Table 1C or the complementary strand thereto; or is a portion of the polynucleotide sequence of SEQ ID NO:B as defined in column 6 of Table 1C or the complementary strand thereto.

[0219] The polynucleotide fragments of the invention are preferably at least about 15 nt, and more preferably at least about 20 nt, still more preferably at least about 30 nt, and even more preferably, at least about 40 nt, at least about 50 nt, at least about 75 nt, or at least about 150 nt in length. A fragment “at least 20 nt in length,” for example, is intended to include 20 or more contiguous bases from the cDNA sequence contained in ATCC Deposit No:Z, or the nucleotide sequence shown in SEQ ID NO:X or the complementary stand thereto. In this context “about” includes the particularly recited value or a value larger or smaller by several (5, 4, 3, 2, or 1) nucleotides, at either terminus or at both termini. These nucleotide fragments have uses that include, but are not limited to, as diagnostic probes and primers as discussed herein. Of course, larger fragments (e.g., at least 160, 170, 180, 190, 200, 250, 500, 600, 1000, or 2000 nucleotides in length) are also encompassed by the invention.

[0220] Moreover, representative examples of polynucleotide fragments of the invention comprise, or alternatively consist of, a sequence from about nucleotide number 1-50, 51-100, 101-150, 151-200, 201-250, 251-300, 301-350, 351-400, 401-450, 451-500, 501-550, 551-600, 601-650, 651-700, 701-750, 751-800, 801-850, 851-900, 901-950, 951-1000, 1001-1050, 1051-1100, 1101-1150, 1151-1200, 1201-1250, 1251-1300, 1301-1350, 1351-1400, 1401-1450, 1451-1500, 1501-1550, 1551-1600, 1601-1650, 1651-1700, 1701-1750, 1751-1800, 1801-1850, 1851-1900, 1901-1950, 1951-2000, 2001-2050, 2051-2100, 2101-2150, 2151-2200, 2201-2250, 2251-2300, 2301-2350, 2351-2400, 2401-2450, 2451-2500, 2501-2550, 2551-2600, 2601-2650, 2651-2700, 2701-2750, 2751-2800, 2801-2850, 2851-2900, 2901-2950, 2951-3000, 3001-3050, 3051-3100, 3101-3150, 3151-3200, 3201-3250, 3251-3300, 3301-3350, 3351-3400, 3401-3450, 3451-3500, 3501-3550, 3551-3600, 3601-3650, 3651-3700, 3701-3750, 3751-3800, 3801-3850, 3851-3900, 3901-3950, 3951-4000, 4001-4050, 4051-4100, 4101-4150, 4151-4200, 4201-4250, 4251-4300, 4301-4350, 4351-4400, 4401-4450, 4451-4500, 4501-4550, 4551-4600, 4601-4650, 4651-4700, 4701-4750, 4751-4800, 4801-4850, 4851-4900, 4901-4950, 4951-5000, 5001-5050, 5051-5100, 5101-5150, 5151-5200, 5201-5250, 5251-5300, 5301-5350, 5351-5400, 5401-5450, 5451-5500, 5501-5550, 5551-5600, 5601-5650, 5651-5700, 5701-5750, 5751-5800, 5801-5850, 5851-5900, 5901-5950, 5951-6000, 6001-6050, 6051-6100, 6101-6150, 6151-6200, 6201-6250, 6251-6300, 6301-6350, 6351-6400, 6401-6450, 6451-6500, 6501-6550, 6551-6600, 6601-6650, 6651-6700, 6701-6750, 6751-6800, 6801-6850, 6851-6900, 6901-6950, 6951-7000, 7001-7050, 7051-7100, 7101-7150, 7151-7200, 7201-7250, 7251-7300 or 7301 to the end of SEQ ID NO:X, or the complementary strand thereto. In this context “about” includes the particularly recited range or a range larger or smaller by several (5, 4, 3, 2, or 1) nucleotides, at either terminus or at both termini. Preferably, these fragments encode a polypeptide which has a functional activity (e.g., biological activity; such as, for example, activity useful in detecting, preventing, diagnosing, prognosticating, treating, and/or ameliorating cancer and other hyperproliferative diseases and disorders). More preferably, these polynucleotides can be used as probes or primers as discussed herein. Polynucleotides which hybridize to one or more of these polynucleotides under stringent hybridization conditions or alternatively, under lower stringency conditions are also encompassed by the invention, as are polypeptides encoded by these polynucleotides.

[0221] Further representative examples of polynucleotide fragments of the invention comprise, or alternatively consist of, a sequence from about nucleotide number 1-50, 51-100, 101-150, 151-200, 201-250, 251-300, 301-350, 351-400, 401-450, 451-500, 501-550, 551-600, 601-650, 651-700, 701-750, 751-800, 801-850, 851-900, 901-950, 951-1000, 1001-1050, 1051-1100, 1101-1150, 1151-1200, 1201-1250, 1251-1300, 1301-1350, 1351-1400, 1401-1450, 1451-1500, 1501-1550, 1551-1600, 1601-1650, 1651-1700, 1701-1750, 1751-1800, 1801-1850, 1851-1900, 1901-1950, 1951-2000, 2001-2050, 2051-2100, 2101-2150, 2151-2200, 2201-2250, 2251-2300, 2301-2350, 2351-2400, 2401-2450, 2451-2500, 2501-2550, 2551-2600, 2601-2650, 2651-2700, 2701-2750, 2751-2800, 2801-2850, 2851-2900, 2901-2950, 2951-3000, 3001-3050, 3051-3100, 3101-3150, 3151-3200, 3201-3250, 3251-3300, 3301-3350, 3351-3400, 3401-3450, 3451-3500, 3501-3550, 3551-3600, 3601-3650, 3651-3700, 3701-3750, 3751-3800, 3801-3850, 3851-3900, 3901-3950, 3951-4000, 4001-4050, 4051-4100, 4101-4150, 4151-4200, 4201-4250, 4251-4300, 4301-4350, 4351-4400, 4401-4450, 4451-4500, 4501-4550, 4551-4600, 4601-4650, 4651-4700, 4701-4750, 4751-4800, 4801-4850, 4851-4900, 4901-4950, 4951-5000, 5001-5050, 5051-5100, 5101-5150, 5151-5200, 5201-5250, 5251-5300, 5301-5350, 5351-5400, 5401-5450, 5451-5500, 5501-5550, 5551-5600, 5601-5650, 5651-5700, 5701-5750, 5751-5800, 5801-5850, 5851-5900, 5901-5950, 5951-6000, 6001-6050, 6051-6100, 6101-6150, 6151-6200, 6201-6250, 6251-6300, 6301-6350, 6351-6400, 6401-6450, 6451-6500, 6501-6550, 6551-6600, 6601-6650, 6651-6700, 6701-6750, 6751-6800, 6801-6850, 6851-6900, 6901-6950, 6951-7000, 7001-7050, 7051-7100, 7101-7150, 7151-7200, 7201-7250, 7251-7300 or 7301 to the end of the cDNA sequence contained in ATCC Deposit No:Z, or the complementary strand thereto. In this context “about” includes the particularly recited range or a range larger or smaller by several (5, 4, 3, 2, or 1) nucleotides, at either terminus or at both termini. Preferably, these fragments encode a polypeptide which has a functional activity (e.g., biological activity). More preferably, these polynucleotides can be used as probes or primers as discussed herein. Polynucleotides which hybridize to one or more of these polynucleotides under stringent hybridization conditions or alternatively, under lower stringency conditions are also encompassed by the invention, as are polypeptides encoded by these polynucleotides.

[0222] Moreover, representative examples of polynucleotide fragments of the invention comprise, or alternatively consist of, a nucleic acid sequence comprising one, two, three, four, five, six, seven, eight, nine, ten, or more of the above described polynucleotide fragments of the invention in combination with a polynucleotide sequence delineated in Table 1C column 6. Additional, representative examples of polynucleotide fragments of the invention comprise, or alternatively consist of, a nucleic acid sequence comprising one, two, three, four, five, six, seven, eight, nine, ten, or more of the above described polynucleotide fragments of the invention in combination with a polynucleotide sequence that is the complementary strand of a sequence delineated in column 6 of Table 1C. In further embodiments, the above-described polynucleotide fragments of the invention comprise, or alternatively consist of, sequences delineated in Table 1C, column 6, and have a nucleic acid sequence which is different from that of the BAC fragment having the sequence disclosed in SEQ ID NO:B (see Table 1C, column 5). In additional embodiments, the above-described polynucleotide fragments of the invention comprise, or alternatively consist of, sequences delineated in Table 1C, column 6, and have a nucleic acid sequence which is different from that published for the BAC clone identified as BAC ID NO:A (see Table 1C, column 4). In additional embodiments, the above-described polynucleotides of the invention comprise, or alternatively consist of, sequences delineated Table 1C, column 6, and have a nucleic acid sequence which is different from that contained in the BAC clone identified as BAC ID NO:A (see Table 1C, column 4). Polypeptides encoded by these polynucleotides, other polynucleotides that encode these polypeptides, and antibodies that bind these polypeptides are also encompassed by the invention. Additionally, fragments and variants of the above-described polynucleotides and polypeptides are also encompassed by the invention.

[0223] In additional specific embodiments, polynucleotides of the invention comprise, or alternatively consist of, one, two, three, four, five, six, seven, eight, nine, ten, or more fragments of the sequences delineated in column 6 of Table 1C, and the polynucleotide sequence of SEQ ID NO:X (e.g., as defined in Table 1C, column 2) or fragments or variants thereof. Polypeptides encoded by these polynucleotides, other polynucleotides that encode these polypeptides, and antibodies that bind these polypeptides are also encompassed by the invention.

[0224] In additional specific embodiments, polynucleotides of the invention comprise, or alternatively consist of, one, two, three, four, five, six, seven, eight, nine, ten, or more fragments of the sequences delineated in column 6 of Table 1C which correspond to the same ATCC Deposit No:Z (see Table 1C, column 1), and the polynucleotide sequence of SEQ ID NO:X (e.g., as defined in Table 1A, 1B, or 1C) or fragments or variants thereof. Polypeptides encoded by these polynucleotides, other polynucleotides that encode these polypeptides, and antibodies that bind these polypeptides are also encompassed by the invention.

[0225] In further specific embodiments, polynucleotides of the invention comprise, or alternatively consist of, one, two, three, four, five, six, seven, eight, nine, ten, or more fragments of the sequences delineated in the same row of column 6 of Table 1C, and the polynucleotide sequence of SEQ ID NO:X (e.g., as defined in Table 1A, 1B, or 1C) or fragments or variants thereof. Polypeptides encoded by these polynucleotides, other polynucleotides that encode these polypeptides, and antibodies that bind these polypeptides are also encompassed by the invention.

[0226] In additional specific embodiments, polynucleotides of the invention comprise, or alternatively consist of a polynucleotide sequence in which the 3′ 10 polynucleotides of one of the sequences delineated in column 6 of Table 1C and the 5′ 10 polynucleotides of the sequence of SEQ ID NO:X are directly contiguous. Nucleic acids which hybridize to the complement of these 20 contiguous polynucleotides under stringent hybridization conditions or alternatively, under lower stringency conditions, are also encompassed by the invention. Polypeptides encoded by these polynucleotides and/or nucleic acids, other polynucleotides and/or nucleic acids that encode these polypeptides, and antibodies that bind these polypeptides are also encompassed by the invention. Additionally, fragments and variants of the above-described polynucleotides, nucleic acids, and polypeptides are also encompassed by the invention.

[0227] In additional specific embodiments, polynucleotides of the invention comprise, or alternatively consist of a polynucleotide sequence in which the 3′ 10 polynucleotides of one of the sequences delineated in column 6 of Table 1C and the 5′ 10 polynucleotides of a fragment or variant of the sequence of SEQ ID NO:X (e.g., as described herein) are directly contiguous Nucleic acids which hybridize to the complement of these 20 contiguous polynucleotides under stringent hybridization conditions or alternatively, under lower stringency conditions; are also encompassed by the invention. Polypeptides encoded by these polynucleotides and/or nucleic acids, other polynucleotides and/or nucleic acids encoding these polypeptides, and antibodies that bind these polypeptides are also encompassed by the invention. Additionally, fragments and variants of the above-described polynucleotides, nucleic acids, and polypeptides are also encompassed by the invention.

[0228] In further specific embodiments, polynucleotides of the invention comprise, or alternatively consist of a polynucleotide sequence in which the 3′ 10 polynucleotides of a fragment or variant of the sequence of SEQ ID NO:X and the 5′ 10 polynucleotides of the sequence of one of the sequences delineated in column 6 of Table 1C are directly contiguous. Nucleic acids which hybridize to the complement of these 20 contiguous polynucleotides under stringent hybridization conditions or alternatively, under lower stringency conditions, are also encompassed by the invention. Polypeptides encoded by these polynucleotides and/or nucleic acids, other polynucleotides and/or nucleic acids encoding these polypeptides, and antibodies that bind these polypeptides are also encompassed by the invention. Additionally, fragments and variants of the above-described polynucleotides, nucleic acids, and polypeptides are also encompassed by the invention.

[0229] In specific embodiments, polynucleotides of the invention comprise, or alternatively consist of a polynucleotide sequence in which the 3′ 10 polynucleotides of one of the sequences delineated in column 6 of Table 1C and the 5′ 10 polynucleotides of another sequence in column 6 are directly contiguous. In preferred embodiments, the 3′ 10 polynucleotides of one of the sequences delineated in column 6 of Table 1C is directly contiguous with the 5′ 10 polynucleotides of the next sequential exon delineated in Table 1C, column 6. Nucleic acids which hybridize to the complement of these 20 contiguous polynucleotides under stringent hybridization conditions or alternatively, under lower stringency conditions, are also encompassed by the invention. Polypeptides encoded by these polynucleotides and/or nucleic acids, other polynucleotides and/or nucleic acids encoding these polypeptides, and antibodies that bind these polypeptides are also encompassed by the invention. Additionally, fragments and variants of the above-described polynucleotides, nucleic acids, and polypeptides are also encompassed by the invention.

[0230] In the present invention, a “polypeptide fragment” refers to an amino acid sequence which is a portion of the amino acid sequence contained in SEQ ID NO:Y, is a portion of the mature form of SEQ ID NO:Y as defined in columns 14 and 15 of Table 1A, a portion of an amino acid sequence encoded by the portion of SEQ ID NO:X as defined in columns 8 and 9 of Table 2, is a portion of an amino acid sequence encoded by the polynucleotide sequence of SEQ ID NO:X, is a portion of an amino acid sequence encoded by the complement of the polynucleotide sequence in SEQ ID NO:X, is a portion of the amino acid sequence of a mature (secreted) polypeptide encoded by the cDNA contained in ATCC Deposit No:Z, and/or is a portion of an amino acid sequence encoded by the cDNA contained in ATCC Deposit No:Z. Protein (polypeptide) fragments may be “free-standing,” or comprised within a larger polypeptide of which the fragment forms a part or region, most preferably as a single continuous region. Representative examples of polypeptide fragments of the invention, include, for example, fragments comprising, or alternatively consisting of, from about amino acid number 1-20, 21-40, 41-60, 61-80, 81-100, 101-120, 121-140, 141-160, 161-180, 181-200, 201-220, 221-240, 241-260, 261-280, 281-300, 301-320, 321-340, 341-360, 361-380, 381-400, 401-420, 421-440; 441-460, 461-480, 481-500, 501-520, 521-540, 541-560, 561-580, 581-600, 601-620, 621-640, 641-660, 661-680, 681-700, 701-720, 721-740, 741-760, 761-780, 781-800, 801-820, 821-840, 841-860, 861-880, 881-900, 901-920, 921-940, 941-960, 961-980, 981-1000, 1001-1020, 1021-1040, 1041-1060, 1061-1080, 1081-1100, 1101-1120, 1121-1140, 1141-1160, 1161-1180, 1181-1200, 1201-1220, 1221-1240, 1241-1260, 1261-1280, 1281-1300, 1301-1320, 1321-1340, 1341-1360, 1361-1380, 1381-1400, 1401-1420, 1421-1440, or 1441 to the end of the coding region of cDNA and SEQ ID NO: Y. In a preferred embodiment, polypeptide fragments of the invention include, for example, fragments comprising, or alternatively consisting of, from about amino acid number 1-20, 21-40, 41-60, 61-80, 81-100, 101-120, 121-140, 141-160, 161-180, 181-200, 201-220, 221-240, 241-260, 261-280, 281-300, 301-320, 321-340, 341-360, 361-380, 381-400, 401-420, 421-440, 441-460, 461-480, 481-500, 501-520, 521-540, 541-560, 561-580, 581-600, 601-620, 621-640, 641-660, 661-680, 681-700, 701-720, 721-740, 741-760, 761-780, 781-800, 801-820, 821-840, 841-860, 861-880, 881-900, 901-920, 921-940, 941-960, 961-980, 981-1000, 1001-1020, 1021-1040, 1041-1060, 1061-1080, 1081-1100, 1101-1120, 1121-1140, 1141-1160, 1161-1180, 1181-1200, 1201-1220, 1221-1240, 1241-1260, 1261-1280, 1281-1300, 1301-1320, 1321-1340, 1341-1360, 1361-1380, 1381-1400, 1401-1420, 1421-1440, or 1441 to the end of the coding region of SEQ ID NO:Y. Moreover, polypeptide fragments of the invention may be at least about 10, 15, 20, 25, 30, 35, 40, 45, 50, 55, 60, 65, 70, 75, 80, 85, 90, 100, 110, 120, 130, 140, or 150 amino acids in length. In this context “about” includes the particularly recited ranges or values, or ranges or values larger or smaller by several (5, 4, 3, 2, or 1) amino acids, at either extreme or at both extremes. Polynucleotides encoding these polypeptide fragments are also encompassed by the invention.

[0231] Even if deletion of one or more amino acids from the N-terminus of a protein results in modification of loss of one or more biological functions of the protein, other functional activities (e.g., biological activities; such as, for example, activity useful in detecting, preventing, diagnosing, prognosticating, treating, and/or ameliorating cancer and other hyperproliferative diseases and disorders; ability to multimerize; ability to bind a ligand; antigenic ability useful for production of polypeptide specific antibodies) may still be retained For example, the ability of shortened muteins to induce and/or bind to antibodies which recognize the complete or mature forms of the polypeptides generally will be retained when less than the majority of the residues of the complete or mature polypeptide are removed from the N-terminus. Whether a particular polypeptide lacking N-terminal residues of a complete polypeptide retains such immunologic activities can readily be determined by routine methods described herein and otherwise known in the art. It is not unlikely that a mutein with a large number of deleted N-terminal amino acid residues may retain some biological or immunogenic activities. In fact, peptides composed of as few as six amino acid residues may often evoke an immune response.

[0232] Accordingly, polypeptide fragments include the secreted protein as well as the mature form Further preferred polypeptide fragments include the secreted protein or the mature form having a continuous series of deleted residues from the amino or the carboxy terminus, or both. For example, any number of amino acids, ranging from 160, can be deleted from the amino terminus of either the secreted polypeptide or the mature form. Similarly, any number of amino acids, ranging from 1-30, can be deleted from the carboxy terminus of the secreted protein or mature form. Furthermore, any combination of the above amino and carboxy terminus deletions are preferred. Similarly, polynucleotides encoding these polypeptide fragments are also preferred.

[0233] The present invention further provides polypeptides having one or more residues deleted from the amino terminus of the amino acid sequence of a polypeptide disclosed herein (e.g., a polypeptide of SEQ ID NO:Y, a polypeptide as defined in columns 14 and 15 of Table 1A, a polypeptide encoded by the polynucleotide sequence contained in SEQ ID NO:X or the complement thereof, a polypeptide encoded by the portion of SEQ ID NO:X as defined in columns 8 and 9 of Table 2, a polypeptide encoded by the portion of SEQ ID NO:B as defined in column 6 of Table 1C, a polypeptide encoded by the cDNA contained in ATCC Deposit No:Z, and/or a mature polypeptide encoded by the cDNA contained in ATCC Deposit No:2). In particular, N-terminal deletions may be described by the general formula m−q, where q is a whole integer representing the total number of amino acid residues in a polypeptide of the invention (e.g., the polypeptide disclosed in SEQ D) NO:Y, the mature (secreted) portion of SEQ ID NO:Y as defined in columns 14 and 15 of Table 1A, or the polypeptide encoded by the portion of SEQ ID NO:X as defined in columns 8 and 9 of Table 2), and m is defined as any integer ranging from 2 to q−6. Polynucleotides encoding these polypeptides are also encompassed by the invention.

[0234] The present invention further provides polypeptides having one or more residues from the carboxy terminus of the amino acid sequence of a polypeptide disclosed herein (e.g., a polypeptide of SEQ ID NO:Y, the mature (secreted) portion of SEQ ID NO:Y as defined in columns 14 and 15 of Table 1A, a polypeptide encoded by the polynucleotide sequence contained in SEQ ID NO:X, a polypeptide encoded by the portion of SEQ ID NO:X as defined in columns 8 and 9 of Table 2, a polypeptide encoded by the portion of SEQ ID NO:B as defined in column 6 of Table 1C, a polypeptide encoded by the cDNA contained in ATCC Deposit No:Z, and/or a mature polypeptide encoded by the cDNA contained in ATCC Deposit No:Z). In particular, C-terminal deletions may be described by the general formula 1-n, where n is any whole integer ranging from 6 to q-1, and where n corresponds to the position of amino acid residue in a polypeptide of the invention. Polynucleotides encoding these polypeptides are also encompassed by the invention.

[0235] In addition, any of the above described N- or C-terminal deletions can be combined to produce a N- and C-terminal deleted polypeptide. The invention also provides polypeptides having one or more amino acids deleted from both the amino and the carboxyl termini, which may be described generally as having residues m-n of a polypeptide encoded by SEQ ID NO:X (e.g., including, but not limited to, the preferred polypeptide disclosed as SEQ ID NO:Y, the mature (secreted) portion of SEQ ID NO:Y as defined in columns 14 and 15 of Table 1A, and the polypeptide encoded by the portion of SEQ ID NO:X as defined in columns 8 and 9 of Table 2), the cDNA contained in ATCC Deposit No:Z, and/or the complement thereof, where n and m are integers as described above. Polynucleotides encoding these polypeptides are also encompassed by the invention.

[0236] Also as mentioned above, even if deletion of one or more amino acids from the C-terminus of a protein results in modification of loss of one or more biological functions of the protein, other functional activities (e.g., biological-activities such as, for example, activity useful in detecting, preventing, diagnosing, prognosticating, treating, and/or ameliorating cancer and other hyperproliferative diseases and disorders; ability to multimerize; ability to bind a ligand; antigenic ability useful for production of polypeptide specific antibodies) may still be retained. For example the ability of the shortened mutein to induce and/or bind to antibodies which recognize the complete or mature forms of the polypeptide generally will be retained when less than the majority of the residues of the complete or mature polypeptide are removed from the C-terminus. Whether a particular polypeptide lacking C-terminal residues of a complete polypeptide retains such immunologic activities can readily be determined by routine methods described herein and otherwise known in the art. It is not unlikely that a mutein with a large number of deleted C-terminal amino acid residues may retain some biological or immunogenic activities. In fact, peptides composed of as few as six amino acid residues may often evoke an immune response.

[0237] The present application is also directed to proteins containing polypeptides at least 80%, 85%, 90%, 95%, 96%, 97%, 98% or 99% identical to a polypeptide sequence set forth herein. In preferred embodiments, the application is directed to proteins containing polypeptides at least 80%, 85%, 90%, 95%, 96%, 97%, 98% or 99% identical to polypeptides having the amino acid sequence of the specific N- and C-terminal deletions. Polynucleotides encoding these polypeptides are also encompassed by the invention.

[0238] Any polypeptide sequence encoded by, for example, the polynucleotide sequences set forth as SEQ ID NO:X or the complement thereof, (presented, for example, in Tables 1A and 2), the cDNA contained in ATCC Deposit No:Z, or the polynucleotide sequence as defined in column 6 of Table 1C, may be analyzed to determine certain preferred regions of the polypeptide. For example, the amino acid sequence of a polypeptide encoded by a polynucleotide sequence of SEQ ID NO:X (e.g., the polypeptide of SEQ ID NO:Y and the polypeptide encoded by the portion of SEQ ID NO:X as defined in columnns 8 and 9 of Table 2) or the cDNA contained in ATCC Deposit No:Z may be analyzed using the default parameters of the DNASTAR computer algorithm (DNASTAR, Inc., 1228 S. Park St., Madison, Wis. 53715 USA; http://www.dnastar.com/).

[0239] Polypeptide regions that may be routinely obtained using the DNASTAR computer algorithm include, but are not limited to, Garnier-Robson alpha-regions, beta-regions, turn-regions, and coil-regions; Chou-Fasman alpha-regions, beta-regions, and turn-regions; Kyte-Doolittle hydrophilic regions and hydrophobic regions; Eisenberg alpha- and beta-amphipathic regions; Karplus-Schulz flexible regions; Emini surface-forming regions; and Jameson-Wolf regions of high antigenic index. Among highly preferred polynucleotides of the invention in this regard are those that encode polypeptides comprising regions that combine several structural features, such as several (e.g., 1, 2, 3 or 4) of the features set out above.

[0240] Additionally, Kyte-Doolittle hydrophilic regions and hydrophobic regions, Emini surface-forming regions, and Jameson-Wolf regions of high antigenic index (i.e., containing four or more contiguous amino acids having an antigenic index of greater than or equal to 1.5, as identified using the default parameters of the Jameson-Wolf program) can routinely be used to determine polypeptide regions that exhibit a high degree of potential for antigenicity. Regions of high antigenicity are determined from data by DNASTAR analysis by choosing values which represent regions of the polypeptide which are likely to be exposed on the surface of the polypeptide in an environment in which antigen recognition may occur in the process of initiation of an immune response.

[0241] Preferred polypeptide fragments of the invention are fragments comprising, or alternatively, consisting of, an amino acid sequence that displays a functional activity (e.g. biological activity such as, for example, activity useful in detecting, preventing, diagnosing, prognosticating, treating, and/or ameliorating cancer and other hyperproliferative diseases and disorders; ability to multimerize; ability to bind a ligand; antigenic ability useful for production of polypeptide specific antibodies) of the polypeptide sequence of which the amino acid sequence is a fragment. By a polypeptide displaying a “functional activity” is meant a polypeptide capable of one or more known functional activities associated with a full-length protein, such as, for example, biological activity, antigenicity, immunogenicity, and/or multimerization, as described herein.

[0242] Other preferred polypeptide fragments are biologically active fragments. Biologically active fragments are those exhibiting activity similar, but not necessarily identical, to an activity of the polypeptide of the present invention. The biological activity of the fragments may include an improved desired activity, or a decreased undesirable activity.

[0243] In preferred embodiments, polypeptides of the invention comprise, or alternatively consist of, one, two, three, four, five or more of the antigenic fragments of the polypeptide of SEQ ID NO:Y, or portions thereof. Polynucleotides encoding these polypeptides are also encompassed by the invention.

[0244] Epitopes and Antibodies

[0245] The present invention encompasses polypeptides comprising, or alternatively consisting of, an epitope of: the polypeptide sequence shown in SEQ ID NO:Y; a polypeptide sequence encoded by SEQ ID NO:X or the complementary strand thereto; the polypeptide sequence encoded by the portion of SEQ ID NO:X as defined in columns 8 and 9 of Table 2; the polypeptide sequence encoded by the portion of SEQ ID NO:B as defined in column 6 of Table 1C or the complement thereto; the polypeptide sequence encoded by the cDNA contained in ATCC Deposit No:Z; or the polypeptide sequence encoded by a polynucleotide that hybridizes to the sequence of SEQ ID NO:X, the complement of the sequence of SEQ ID NO:X, the complement of a portion of SEQ ID NO:X as defined in columns 8 and 9 of Table 2, or the cDNA sequence contained in ATCC Deposit No:Z under stringent hybridization conditions or alternatively, under lower stringency hybridization as defined supra. The present invention further encompasses polynucleotide sequences encoding an epitope of a polypeptide sequence of the invention (such as, for example, the sequence disclosed in SEQ ID NO:X, or a fragment thereof), polynucleotide sequences of the complementary strand of a polynucleotide sequence encoding an epitope of the invention, and polynucleotide sequences which hybridize to the complementary strand under stringent hybridization conditions or alternatively, under lower stringency hybridization conditions defined supra.

[0246] The term “epitopes,” as used herein, refers to portions of a polypeptide having antigenic or immunogenic activity in an animal, preferably a mammal, and most preferably in a human. In a preferred embodiment, the present invention encompasses a polypeptide comprising an epitope, as well as the polynucleotide encoding this polypeptide. An “immunogenic epitope,” as used herein, is defined as a portion of a protein that elicits an antibody response in an animal, as determined by any method known in the art, for example, by the methods for generating antibodies described infra. (See, for example, Geysen et al., Proc. Natl. Acad. Sci. USA 81:3998-4002 (1983)). The term “antigenic epitope,” as used herein, is defined as a portion of a protein to which an antibody can immunospecifically bind its antigen as determined by any method well known in the art, for example, by the immunoassays described herein. Immunospecific binding excludes non-specific binding but does not necessarily exclude cross-reactivity with other antigens. Antigenic epitopes need not necessarily be immunogenic.

[0247] Fragments which function as epitopes may be produced by any conventional means. (See, e.g., Houghten, R. A., Proc. Natl. Acad. Sci. USA 82:5131-5135 (1985) further described in U.S. Pat. No. 4,631,211.)

[0248] In the present invention, antigenic epitopes preferably contain a sequence of at least 4, at least 5, at least 6, at least 7, more preferably at least 8, at least 9, at least 10, at least 11, at least 12, at least 13, at least 14, at least 15, at least 20, at least 25, at least 30, at least 40, at least 50, and, most preferably, between about 15 to about 30 amino acids. Preferred polypeptides comprising immunogenic or antigenic epitopes are at least 10, 15, 20, 25, 30, 35, 40, 45, 50, 55, 60, 65, 70, 75, 80, 85, 90, 95, or 100 amino acid residues in length. Additional non-exclusive preferred antigenic epitopes include the antigenic epitopes disclosed herein, as well as portions thereof. Antigenic epitopes are useful, for example, to raise antibodies, including monoclonal antibodies, that specifically bind the epitope. Preferred antigenic epitopes include the antigenic epitopes disclosed herein, as well as any combination of two, three, four, five or more of these antigenic epitopes. Antigenic epitopes can be used as the target molecules in immunoassays. (See, for instance, Wilson et al., Cell 37:767-778 (1984); Sutcliffe et al., Science 219:660-666 (1983)).

[0249] Non-limiting examples of epitopes of polypeptides that can be used to generate antibodies of the invention include a polypeptide comprising, or alternatively consisting of, at least one, two, three, four, five, six or more of the portion(s) of SEQ ID NO:Y specified in column 6 of Table 1B.1. These polypeptide fragments have been determined to bear antigenic epitopes of the proteins of the invention by the analysis of the Jameson-Wolf antigenic index which is included in the DNAStar suite of computer programs. By “comprise” it is intended that a polypeptide contains at least one, two, three, four, five, six or more of the portion(s) of SEQ ID NO:Y shown in column 6 of Table 1B.1, but it may contain additional flanking residues on either the amino or carboxyl termini of the recited portion. Such additional flanking sequences are preferably sequences naturally found adjacent to the portion; i.e., contiguous sequence shown in SEQ ID NO:Y. The flanking sequence may, however, be sequences from a heterolgous polypeptide, such as from another protein described herein or from a heterologous polypeptide not described herein. In particular embodiments, epitope portions of a polypeptide of the invention comprise one, two, three, or more of the portions of SEQ ID NO:Y shown in column 6 of Table 1B.1.

[0250] Similarly, immunogenic epitopes can be used, for example, to induce antibodies according to methods well known in the art. See, for instance, Sutcliffe et al., supra; Wilson et al., supra; Chow et al., Proc. Natl. Acad. Sci. USA 82:910-914; and Bittle et al., J. Gen. Virol. 66:2347-2354 (1985). Preferred immunogenic epitopes include the immunogenic epitopes disclosed herein, as well as any combination of two, three, four, five or more of these immunogenic epitopes. The polypeptides comprising one or more immunogenic epitopes may be presented for eliciting an antibody response together with a carrier protein, such as an albumin, to an animal system (such as rabbit or mouse), or, if the polypeptide is of sufficient length (at least about 25 amino acids), the polypeptide may be presented without a carrier. However, immunogenic epitopes comprising as few as 8 to 10 amino acids have been shown to be sufficient to raise antibodies capable of binding to, at the very least, linear epitopes in a denatured polypeptide (e.g., in Western blotting).

[0251] Epitope-bearing polypeptides of the present invention may be used to induce antibodies according to methods well known in the art including, but not limited to, in vivo immunization, in vitro immunization, and phage display methods. See, e.g., Sutcliffe et al., supra; Wilson et al., supra, and Bittle et al., J. Gen. Virol., 66:2347-2354 (1985). If in vivo immunization is used, animals may be immunized with free peptide; however, anti-peptide antibody titer may be boosted by coupling the peptide to a macromolecular carrier, such as keyhole limpet hemacyanin (KLH) or tetanus toxoid. For instance, peptides containing cysteine residues may be coupled to a carrier using a linker such as maleimidobenzoyl-N-hydroxysuccinimide ester (MBS), while other peptides may be coupled to carriers using a more general linking agent such as glutaraldehyde. Animals such as rabbits, rats and mice are immunized with either free or carrier-coupled peptides, for instance, by intraperitoneal and/or intradermal injection of emulsions containing about 100 μg of peptide or carrier protein and Freund's adjuvant or any other adjuvant known for stimulating an immune response. Several booster injections may be needed, for instance, at intervals of about two weeks, to provide a useful titer of anti-peptide antibody which can be detected, for example, by ELISA assay using free peptide adsorbed to a solid surface. The titer of anti-peptide antibodies in serum from an immunized animal may be increased by selection of anti-peptide antibodies, for instance, by adsorption to the peptide on a solid support and elution of the selected antibodies according to methods well known in the art.

[0252] As one of skill in the art will appreciate, and as discussed above, the polypeptides of the present invention (e.g., those comprising an immunogenic or antigenic epitope) can be fused to heterologous polypeptide sequences. For example, polypeptides of the present invention (including fragments or variants thereof), may be fused with the constant domain of immunoglobulins (IgA, IgE, IgG, IgM), or portions thereof (CH1, CH2, CH3, or any combination thereof and portions thereof, resulting in chimeric polypeptides. By way of another non-limiting example, polypeptides and/or antibodies of the present invention (including fragments or variants thereof) may be fused with albumin (including but not limited to recombinant human serum albumin or fragments or variants thereof (see, e.g., U.S. Pat. No. 5,876,969, issued Mar. 2, 1999, EP Patent 0 413 622, and U.S. Pat. No. 5,766,883, issued Jun. 16, 1998, herein incorporated by reference in their entirety)). In a preferred embodiment, polypeptides and/or antibodies of the present invention (including fragments or variants thereof) are fused with the mature form of human serum albumin (i.e., amino acids 1-585 of human serum albumin as shown in FIGS. 1 and 2 of EP Patent 0 322 094) which is herein incorporated by reference in its entirety. In another preferred embodiment, polypeptides and/or antibodies of the present invention (including fragments or variants thereof) are fused with polypeptide fragments comprising, or alternatively consisting of, amino acid residues 1-z of human serum albumin, where z is an integer from 369 to 419, as described in U.S. Pat. No. 5,766,883 herein incorporated by reference in its entirety. Polypeptides and/or antibodies of the present invention (including fragments or variants thereof) may be fused to either the N- or C-terminal end of the heterologous protein (e.g., immunoglobulin Fc polypeptide or human serum albumin polypeptide). Polynucleotides encoding fusion proteins of the invention are also encompassed by the invention.

[0253] Such fusion proteins as those described above may facilitate purification and may increase half-life in vivo. This has been shown for chimeric proteins consisting of the first two domains of the human CD4-polypeptide and various domains of the constant regions of the heavy or light chains of mammalian immunoglobulins. See, e.g., EP 394,827; Traunecker et al., Nature, 331:84-86 (1988). Enhanced delivery of an antigen across the epithelial barrier to the immune system has been demonstrated for antigens (e.g., insulin) conjugated to an FcRn binding partner such as IgG or Fc fragments (see, e.g., PCT Publications WO 96/22024 and WO 99/04813). IgG fusion proteins that have a disulfide-linked dimeric structure due to the IgG portion desulfide bonds have also been found to be more efficient in binding and neutralizing other molecules than monomeric polypeptides or fragments thereof alone. See, e.g., Fountoulakis et al., J. Biochem, 270:3958-3964 (1995). Nucleic acids encoding the above epitopes can also be recombined with a gene of interest as an epitope tag (e.g., the hemagglutinin (HA) tag or flag tag) to aid in detection and purification of the expressed polypeptide. For example, a system described by Janknecht et al. allows for the ready purification of non-denatured fusion proteins expressed in human cell lines (Janknecht et al., 1991, Proc. Natl. Acad. Sci. USA 88:8972-897). In this system, the gene of interest is subcloned into a vaccinia recombination plasmid such that the open reading frame of the gene is translationally fused to an amino-terminal tag consisting of six histidine residues. The tag serves as a matrix binding domain for the fusion protein. Extracts from cells infected with the recombinant vaccinia virus are loaded onto Ni2+ nitriloacetic acid-agarose column and histidine-tagged proteins can be selectively eluted with imidazole-containing buffers.

[0254] Fusion Proteins

[0255] Any polypeptide of the present invention can be used to generate fusion proteins. For example, the polypeptide of the present invention, when fused to a second protein, can be used as an antigenic tag. Antibodies raised against the polypeptide of the present invention can be used to indirectly detect the second protein by binding to the polypeptide. Moreover, because secreted proteins target cellular locations based on trafficking signals, polypeptides of the present invention which are shown to be secreted can be used as targeting molecules once fused to other proteins.

[0256] Examples of domains that can be fused to polypeptides of the present invention include not only heterologous signal sequences, but also other heterologous functional regions. The fusion does not necessarily need to be direct, but may occur through linker sequences.

[0257] In certain preferred embodiments, proteins of the invention are fusion proteins comprising an amino acid sequence that is an N and/or C-terminal deletion of a polypeptide of the invention. In preferred embodiments, the invention is directed to a fusion protein comprising an amino acid sequence that is at least 90%, 95%, 96%, 97%, 98% or 99% identical to a polypeptide sequence of the invention. Polynucleotides encoding these proteins are also encompassed by the invention.

[0258] Moreover, fusion proteins may also be engineered to improve characteristics of the polypeptide of the present invention. For instance, a region of additional amino acids, particularly charged amino acids, may be added to the N-terminus of the polypeptide to improve stability and persistence during purification from the host cell or subsequent handling and storage. Also, peptide moieties may be added to the polypeptide to facilitate purification. Such regions may be removed prior to final preparation of the polypeptide. The addition of peptide moieties to facilitate handling of polypeptides are familiar and routine techniques in the art.

[0259] As one of skill in the art will appreciate that, as discussed above, polypeptides of the present invention, and epitope-bearing fragments thereof, can be combined with heterologous polypeptide sequences. For example, the polypeptides of the present invention may be fused with heterologous polypeptide sequences, for example, the polypeptides of the present invention may be fused with the constant domain of immunoglobulins (IgA, IgE, IgG, IgM) or portions thereof (CH1, CH2, CH3, and any combination thereof, including both entire domains and portions thereof), or albumin (including, but not limited to, native or recombinant human albumin or fragments or variants thereof (see, e.g., U.S. Pat. No. 5,876,969, issued Mar. 2, 1999, EP Patent 0 413 622, and U.S. Pat. No. 5,766,883, issued Jun. 16, 1998, herein incorporated by reference in their entirety)), resulting in chimeric polypeptides. For example, EP-A-0 464 533 (Canadian counterpart 2045869) discloses fusion proteins comprising various portions of constant region of immunoglobulin molecules together with another human protein or part thereof. In many cases, the Fc part in a fusion protein is beneficial in therapy and diagnosis, and thus can result in, for example, improved pharmacokinetic properties (EP-A 0232 262). Alternatively, deleting the Fc part after the fusion protein has been expressed, detected, and purified, would be desired. For example, the Fc portion may hinder therapy and diagnosis if the fusion protein is used as an antigen for immunizations. In drug discovery, for example, human proteins, such as hIL-5, have been fused with Fc portions for the purpose of high-throughput screening assays to identify antagonists of hIL-5. See, D. Bennett et al., J. Molecular Recognition 8:52-58 (1995); K. Johanson et al., J. Biol. Chem. 270:9459-9471 (1995).

[0260] Moreover, the polypeptides of the present invention can be fused to marker sequences, such as a polypeptide which facilitates purification of the fused polypeptide. In preferred embodiments, the marker amino acid sequence is a hexa-histidine peptide, such as the tag provided in a pQE vector (QIAGEN, Inc., 9259 Eton Avenue, Chatsworth, Calif., 91311), among others, many of which are commercially available. As described in Gentz et al., Proc. Natl. Acad. Sci. USA 86:821-824 (1989), for instance, hexa-histidine provides for convenient purification of the fusion protein. Another peptide tag useful for purification, the “HA” tag, corresponds to an epitope derived from the influenza hemagglutinin protein (Wilson et al., Cell 37:767 (1984)).

[0261] Additional fusion proteins of the invention may be generated through the techniques of gene-shuffling, motif-shuffling, exon-shuffling, and/or codon-shuffling (collectively referred to as “DNA shuffling”). DNA shuffling may be employed to modulate the activities of polypeptides of the invention, such methods can be used to generate polypeptides with altered activity, as well as agonists and antagonists of the polypeptides. See, generally, U.S. Pat. Nos. 5,605,793; 5,811,238; 5,830,721; 5,834,252; and 5,837,458, and Patten et al., Curr. Opinion Biotechnol. 8:724-33 (1997); Harayama, Trends Biotechnol. 16(2):76-82 (1998); Hansson, et al., J. Mol. Biol. 287:265-76 (1999); and Lorenzo and Blasco, Biotechniques 24(2):308-13 (1998) (each of these patents and publications are hereby incorporated by reference in its entirety). In one embodiment, alteration of polynucleotides corresponding to SEQ ID NO:X and the polypeptides encoded by these polynucleotides may be achieved by DNA shuffling. DNA shuffling involves the assembly of two or more DNA segments by homologous or site-specific recombination to generate variation in the polynucleotide sequence. In another embodiment, polynucleotides of the invention, or the encoded polypeptides, may be altered by being subjected to random mutagenesis by error-prone PCR, random nucleotide insertion or other methods prior to recombination. In another embodiment, one or more components, motifs, sections, parts, domains, fragments, etc., of a polynucleotide encoding a polypeptide of the invention may be recombined with one or more components, motifs, sections, parts, domains, fragments, etc. of one or more heterologous molecules.

[0262] Thus, any of these above fusions can be engineered using the polynucleotides or the polypeptides of the present invention.

[0263] Recombinant and Synthetic Production of Polypeptides of the Invention

[0264] The present invention also relates to vectors containing the polynucleotide of the present invention, host cells, and the production of polypeptides by synthetic and recombinant techniques. The vector may be, for example, a phage, plasmid, viral, or retroviral vector. Retroviral vectors may be replication competent or replication defective. In the latter case, viral propagation generally will occur only in complementing host cells. The polynucleotides of the invention may be joined to a vector containing a selectable marker for propagation in a host. Generally, a plasmid vector is introduced in a precipitate, such as a calcium phosphate precipitate, or in a complex with a charged lipid. If the vector is a virus, it may be packaged in vitro using an appropriate packaging cell line and then transduced into host cells.

[0265] The polynucleotide insert should be operatively linked to an appropriate promoter, such as the phage lambda PL promoter, the E. coli lac, trp, phoA and tac promoters, the SV40 early and late promoters and promoters of retroviral LTRs, to name a few. Other suitable promoters will be known to the skilled artisan. The expression constructs will further contain sites for transcription initiation, termination, and, in the transcribed region, a ribosome binding site for translation. The coding portion of the transcripts expressed by the constructs will preferably include a translation initiating codon at the beginning and a termination codon (UAA, UGA or UAG) appropriately positioned at the end of the polypeptide to be translated.

[0266] As indicated, the expression vectors will preferably include at least one selectable marker. Such markers include dihydrofolate reductase, G418, glutamine synthase, or neomycin resistance for eukaryotic cell culture, and tetracycline, kanamycin or ampicillin resistance genes for culturing in E. coli and other bacteria. Representative examples of appropriate hosts include, but are not limited to, bacterial cells, such as E. coli, Streptomyces and Salmonella typhimurium cells; fungal cells, such as yeast cells (e.g., Saccharomyces cerevisiae or Pichia pastoris (ATCC Accession No. 201178)); insect cells such as Drosophila S2 and Spodoptera Sf9 cells; animal cells such as CHO, COS, 293, and Bowes melanoma cells; and plant cells. Appropriate culture mediums and conditions for the above-described host cells are known in the art.

[0267] Among vectors preferred for use in bacteria include pQE70, pQE60 and pQE-9, available from QIAGEN, Inc.; pBluescript vectors, Phagescript vectors, pNH8A, pNH16a, pNH18A, pNH46A, available from Stratagene Cloning Systems, Inc.; and ptrc99a, pKK223-3, pKK233-3, pDR540, pRIT5 available from Pharmacia Biotech, Inc. Among preferred eukaryotic vectors are pWLNEO, pSV2CAT, pOG44, pXIT1 and pSG available from Stratagene; and pSVK3, pBPV, pMSG and pSVL available from Pharmacia Preferred expression vectors for use in yeast systems include, but are not limited to pYES2, pYD1, pTEF1/Zeo, pYES2/GS, pPICZ, pGAPZ, pGAPZalph, pPIC9, pPIC3.5, pHIL-D2, pHIL-S1, pPIC3.5K, pPIC9K, and PAO815 (all available from Invitrogen, Carlbad, CA). Other suitable vectors will be readily apparent to the skilled artisan.

[0268] Vectors which use glutamine synthase (GS) or DHFR as the selectable markers can be amplified in the presence of the drugs methionine sulphoximine or methotrexate, respectively. An advantage of glutamine synthase based vectors are the availability of cell lines (e.g., the murine myeloma cell line, NS0) which are glutamine synthase negative. Glutamine synthase expression systems can also function in glutamine synthase expressing cells (e.g., Chinese Hamster Ovary (CHO) cells) by providing additional inhibitor to prevent the functioning of the endogenous gene. A glutamine synthase expression system and components thereof are detailed in PCT publications: WO87/04462; WO86/05807; WO89/01036; WO89/10404; and WO91/06657, which are hereby incorporated in their entireties by reference herein. Additionally, glutamine synthase expression vectors can be obtained from Lonza Biologics, Inc. (Portsmouth, N.H.). Expression and production of monoclonal antibodies using a GS expression system in murine myeloma cells is described in Bebbington et al., Bio/technology 10:169(1992) and in Biblia and Robinson Biotechnol. Prog. 11:1 (1995) which are herein incorporated by reference.

[0269] The present invention also relates to host cells containing the above-described vector constructs described herein, and additionally encompasses host cells containing nucleotide sequences of the invention that are operably associated with one or more heterologous control regions (e.g., promoter and/or enhancer) using techniques known of in the art. The host cell can be a higher eukaryotic cell, such as a mammalian cell (e.g., a human derived cell), or a lower eukaryotic cell, such as a yeast cell, or the host cell can be a prokaryotic cell, such as a bacterial cell. A host strain may be chosen which modulates the expression of the inserted gene sequences, or modifies and processes the gene product in the specific fashion desired. Expression from certain promoters can be elevated in the presence of certain inducers; thus expression of the genetically engineered polypeptide may be controlled. Furthermore, different host cells have characteristics and specific mechanisms for the translational and post-translational processing and modification (e.g., phosphorylation, cleavage) of proteins. Appropriate cell lines can be chosen to ensure the desired modifications and processing of the foreign protein expressed.

[0270] Introduction of the nucleic acids and nucleic acid constructs of the invention into the host cell can be effected by calcium phosphate transfection, DEAE-dextran mediated transfection, cationic lipid-mediated transfection, electroporation, transduction, infection, or other methods. Such methods are described in many standard laboratory manuals, such as Davis et al., Basic Methods In Molecular Biology (1986). It is specifically contemplated that the polypeptides of the present invention may in fact be expressed by a host cell lacking a recombinant vector.

[0271] In addition to encompassing host cells containing the vector constructs discussed herein, the invention also encompasses primary, secondary, and immortalized host cells of vertebrate origin, particularly mammalian origin, that have been engineered to delete or replace endogenous genetic material (e.g., the coding sequence), and/or to include genetic material (e.g., heterologous polynucleotide sequences) that is operably associated with polynucleotides of the invention, and which activates, alters, and/or amplifies endogenous polynucleotides. For example, techniques known in the art may be used to operably associate heterologous control regions (e.g., promoter and/or enhancer) and endogenous polynucleotide sequences via homologous recombination (see, e.g., U.S. Pat. No. 5,641,670, issued Jun. 24, 1997; International Publication Number WO 96/29411; International Publication Number WO 94/12650; Koller et al., Proc. Natl. Acad. Sci USA 86:8932-8935 (1989); and Zijlstra et al., Nature 342:435-438 (1989), the disclosures of each of which are incorporated by reference in their entireties).

[0272] Polypeptides of the invention can be recovered and purified from recombinant cell cultures by well-known methods including ammonium sulfate or ethanol precipitation, acid extraction, anion or cation exchange chromatography, phosphocellulose chromatography, hydrophobic interaction chromatography, affinity chromatography, hydroxylapatite chromatography and lectin chromatography. Most preferably, high performance liquid chromatography (“HPLC”) is employed for purification.

[0273] Polypeptides of the present invention can also be recovered from: products purified from natural sources, including bodily fluids, tissues and cells, whether directly isolated or cultured; products of chemical synthetic procedures; and products produced by recombinant techniques from a prokaryotic or eukaryotic host, including, for example, bacterial, yeast, higher plant, insect, and mammalian cells. Depending upon the host employed in a recombinant production procedure, the polypeptides of the present invention may be glycosylated or may be non-glycosylated. In addition, polypeptides of the invention may also include an initial modified methionine residue, in some cases as a result of host-mediated processes. Thus, it is well known in the art that the N-terminal methionine encoded by the translation initiation codon generally is removed with high efficiency from any protein after translation in all eukaryotic cells. While the N-terminal methionine on most proteins also is efficiently removed in most prokaryotes, for some proteins, this prokaryotic removal process is inefficient, depending on the nature of the amino acid to which the N-terminal methionine is covalently linked.

[0274] In one embodiment, the yeast Pichia pastoris is used to express polypeptides of the invention in a eukaryotic system. Pichia pastoris is a methylotrophic yeast which can metabolize methanol as its sole carbon source. A main step in the methanol metabolization pathway is the oxidation of methanol to formaldehyde using O₂. This reaction is catalyzed by the enzyme alcohol oxidase. In order to metabolize methanol as its sole carbon source, Pichia pastoris must generate high levels of alcohol oxidase due, in part, to the relatively low affinity of alcohol oxidase for O₂-Consequently, in a growth medium depending on methanol as a main carbon source, the promoter region of one of the two alcohol oxidase genes (AOX1) is highly active. In the presence of methanol, alcohol oxidase produced from the AOX1 gene comprises up to approximately 30% of the total soluble protein in Pichia pastoris. See Ellis, S. B., et al., Mol. Cell. Biol. 5:1111-21 (1985); Koutz, P. J, et al., Yeast 5:167-77 (1989); Tschopp, J. F., et al., Nucl. Acids Res. 15:3859-76 (1987). Thus, a heterologous coding sequence, such as, for example, a polynucleotide of the present invention, under the transcriptional regulation of all or part of the AOX1 regulatory sequence is expressed at exceptionally high levels in Pichia yeast grown in the presence of methanol.

[0275] In one example, the plasmid vector pPIC9K is used to express DNA encoding a polypeptide of the invention, as set forth herein, in a Pichea yeast system essentially as described in “Pichia Protocols: Methods in Molecular Biology,” D. R. Higgins and J. Cregg, eds. The Humana Press, Totowa, N.J., 1998. This expression vector allows expression and secretion of a polypeptide of the invention by virtue of the strong AOX1 promoter linked to the Pichia pastoris alkaline phosphatase (PHO) secretory signal peptide (i.e., leader) located upstream of a multiple cloning site.

[0276] Many other yeast vectors could be used in place of pPIC9K, such as, pYES2, pYD1, pTEF1/Zeo, pYES2/GS, pPICZ, pGAPZ, pGAPZalpha, pPIC9, pPIC3.5, pHIL-D2, pHIL-S1, pPIC3.5K, and PAO815, as one skilled in the art would readily appreciate, as long as the proposed expression construct provides appropriately located signals for transcription, translation, secretion (if desired), and the like, including an in-frame AUG as required.

[0277] In another embodiment, high-level expression of a heterologous coding sequence, such as, for example, a polynucleotide of the present invention, may be achieved by cloning the heterologous polynucleotide of the invention into an expression vector such as, for example, pGAPZ or pGAPZalpha, and growing the yeast culture in the absence of methanol.

[0278] In addition to encompassing host cells containing the vector constructs discussed herein, the invention also encompasses primary, secondary, and immortalized host cells of vertebrate origin, particularly mammalian origin, that have been engineered to delete or replace endogenous genetic material (e.g., coding sequence), and/or to include genetic material (e.g., heterologous polynucleotide sequences) that is operably associated with polynucleotides of the invention, and which activates, alters, and/or amplifies endogenous polynucleotides. For example, techniques known in the art may be used to operably associate heterologous control regions (e.g., promoter and/or enhancer) and endogenous polynucleotide sequences via homologous recombination (see, e.g., U.S. Pat. No. 5,641,670, issued Jun. 24, 1997; International Publication No. WO 96/29411, published Sep. 26, 1996; International Publication No. WO 94/12650, published Aug. 4, 1994; Koller et al., Proc. Natl. Acad. Sci. USA 86:8932-8935 (1989); and Zijistra et al., Nature 342:435-438 (1989), the disclosures of each of which are incorporated by reference in their entireties).

[0279] In addition, polypeptides of the invention can be chemically synthesized using techniques known in the art (e.g., see Creighton, 1983, Proteins: Structures and Molecular Principles, W.H. Freeman & Co., N.Y., and Hunkapiller et al., Nature, 310:105-111 (1984)). For example, a polypeptide corresponding to a fragment of a polypeptide can be synthesized by use of a peptide synthesizer. Furthermore, if desired, nonclassical amino acids or chemical amino acid analogs can be introduced as a substitution or addition into the polypeptide sequence. Non-classical amino acids include, but are not limited to, to the D-isomers of the common amino acids, 2,4-diaminobutyric acid, a-amino isobutyric acid, 4-aminobutyric acid, Abu, 2-amino butyric acid, g-Abu, e-Ahx, 6-amino hexanoic acid, Aib, 2-amino isobutyric acid, 3-amino propionic acid, ornithine, norleucine, norvaline, hydroxyproline, sarcosine, citrulline, homocitrulline, cysteic acid, t-butylglycine, t-butylalanine, phenylglycine, cyclohexylalanine, b-alanine, fluoro-amino acids, designer amino acids such as b-methyl amino acids, Ca-methyl amino acids, Na-methyl amino acids, and amino acid analogs in general. Furthermore, the amino acid can be D (dextrorotary) or L (levorotary).

[0280] The invention encompasses polypeptides of the present invention which are differentially modified during or after translation, e.g., by glycosylation, acetylation, phosphorylation, amidation, derivatization by known protecting/blocking groups, proteolytic cleavage, linkage to an antibody molecule or other cellular ligand, etc. Any of numerous chemical modifications may be carried out by known techniques, including but not limited, to specific chemical cleavage by cyanogen bromide, trypsin, chymotrypsin, papain, V8 protease, NaBH₄; acetylation, formylation, oxidation, reduction; metabolic synthesis in the presence of tunicamycin; etc.

[0281] Additional post-translational modifications encompassed by the invention include, for example, e.g., N-linked or O-linked carbohydrate chains, processing of N-terminal or C-terminal ends), attachment of chemical moieties to the amino acid backbone, chemical modifications of N-linked or O-linked carbohydrate chains, and addition or deletion of an N-terminal methionine residue as a result of procaryotic host cell expression. The polypeptides may also be modified with a detectable label, such as an enzymatic, fluorescent, isotopic or affinity label to allow for detection and isolation of the protein.

[0282] Examples of suitable enzymes include horseradish peroxidase, alkaline phosphatase, beta-galactosidase, or acetylcholinesterase; examples of suitable prosthetic group complexes include streptavidin/biotin and avidin/biotin; examples of suitable fluorescent materials include umbelliferone, fluorescein, fluorescein isothiocyanate, rhodamine, dichlorotriazinylamine fluorescein, dansyl chloride or phycoerythrin; an example of a luminescent material includes luminol; examples of bioluminescent materials include luciferase, luciferin, and aequorin; and examples of suitable radioactive material include iodine (¹²¹I, ¹²³I, ¹²⁵I, ¹³¹I), carbon (¹⁴C), sulfur (³⁵S), tritium (³H), indium (¹¹¹In, ¹¹²In, ^{113m}In, ^{115m}In), technetium (⁹⁹Tc, ^{99m}Tc), thallium (²⁰¹Ti), gallium (⁶⁸Ga, ⁶⁷Ga), palladium (¹⁰³Pd), molybdenum (⁹⁹Mo), xenon (¹³³Xe), fluorine (¹⁸F), ¹⁵³Sm, ¹⁷⁷Lu, ¹⁵⁹Gd, ¹⁴⁹Pm, ¹⁴⁰La, ¹⁷⁵Yb, ¹⁶⁶Ho, ⁹⁰Y, ⁴⁷Sc, ¹⁸⁶Re, ¹⁸⁸Re, ¹⁴²Pr, ¹⁰⁵Rh, and ⁹⁷Ru.

[0283] In specific embodiments, a polypeptide of the present invention or fragment or variant thereof is attached to macrocyclic chelators that associate with radiometal ions, including but not limited to, ¹⁷⁷Lu, ⁹⁰Y, ¹⁶⁶Ho, and ¹⁵³Sm, to polypeptides. In a preferred embodiment, the radiometal ion associated with the macrocyclic chelators is ¹¹¹In. In another preferred embodiment, the radiometal ion associated with the macrocyclic chelator is ⁹⁰Y. In specific embodiments, the macrocyclic chelator is 1,4,7,10-tetraazacyclododecane-N,N′,N″,N′″-tetraacetic acid (DOTA). In other specific embodiments, DOTA is attached to an antibody of the invention or fragment thereof via a linker molecule. Examples of linker molecules useful for conjugating DOTA to a polypeptide are commonly known in the art—see, for example, DeNardo et al., Clin Cancer Res. 4(10):2483-90 (1998); Peterson et al., Bioconjug. Chem. 10(4):553-7 (1999); and Zimmerman et al, Nucl. Med. Biol. 26(8):943-50 (1999); which are hereby incorporated by reference in their entirety.

[0284] As mentioned, the proteins of the invention may be modified by either natural processes, such as posttranslational processing, or by chemical modification techniques which are well known in the art. It will be appreciated that the same type of modification may be present in the same or varying degrees at several sites in a given polypeptide. Polypeptides of the invention may be branched, for example, as a result of ubiquitination, and they may be cyclic, with or without branching. Cyclic, branched, and branched cyclic polypeptides may result from posttranslation natural processes or may be made by synthetic methods. Modifications include acetylation, acylation, ADP-ribosylation, amidation, covalent attachment of flavin, covalent attachment of a heme moiety, covalent attachment of a nucleotide or nucleotide derivative, covalent attachment of a lipid or lipid derivative, covalent attachment of phosphotidylinositol, cross-linking, cyclization, disulfide bond formation, demethylation, formation of covalent cross-links, formation of cysteine, formation of pyroglutamate, formylation, gamma-carboxylation, glycosylation, GPI anchor formation, hydroxylation, iodination, methylation, myristoylation, oxidation, pegylation, proteolytic processing, phosphorylation, prenylation, racemization, selenoylation, sulfation, transfer-RNA mediated addition of amino acids to proteins such as arginylation, and ubiquitination. (See, for instance, PROTEINS—STRUCTURE AND MOLECULAR PROPERTIES, 2nd Ed., T. E. Creighton, W. H. Freeman and Company, New York (1993); POSTTRANSLATIONAL COVALENT MODIFICATION OF PROTEINS, B. C. Johnson, Ed., Academic Press, New York, pgs. 1-12 (1983); Seifter et al., Meth. Enzymol. 182:626-646 (1990); Rattan et al., Ann. N.Y. Acad. Sci. 663:48-62 (1992)).

[0285] Also provided by the invention are chemically modified derivatives of the polypeptides of the invention which may provide additional advantages such as increased solubility, stability and circulating time of the polypeptide, or decreased immunogenicity (see U.S. Pat. No. 4,179,337). The chemical moieties for derivitization may be selected from water soluble polymers such as polyethylene glycol, ethylene glycol/propylene glycol copolymers, carboxymethylcellulose, dextran, polyvinyl alcohol and the like. The polypeptides may be modified at random positions within the molecule, or at predetermined positions within the molecule and may include one, two, three or more attached chemical moieties.

[0286] The polymer may be of any molecular weight, and may be branched or unbranched. For polyethylene glycol, the preferred molecular weight is between about 1 kDa and about 100 kDa (the term “about” indicating that in preparations of polyethylene glycol, some molecules will weigh more, some less, than the stated molecular weight) for ease in handling and manufacturing. Other sizes may be used, depending on the desired therapeutic profile (e.g., the duration of sustained release desired, the effects, if any on biological activity, the ease in handling, the degree or lack of antigenicity and other known effects of the polyethylene glycol to a therapeutic protein or analog). For example, the polyethylene glycol may have an average molecular weight of about 200, 500, 1000, 1500, 2000, 2500, 3000, 3500, 4000, 4500, 5000, 5500, 6000, 6500, 7000, 7500, 8000, 8500, 9000, 9500, 10,000, 10,500, 11,000, 11,500, 12,000, 12,500, 13,000, 13,500, 14,000, 14,500, 15,000, 15,500, 16,000, 16,500, 17,000, 17,500, 18,000, 18,500, 19,000, 19,500, 20,000, 25,000, 30,000, 35,000, 40,000, 45,000, 50,000, 55,000, 60,000, 65,000, 70,000, 75,000, 80,000, 85,000, 90,000, 95,000, or 100,000 kDa.

[0287] As noted above, the polyethylene glycol may have a branched structure. Branched polyethylene glycols are described, for example, in U.S. Pat. No. 5,643,575; Morpurgo et al., Appl. Biochem. Biotechnol. 56:59-72 (1996); Vorobjev et al., Nucleosides Nucleotides 18:2745-2750 (1999); and Caliceti et al., Bioconjug. Chem. 10:638-46 (1999), the disclosures of each of which are incorporated herein by reference.

[0288] The polyethylene glycol molecules (or other chemical moieties) should be attached to the protein with consideration of effects on functional or antigenic domains of the protein. There are a number of attachment methods available to those skilled in the art, such as, for example, the method disclosed in EP 0 401 384 (coupling PEG to G-CSF), herein incorporated by reference; see also Malik et al., Exp. Hematol. 20:1028-1035 (1992), reporting pegylation of GMCSF using tresyl chloride. For example, polyethylene glycol may be covalently bound through amino acid residues via a reactive group, such as a free amino or carboxyl group. Reactive groups are those to which an activated polyethylene glycol molecule may be bound. The amino acid residues having a free amino group may include lysine residues and the N-terminal amino acid residues; those having a free carboxyl group may include aspartic acid residues glutamic acid residues and the C-terminal amino acid residue. Sulfhydryl groups may also be used as a reactive group for attaching the polyethylene glycol molecules. Preferred for therapeutic purposes is attachment at an amino group, such as attachment at the N-terminus or lysine group.

[0289] As suggested above, polyethylene glycol may be attached to proteins via linkage to any of a number of amino acid residues. For example, polyethylene glycol can be linked to proteins via covalent bonds to lysine, histidine, aspartic acid, glutamic acid, or cysteine residues. One or more reaction chemistries may be employed to attach polyethylene glycol to specific amino acid residues (e.g., lysine, histidine, aspartic acid, glutamic acid, or cysteine) of the protein or to more than one type of amino acid residue (e.g., lysine, histidine, aspartic acid, glutamic acid, cysteine and combinations thereof) of the protein.

[0290] One may specifically desire proteins chemically modified at the N-terminus. Using polyethylene glycol as an illustration of the present composition, one may select from a variety of polyethylene glycol molecules (by molecular weight, branching, etc.), the proportion of polyethylene glycol molecules to protein (polypeptide) molecules in the reaction mix, the type of pegylation reaction to be performed, and the method of obtaining the selected N-terminally pegylated protein. The method of obtaining the N-terminally pegylated preparation (i.e., separating this moiety from other monopegylated moieties if necessary) may be by purification of the N-terminally pegylated material from a population of pegylated protein molecules. Selective proteins chemically modified at the N-terminus modification may be accomplished by reductive alkylation which exploits differential reactivity of different types of primary amino groups (lysine versus the N-terminal) available for derivatization in a particular protein. Under the appropriate reaction conditions, substantially selective derivatization of the protein at the N-terminus with a carbonyl group containing polymer is achieved.

[0291] As indicated above, pegylation of the proteins of the invention may be accomplished by any number of means. For example, polyethylene glycol may be attached to the protein either directly or by an intervening linker. Linkerless systems for attaching polyethylene glycol to proteins are described in Delgado et al., Crit. Rev. Thera. Drug Carrier Sys. 9:249-304 (1992); Francis et al., Intern. J. of Hematol. 68:1-18 (1998); U.S. Pat. No. 4,002,531; U.S. Pat. No. 5,349,052; WO 95/06058; and WO 98/32466, the disclosures of each of which are incorporated herein by reference.

[0292] One system for attaching polyethylene glycol directly to amino acid residues of proteins without an intervening linker employs tresylated MPEG, which is produced by the modification of monmethoxy polyethylene glycol (MPEG) using tresylchloride (ClSO₂CH₂CF₃). Upon reaction of protein with tresylated MPEG, polyethylene glycol is directly attached to amine groups of the protein. Thus, the invention includes protein-polyethylene glycol conjugates produced by reacting proteins of the invention with a polyethylene glycol molecule having a 2,2,2-trifluoreothane sulphonyl group.

[0293] Polyethylene glycol can also be attached to proteins using a number of different intervening linkers. For example, U.S. Pat. No. 5,612,460, the entire disclosure of which is incorporated herein by reference, discloses urethane linkers for connecting polyethylene glycol to proteins. Protein-polyethylene glycol conjugates wherein the polyethylene glycol is attached to the protein by a linker can also be produced by reaction of proteins with compounds such as MPEG-succinimidylsuccinate, MPEG activated with 1,1′-carbonyldiimidazole, MPEG-2,4,5-trichloropenylcarbonate, MPEG-p-nitrophenolcarbonate, and various MPEG-succinate derivatives. A number of additional polyethylene glycol derivatives and reaction chemistries for attaching polyethylene glycol to proteins are described in International Publication No. WO 98/32466, the entire disclosure of which is incorporated herein by reference. Pegylated protein products produced using the reaction chemistries set out herein are included within the scope of the invention.

[0294] The number of polyethylene glycol moieties attached to each protein of the invention (i.e., the degree of substitution) may also vary. For example, the pegylated proteins of the invention may be linked, on average, to 1, 2, 3, 4, 5, 6, 7, 8, 9, 10, 12, 15, 17, 20, or more polyethylene glycol molecules. Similarly, the average degree of substitution within ranges such as 1-3, 2-4, 3-5, 4-6, 5-7, 6-8, 8-10, 9-11, 10-12, 11-13, 12-14, 13-15, 14-16, 15-17, 16-18, 17-19, or 18-20 polyethylene glycol moieties per protein molecule. Methods for determining the degree of substitution are discussed, for example, in Delgado et al., Crit. Rev. Thera. Drug Carrier Sys. 9:249-304 (1992).

[0295] The polypeptides of the invention can be recovered and purified from chemical synthesis and recombinant cell cultures by standard methods which include, but are not limited to, ammonium sulfate or ethanol precipitation, acid extraction, anion or cation exchange chromatography, phosphocellulose chromatography, hydrophobic interaction chromatography, affinity chromatography, hydroxylapatite chromatography and lectin chromatography. Most preferably, high performance liquid chromatography (“HPLC”) is employed for purification. Well known techniques for refolding protein may be employed to regenerate active conformation when the polypeptide is denatured during isolation and/or purification.

[0296] The polypeptides of the invention may be in monomers or multimers (i.e., dimers, trimers, tetramers and higher multimers). Accordingly, the present invention relates to monomers and multimers of the polypeptides of the invention, their preparation, and compositions (preferably, Therapeutics) containing them. In specific embodiments, the polypeptides of the invention are monomers, dimers, trimers or tetramers. In additional embodiments, the multimers of the invention are at least dimers, at least trimers, or at least tetramers.

[0297] Multimers encompassed by the invention may be homomers or heteromers. As used herein, the term homomer refers to a multimer containing only polypeptides corresponding to a protein of the invention (e.g., the amino acid sequence of SEQ ID NO:Y, an amino acid sequence encoded by SEQ ID NO:X or the complement of SEQ ID NO:X, the amino acid sequence encoded by the portion of SEQ ID NO:X as defined in columns 8 and 9 of Table 2, and/or an amino acid sequence encoded by cDNA contained in ATCC Deposit No:Z (including fragments, variants, splice variants, and fusion proteins, corresponding to these as described herein)). These homomers may contain polypeptides having identical or different amino acid sequences. In a specific embodiment, a homomer of the invention is a multimer containing only polypeptides having an identical amino acid sequence. In another specific embodiment, a homomer of the invention is a multimer containing polypeptides having different amino acid sequences. In specific embodiments, the multimer of the invention is a homodimer (e.g., containing two polypeptides having identical or different amino acid sequences) or a homotrimer (e.g., containing three polypeptides having identical and/or different amino acid sequences). In additional embodiments, the homomeric multimer of the invention is at least a homodimer, at least a homotrimer, or at least a homotetramer.

[0298] As used herein, the term heteromer refers to a multimer containing one or more heterologous polypeptides (i.e., polypeptides of different proteins) in addition to the polypeptides of the invention. In a specific embodiment, the multimer of the invention is a heterodimer, a heterotrimer, or a heterotetramer. In additional embodiments, the heteromeric multimer of the invention is at least a heterodimer, at least a heterotrimer, or at least a heterotetramer.

[0299] Multimers of the invention may be the result of hydrophobic, hydrophilic, ionic and/or covalent associations and/or may be indirectly linked by, for example, liposome formation. Thus, in one embodiment, multimers of the invention, such as, for example, homodimers or homotrimers, are formed when polypeptides of the invention contact one another in solution. In another embodiment, heteromultimers of the invention, such as, for example, heterotrimers or heterotetramers, are formed when polypeptides of the invention contact antibodies to the polypeptides of the invention (including antibodies to the heterologous polypeptide sequence in a fusion protein of the invention) in solution. In other embodiments, multimers of the invention are formed by covalent associations with and/or between the polypeptides of the invention. Such covalent associations may involve one or more amino acid residues contained in the polypeptide sequence (e.g., that recited in SEQ ID NO:Y, encoded by the portion of SEQ ID NO:X as defined in columns 8 and 9 of Table 2, and/or encoded by the cDNA contained in ATCC Deposit No:Z). In one instance, the covalent associations are cross-liking between cysteine residues located within the polypeptide sequences which interact in the native (i.e., naturally occurring) polypeptide. In another instance, the covalent associations are the consequence of chemical or recombinant manipulation. Alternatively, such covalent associations may involve one or more amino acid residues contained in the heterologous polypeptide sequence in a fusion protein. In one example, covalent associations are between the heterologous sequence contained in a fusion protein of the invention (see, e.g., U.S. Pat. No. 5,478,925). In a specific example, the covalent associations are between the heterologous sequence contained in a Fc fusion protein of the invention (as described herein). In another specific example, covalent associations of fusion proteins of the invention are between heterologous polypeptide sequence from another protein that is capable of forming covalently associated multimers, such as for example, osteoprotegerin (see, e.g., International Publication NO: WO 98/49305, the contents of which are herein incorporated by reference in its entirety). In another embodiment, two or more polypeptides of the invention are joined through peptide linkers. Examples include those peptide linkers described in U.S. Pat. No. 5,073,627 (hereby incorporated by reference). Proteins comprising multiple polypeptides of the invention separated by peptide linkers may be produced using conventional recombinant DNA technology.

[0300] Another method for preparing multimer polypeptides of the invention involves use of polypeptides of the invention fused to a leucine zipper or isoleucine zipper polypeptide sequence. Leucine zipper and isoleucine zipper domains are polypeptides that promote multimerization of the proteins in which they are found. Leucine zippers were originally identified in several DNA-binding proteins (Landschulz et al., Science 240:1759, (1988)), and have since been found in a variety of different proteins. Among the known leucine zippers are naturally occurring peptides and derivatives thereof that dimerize or trimerize. Examples of leucine zipper domains suitable for producing soluble multimeric proteins of the invention are those described in PCT application WO 94/10308, hereby incorporated by reference. Recombinant fusion proteins comprising a polypeptide of the invention fused to a polypeptide sequence that dimerizes or trimerizes in solution are expressed in suitable host cells, and the resulting soluble multimeric fusion protein is recovered from the culture supernatant using techniques known in the art.

[0301] Trimeric polypeptides of the invention may offer the advantage of enhanced biological activity. Preferred leucine zipper moieties and isoleucine moieties are those that preferentially form trimers. One example is a leucine zipper derived from lung surfactant protein D (SPD), as described in Hoppe et al. (FEBS Letters 344:191, (1994)) and in U.S. patent application Ser. No. 08/446,922, hereby incorporated by reference. Other peptides derived from naturally occurring trimeric proteins may be employed in preparing trimeric polypeptides of the invention.

[0302] In another example, proteins of the invention are associated by interactions between Flag® polypeptide sequence contained in fusion proteins of the invention containing Flag® polypeptide sequence. In a further embodiment, proteins of the invention are associated by interactions between heterologous polypeptide sequence contained in Flag® fusion proteins of the invention and anti-Flag® antibody.

[0303] The multimers of the invention may be generated using chemical techniques known in the art. For example, polypeptides desired to be contained in the multimers of the invention may be chemically cross-linked using linker molecules and linker molecule length optimization techniques known in the art (see, e.g., U.S. Pat. No. 5,478,925, which is herein incorporated by reference in its entirety). Additionally, multimers of the invention may be generated using techniques known in the art to form one or more inter-molecule cross-links between the cysteine residues located within the sequence of the polypeptides desired to be contained in the multimer (see, e.g., U.S. Pat. No. 5,478,925, which is herein incorporated by reference in its entirety). Further, polypeptides of the invention may be routinely modified by the addition of cysteine or biotin to the C-terminus or N-terminus of the polypeptide and techniques known in the art may be applied to generate multimers containing one or more of these modified polypeptides (see, e.g., U.S. Pat. No. 5,478,925, which is herein incorporated by reference in its entirety). Additionally, techniques known in the art may be applied to generate liposomes containing the polypeptide components desired to be contained in the multimer of the invention (see, e.g., U.S. Pat. No. 5,478,925, which is herein incorporated by reference in its entirety).

[0304] Alternatively, multimers of the invention may be generated using genetic engineering techniques known in the art. In one embodiment, polypeptides contained in multimers of the invention are produced recombinantly using fusion protein technology described herein or otherwise known in the art (see, e.g., U.S. Pat. No. 5,478,925, which is herein incorporated by reference in its entirety). In a specific embodiment, polynucleotides coding for a homodimer of the invention are generated by ligating a polynucleotide sequence encoding a polypeptide of the invention to a sequence encoding a linker polypeptide and then further to a synthetic polynucleotide encoding the translated product of the polypeptide in the reverse orientation from the original C-terminus to the N-terminus (lacking the leader sequence) (see, e.g., U.S. Pat. No. 5,478,925, which is herein incorporated by reference in its entirety). In another embodiment, recombinant techniques described herein or otherwise known in the art are applied to generate recombinant polypeptides of the invention which contain a transmembrane domain (or hydrophobic or signal peptide) and which can be incorporated by membrane reconstitution techniques into liposomes (see, e.g., U.S. Pat. No. 5,478,925, which is herein incorporated by reference in its entirety).

[0305] Antibodies

[0306] Further polypeptides of the invention relate to antibodies and T-cell antigen receptors (TCR) which immunospecifically bind a polypeptide, polypeptide fragment, or variant of the invention (e.g., a polypeptide or fragment or variant of the amino acid sequence of SEQ ID NO:Y or a polypeptide encoded by the cDNA contained in ATCC Deposit No:Z, and/or an epitope, of the present invention) as determined by immunoassays well known in the art for assaying specific antibody-antigen binding. Antibodies of the invention include, but are not limited to, polyclonal, monoclonal, multispecific, human, humanized or chimeric antibodies, single chain antibodies, Fab fragments, F(ab′) fragments, fragments produced by a Fab expression library, anti-idiotypic (anti-Id) antibodies (including, e.g., anti-Id antibodies to antibodies of the invention), intracellularly-made antibodies (i.e., intrabodies), and epitope-binding fragments of any of the above. The term “antibody,” as used herein, refers to immunoglobulin molecules and immunologically active portions of immunoglobulin molecules, i.e., molecules that contain an antigen binding site that immunospecifically binds an antigen. The immunoglobulin molecules of the invention can be of any type (e.g., IgG, IgE, IgM, IgD, IgA and IgY), class (e.g., IgG1, IgG2, IgG3, IgG4, IgA1 and IgA2) or subclass of immunoglobulin molecule. In preferred embodiments, the immunoglobulin molecules of the invention are IgG1. In other preferred embodiments, the immunoglobulin molecules of the invention are IgG4.

[0307] Most preferably the antibodies are human antigen-binding antibody fragments of the present invention and include, but are not limited to, Fab, Fab′ and F(ab′)2, Fd, single-chain Fvs (scFv), single-chain antibodies, disulfide-linked Fvs (sdFv) and fragments comprising either a VL or VH domain. Antigen-binding antibody fragments, including single-chain antibodies, may comprise the variable region(s) alone or in combination with the entirety or a portion of the following: hinge region, CH1, CH2, and CH3 domains. Also included in the invention are antigen-binding fragments also comprising any combination of variable region(s) with a hinge region, CH1, CH2, and CH3 domains. The antibodies of the invention may be from any animal origin including birds and mammals. Preferably, the antibodies are human, murine (e.g., mouse and rat), donkey, ship rabbit, goat, guinea pig, camel, horse, or chicken. As used herein, “human” antibodies include antibodies having the amino acid sequence of a human immunoglobulin and include antibodies isolated from human immunoglobulin libraries or from animals transgenic for one or more human immunoglobulin and that do not express endogenous immunoglobulins, as described infra and, for example in, U.S. Pat. No. 5,939,598 by Kucherlapati et al.

[0308] The antibodies of the present invention may be monospecific, bispecific, trispecific or of greater multispecificity. Multispecific antibodies may be specific for different epitopes of a polypeptide of the present invention or may be specific for both a polypeptide of the present invention as well as for a heterologous epitope, such as a heterologous polypeptide or solid support material. See, e.g., PCT publications WO 93/17715; WO 92/08802; WO 91/00360; WO 92/05793; Tutt, et al., J. Immunol. 147:60-69 (1991); U.S. Pat. Nos. 4,474,893; 4,714,681; 4,925,648; 5,573,920; 5,601,819; Kostelny et al., J. Immunol. 148:1547-1553 (1992).

[0309] Antibodies of the present invention may be described or specified in terms of the epitope(s) or portion(s) of a polypeptide of the present invention which they recognize or specifically bind. The epitope(s) or polypeptide portion(s) may be specified as described herein, e.g., by N-terminal and C-terminal positions, or by size in contiguous amino acid residues, or listed in the Tables and Figures. Preferred epitopes of the invention include the predicted epitopes shown in column 7 of Table 1B.1, as well as polynucleotides that encode these epitopes. Antibodies which specifically bind any epitope or polypeptide of the present invention may also be excluded. Therefore, the present invention includes antibodies that specifically bind polypeptides of the present invention, and allows for the exclusion of the same.

[0310] Antibodies of the present invention may also be described or specified in terms of their cross-reactivity. Antibodies that do not bind any other analog, ortholog, or homolog of a polypeptide of the present invention are included. Antibodies that bind polypeptides with at least 95%, at least 90%, at least 85%, at least 80%, at least 75%, at least 70%, at least 65%, at least 60%, at least 55%, and at least 50% identity (as calculated using methods known in the art and described herein) to a polypeptide of the present invention are also included in the present invention. In specific embodiments, antibodies of the present invention cross-react with murine, rat and/or rabbit homologs of human proteins and the corresponding epitopes thereof. Antibodies that do not bind polypeptides with less than 95%, less than 90%, less than 85%, less than 80%, less than 75%, less than 70%, less than 65%, less than 60%, less than 55%, and less than 50% identity (as calculated using methods known in the art and described herein) to a polypeptide of the present invention are also included in the present invention. In a specific embodiment, the above-described cross-reactivity is with respect to any single specific antigenic or immunogenic polypeptide, or combination(s) of 2, 3, 4, 5, or more of the specific antigenic and/or immunogenic polypeptides disclosed herein. Further included in the present invention are antibodies which bind polypeptides encoded by polynucleotides which hybridize to a polynucleotide of the present invention under stringent hybridization conditions (as described herein). Antibodies of the present invention may also be described or specified in terms of their binding affinity to a polypeptide of the invention. Preferred binding affinities include those with a dissociation constant or Kd less than 5×10⁻² M, 10⁻² M, 5×10⁻³ M, 10⁻³ M, 5×10⁻⁴ M, 10⁻⁴ M, 5×10⁻⁵ M, 10⁻⁵ M, 5×10⁻⁶ M, 10⁻⁶ M, 5×10⁻⁷ M, 10⁻⁷ M, 5×10⁻⁸ M, 10⁻⁸ M, 5×10⁻⁹ M, 10⁻⁹ M, 5×10⁻¹⁰ M, 10⁻¹⁰ M, 5×10⁻¹¹ M, 10⁻¹¹ M, 5×10⁻¹² M, 10⁻¹² M, 5×10⁻¹³ M, 10⁻¹³ M, 5×10⁻¹⁴ M, 10⁻¹⁴ M, 5×10⁻¹⁵ M, or 10⁻¹⁵ M.

[0311] The invention also provides antibodies that competitively inhibit binding of an antibody to an epitope of the invention as determined by any method known in the art for determining competitive binding, for example, the immunoassays described herein. In preferred embodiments, the antibody competitively inhibits binding to the epitope by at least 95%, at least 90%, at least 85%, at least 80%, at least 75%, at least 70%, at least 60%, or at least 50%.

[0312] Antibodies of the present invention may act as agonists or antagonists of the polypeptides of the present invention. For example, the present invention includes antibodies which disrupt the receptor/ligand interactions with the polypeptides of the invention either partially or fully. Preferably, antibodies of the present invention bind an antigenic epitope disclosed herein, or a portion thereof. The invention features both receptor-specific antibodies and ligand-specific antibodies. The invention also features receptor-specific antibodies which do not prevent ligand binding but prevent receptor activation. Receptor activation (i.e., signaling) may be determined by techniques described herein or otherwise known in the art. For example, receptor activation can be determined by detecting the phosphorylation (e.g., tyrosine or serine/threonine) of the receptor or its substrate by immunoprecipitation followed by western blot analysis (for example, as described supra). In specific embodiments, antibodies are provided that inhibit ligand activity or receptor activity by at least 95%, at least 90%, at least 85%, at least 80%, at least 75%, at least 70%, at least 60%, or at least 50% of the activity in absence of the antibody.

[0313] The invention also features receptor-specific antibodies which both prevent ligand binding and receptor activation as well as antibodies that recognize the receptor-ligand complex, and, preferably, do not specifically recognize the unbound receptor or the unbound ligand. Likewise, included in the invention are neutralizing antibodies which bind the ligand and prevent binding of the ligand to the receptor, as well as antibodies which bind the ligand, thereby preventing receptor activation, but do not prevent the ligand from binding the receptor. Further included in the invention are antibodies which activate the receptor. These antibodies may act as receptor agonists, i.e., potentiate or activate either all or a subset of the biological activities of the ligand-mediated receptor activation, for example, by inducing dimerization of the receptor. The antibodies may be specified as agonists, antagonists or inverse agonists for biological activities comprising the specific biological activities of the peptides of the invention disclosed herein. The above antibody agonists can be made using methods known in the art. See, e.g., PCT publication WO 96/40281; U.S. Pat. No. 5,811,097; Deng et al., Blood 92(6):1981-1988 (1998); Chen et al., Cancer Res. 58(16):3668-3678 (1998); Harrop et al., J. Immunol. 161(4):1786-1794 (1998); Zhu et al., Cancer Res. 58(15):3209-3214 (1998); Yoon et al., J. Immunol. 160(7):3170-3179 (1998); Prat et al., J. Cell. Sci. 111(Pt2):237-247 (1998); Pitard et al., J. Immunol. Methods 205(2):177-190 (1997); Liautard et al., Cytokine 9(4):233-241 (1997); Carlson et al., J. Biol. Chem. 272(17):11295-11301 (1997); Tarman et al., Neuron 14(4):755-762 (1995); Muller et al., Structure 6(9):1153-1167 (1998); Bartunek et al., Cytokine 8(1):14-20 (1996) (which are all incorporated by reference herein in their entireties).

[0314] Antibodies of the present invention may be used, for example, to purify, detect, and target the polypeptides of the present invention, including both in vitro and in vivo diagnostic and therapeutic methods. For example, the antibodies have utility in immunoassays for qualitatively and quantitatively measuring levels of the polypeptides of the present invention in biological samples. See, e.g., Harlow et al., Antibodies: A Laboratory Manual, (Cold Spring Harbor Laboratory Press, 2nd ed. 1988); incorporated by reference herein in its entirety.

[0315] As discussed in more detail below, the antibodies of the present invention may be used either alone or in combination with other compositions. The antibodies may further be recombinantly fused to a heterologous polypeptide at the N- or C-terminus or chemically conjugated (including covalent and non-covalent conjugations) to polypeptides or other compositions. For example, antibodies of the present invention may be recombinantly fused or conjugated to molecules useful as labels in detection assays and effector molecules such as heterologous polypeptides, drugs, radionuclides, or toxins. See, e.g., PCT publications WO 92/08495; WO 91/14438; WO 89/12624; U.S. Pat. No. 5,314,995; and EP 396,387; the disclosures of which are incorporated herein by reference in their entireties.

[0316] The antibodies of the invention include derivatives that are modified, i.e, by the covalent attachment of any type of molecule to the antibody such that covalent attachment does not prevent the antibody from generating an anti-idiotypic response. For example, but not by way of limitation, the antibody derivatives include antibodies that have been modified, e.g., by glycosylation, acetylation, pegylation, phosphylation, amidation, derivatization by known protecting/blocking groups, proteolytic cleavage, linkage to a cellular ligand or other protein, etc. Any of numerous chemical modifications may be carried out by known techniques, including, but not limited to specific chemical cleavage, acetylation, formylation, metabolic synthesis of tunicamycin, etc. Additionally, the derivative may contain one or more nonclassical amino acids.

[0317] The antibodies of the present invention may be generated by any suitable method known in the art. Polyclonal antibodies to an antigen-of-interest can be produced by various procedures well known in the art. For example, a polypeptide of the invention can be administered to various host animals including, but not limited to, rabbits, mice, rats, etc. to induce the production of sera containing polyclonal antibodies specific for the antigen. Various adjuvants may be used to increase the immunological response, depending on the host species, and include but are not limited to, Freund's (complete and incomplete), mineral gels such as aluminum hydroxide, surface active substances such as lysolecithin, pluronic polyols, polyanions, peptides, oil emulsions, keyhole limpet hemocyanins, dinitrophenol, and potentially useful human adjuvants such as BCG (bacille Calmette-Guerin) and corynebacterium parvum. Such adjuvants are also well known in the art.

[0318] Monoclonal antibodies can be prepared using a wide variety of techniques known in the art including the use of hybridoma, recombinant, and phage display technologies, or a combination thereof. For example, monoclonal antibodies can be produced using hybridoma techniques including those known in the art and taught, for example, in Harlow et al., Antibodies: A Laboratory Manual, (Cold Spring Harbor Laboratory Press, 2nd ed. 1988); Hammerling, et al., in: Monoclonal Antibodies and T-Cell Hybridomas 563-681 (Elsevier, N.Y., 1981) (said references incorporated by reference in their entireties). The term “monoclonal antibody” as used herein is not limited to antibodies produced through hybridoma technology. The term “monoclonal antibody” refers to an antibody that is derived from a single clone, including any eukaryotic, prokaryotic, or phage clone, and not the method by which it is produced.

[0319] Methods for producing and screening for specific antibodies using hybridoma technology are routine and well known in the art and are discussed in detail in the Examples. In a non-limiting example, mice can be immunized with a polypeptide of the invention or a cell expressing such peptide. Once an immune response is detected, e.g., antibodies specific for the antigen are detected in the mouse serum, the mouse spleen is harvested and splenocytes isolated. The splenocytes are then fused by well known techniques to any suitable myeloma cells, for example cells from cell line SP20 available from the ATCC. Hybridomas are selected and cloned by limited dilution. The hybridoma clones are then assayed by methods known in the art for cells that secrete antibodies capable of binding a polypeptide of the invention. Ascites fluid, which generally contains high levels of antibodies, can be generated by immunizing mice with positive hybridoma clones.

[0320] Accordingly, the present invention provides methods of generating monoclonal antibodies as well as antibodies produced by the method comprising culturing a hybridoma cell secreting an antibody of the invention wherein, preferably, the hybridoma is generated by fusing splenocytes isolated from a mouse immunized with an antigen of the invention with myeloma cells and then screening the hybridomas resulting from the fusion for hybridoma clones that secrete an antibody able to bind a polypeptide of the invention.

[0321] Another well known method for producing both polyclonal and monoclonal human B cell lines is transformation using Epstein Barr Virus (EBV). Protocols for generating EBV-transformed B cell lines are commonly known in the art, such as, for example, the protocol outlined in Chapter 7.22 of Current Protocols in Immunology, Coligan et al., Eds., 1994, John Wiley & Sons, NY, which is hereby incorporated in its entirety by reference. The source of B cells for transformation is commonly human peripheral blood, but B cells for transformation may also be derived from other sources including, but not limited to, lymph nodes, tonsil, spleen, tumor tissue, and infected tissues. Tissues are generally made into single cell suspensions prior to EBV transformation. Additionally, steps may be taken to either physically remove or inactivate T cells (e.g., by treatment with cyclosporin A) in B cell-containing samples, because T cells from individuals seropositive for anti-EBV antibodies can suppress B cell immortalization by EBV.

[0322] In general, the sample containing human B cells is innoculated with EBV, and cultured for 34 weeks. A typical source of EBV is the culture supernatant of the B95-8 cell line (ATCC #VR-1492). Physical signs of EBV transformation can generally be seen towards the end of the 3-4 week culture period. By phase-contrast microscopy, transformed cells may appear large, clear, hairy and tend to aggregate in tight clusters of cells. Initially, EBV lines are generally polyclonal. However, over prolonged periods of cell cultures, EBV lines may become monoclonal or polyclonal as a result of the selective outgrowth of particular B cell clones. Alternatively, polyclonal EBV transformed lines may be subcloned (e.g., by limiting dilution culture) or fused with a suitable fusion partner and plated at limiting dilution to obtain monoclonal B cell lines. Suitable fusion partners for EBV transformed cell lines include mouse myeloma cell lines (e.g., SP2/0, X63-Ag8.653), heteromyeloma cell lines (human x mouse; e.g, SPAM-8, SBC-H20, and CB-F7), and human cell lines (e.g., GM 1500, SKO-007, RPMI 8226, and KR-4). Thus, the present invention also provides a method of generating polyclonal or monoclonal human antibodies against polypeptides of the invention or fragments thereof, comprising EBV-transformation of human B cells.

[0323] Antibody fragments which recognize specific epitopes may be generated by known techniques. For example, Fab and F(ab′)2 fragments of the invention may be produced by proteolytic cleavage of immunoglobulin molecules, using enzymes such as papain (to produce Fab fragments) or pepsin (to produce F(ab′)2 fragments). F(ab′)2 fragments contain the variable region, the light chain constant region and the CH1 domain of the heavy chain.

[0324] For example, the antibodies of the present invention can also be generated using various phage display methods known in the art. In phage display methods, functional antibody domains are displayed on the surface of phage particles which carry the polynucleotide sequences encoding them. In a particular embodiment, such phage can be utilized to display antigen binding domains expressed from a repertoire or combinatorial antibody library (e.g., human or murine). Phage expressing an antigen binding domain that binds the antigen of interest can be selected or identified with antigen, e.g., using labeled antigen or antigen bound or captured to a solid surface or bead. Phage used in these methods are typically filamentous phage including fd and M13 binding domains expressed from phage with Fab, Fv or disulfide stabilized Fv antibody domains recombinantly fused to either the phage gene III or gene VIII protein. Examples of phage display methods that can be used to make the antibodies of the present invention include those disclosed in Brinkman et al., J. Immunol. Methods 182:41-50 (1995); Ames et al., J. Immunol. Methods 184:177-186 (1995); Kettleborough et al., Eur. J. Immunol. 24:952-958 (1994); Persic et al., Gene 187 9-18 (1997); Burton et al., Advances in Immunology 57:191-280 (1994); PCT application No. PCT/GB91/01134; PCT publications WO 90/02809; WO 91/10737; WO 92/01047; WO 92/18619; WO 93/11236; WO 95/15982; WO 95/20401; and U.S. Pat. Nos. 5,698,426; 5,223,409; 5,403,484; 5,580,717; 5,427,908; 5,750,753; 5,821,047; 5,571,698; 5,427,908; 5,516,637; 5,780,225; 5,658,727; 5,733,743 and 5,969,108; each of which is incorporated herein by reference in its entirety.

[0325] As described in the above references, after phage selection, the antibody coding regions from the phage can be isolated and used to generate whole antibodies, including human antibodies, or any other desired antigen binding fragment, and expressed in any desired host, including mammalian cells, insect cells, plant cells, yeast, and bacteria, e.g., as described in detail below. For example, techniques to recombinantly produce Fab, Fab′ and F(ab′)2 fragments can also be employed using methods known in the art such as those disclosed in PCT publication WO 92/22324; Mullinax et al., BioTechniques 12(6):864-869 (1992); and Sawai et al., AJRI 34:26-34 (1995); and Better et al., Science 240:1041-1043 (1988) (said references incorporated by reference in their entireties).

[0326] Examples of techniques which can be used to produce single-chain Fvs and antibodies include those described in U.S. Pat. Nos. 4,946,778 and 5,258,498; Huston et al., Methods in Enzymology 203:46-88 (1991); Shu et al., PNAS 90:7995-7999 (1993); and Skerra et al., Science 240:1038-1040 (1988). For some uses, including in vivo use of antibodies in humans and in vitro detection assays, it may be preferable to use chimeric, humanized, or human antibodies. A chimeric antibody is a molecule in which different portions of the antibody are derived from different animal species, such as antibodies having a variable region derived from a murine monoclonal antibody and a human immunoglobulin constant region. Methods for producing chimeric antibodies are known in the art. See e.g., Morrison, Science 229:1202 (1985); Oi et al., BioTechniques 4:214 (1986); Gillies et al., (1989) J. Immunol. Methods 125:191-202; U.S. Pat. Nos. 5,807,715; 4,816,567; and 4,816,397, which are incorporated herein by reference in their entirety. Humanized antibodies are antibody molecules from non-human species antibody that binds the desired antigen having one or more complementarity determining regions (CDRs) from the non-human species and a framework regions from a human immunoglobulin molecule. Often, framework residues in the human framework regions will be substituted with the corresponding residue from the CDR donor antibody to alter, preferably improve, antigen binding. These framework substitutions are identified by methods well known in the art, e.g., by modeling of the interactions of the CDR and framework residues to identify framework residues important for antigen binding and sequence comparison to identify unusual framework residues at particular positions. (See, e.g., Queen et al., U.S. Pat. No. 5,585,089; Riechmann et al., Nature 332:323 (1988), which are incorporated herein by reference in their entireties.) Antibodies can be humanized using a variety of techniques known in the art including, for example, CDR-grafting (EP 239,400; PCT publication WO 91/09967; U.S. Pat. Nos. 5,225,539; 5,530,101; and 5,585,089), veneering or resurfacing (EP 592,106; EP 519,596; Padlan, Molecular Immunology 28(4/5):489-498 (1991); Studnicka et al., Protein Engineering 7(6):805-814 (1994); Roguska. et al., PNAS 91:969-973 (1994)), and chain shuffling (U.S. Pat. No. 5,565,332).

[0327] Completely human antibodies are particularly desirable for therapeutic treatment of human patients. Human antibodies can be made by a variety of methods known in the art including phage display methods described above using antibody libraries derived from human immunoglobulin sequences. See also, U.S. Pat. Nos. 4,444,887 and 4,716,111; and PCT publications WO 98/46645, WO 98/50433, WO 98/24893, WO 98/16654, WO 96/34096, WO 96/33735, and WO 91/10741; each of which is incorporated herein by reference in its entirety.

[0328] Human antibodies can also be produced using transgenic mice which are incapable of expressing functional endogenous immunoglobulins, but which can express human immunoglobulin genes. For example, the human heavy and light chain immunoglobulin gene complexes may be introduced randomly or by homologous recombination into mouse embryonic stem cells. Alternatively, the human variable region, constant region, and diversity region may be introduced into mouse embryonic stem cells in addition to the human heavy and light chain genes. The mouse heavy and light chain immunoglobulin genes may be rendered non-functional separately or simultaneously with the introduction of human immunoglobulin loci by homologous recombination. In particular, homozygous deletion of the JH region prevents endogenous antibody production. The modified embryonic stem cells are expanded and microinjected into blastocysts to produce chimeric mice. The chimeric mice are then bred to produce homozygous offspring which express human antibodies. The transgenic mice are immunized in the normal fashion with a selected antigen, e.g., all or a portion of a polypeptide of the invention. Monoclonal antibodies directed against the antigen can be obtained from the immunized, transgenic mice using conventional hybridoma technology. The human immunoglobulin transgenes harbored by the transgenic mice rearrange during B cell differentiation, and subsequently undergo class switching and somatic mutation. Thus, using such a technique, it is possible to produce therapeutically useful IgG, IgA, IgM and IgE antibodies. For an overview of this technology for producing human antibodies, see Lonberg and Huszar, Int. Rev. Immunol. 13:65-93 (1995). For a detailed discussion of this technology for producing human antibodies and human monoclonal antibodies and protocols for producing such antibodies, see, e.g., PCT publications WO 98/24893; WO 92/01047; WO 96/34096; WO 96/33735; European Patent No. 0 598 877; U.S. Pat. Nos. 5,413,923; 5,625,126; 5,633,425; 5,569,825; 5,661,016; 5,545,806; 5,814,318; 5,885,793; 5,916,771; 5,939,598; 6,075,181; and 6,114,598, which are incorporated by reference herein in their entirety. In addition, companies such as Abgenix, Inc. (Freemont, Calif.) and Genpharm (San Jose, Calif.) can be engaged to provide human antibodies directed against a selected antigen using technology similar to that described above.

[0329] Completely human antibodies which recognize a selected epitope can be generated using a technique referred to as “guided selection.” In this approach a selected non-human monoclonal antibody, e.g., a mouse antibody, is used to guide the selection of a completely human antibody recognizing the same epitope. (Jespers et al., Bio/technology 12:899-903 (1988)).

[0330] Further, antibodies to the polypeptides of the invention can, in turn, be utilized to generate anti-idiotype antibodies that “mimic” polypeptides of the invention using techniques well known to those skilled in the art. (See, e.g., Greenspan & Bona, FASEB J. 7(5):437-444; (1989) and Nissinoff, J. Immunol. 147(8):2429-2438 (1991)). For example, antibodies which bind to and competitively inhibit polypeptide multimerization and/or binding of a polypeptide of the invention to a ligand can be used to generate anti-idiotypes that “mimic” the polypeptide multimerization and/or binding domain and, as a consequence, bind to and neutralize polypeptide and/or its ligand. Such neutralizing anti-idiotypes or Fab fragments of such anti-idiotypes can be used in therapeutic regimens to neutralize polypeptide ligand(s)/receptor(s). For example, such anti-idiotypic antibodies can be used to bind a polypeptide of the invention and/or to bind its ligand(s)/receptor(s), and thereby block its biological activity. Alternatively, antibodies which bind to and enhance polypeptide multimerization and/or binding, and/or receptor/ligand multimerization, binding and/or signaling can be used to generate anti-idiotypes that function as agonists of a polypeptide of the invention and/or its ligand/receptor. Such agonistic anti-idiotypes or Fab fragments of such anti-idiotypes can be used in therapeutic regimens as agonists of the polypeptides of the invention or its ligand(s)/receptor(s). For example, such anti-idiotypic antibodies can be used to bind a polypeptide of the invention and/or to bind its ligand(s)/receptor(s), and thereby promote or enhance its biological activity.

[0331] Intrabodies of the invention can be produced using methods known in the art, such as those disclosed and reviewed in Chen et al., Hum. Gene Ther. 5:595-601 (1994); Marasco, W. A., Gene Ther. 4:11-15 (1997); Rondon and Marasco, Annu. Rev. Microbiol. 51:257-283 (1997); Proba et al., J. Mol. Biol. 275:245-253 (1998); Cohen et al., Oncogene 17:2445-2456 (1998); Ohage and Steipe, J. Mol. Biol. 291:1119-1128 (1999); Ohage et al., J. Mol. Biol. 291:1129-1134 (1999); Wirtz and Steipe, Protein Sci. 8:2245-2250 (1999); Zhu et al., J. Immunol. Methods 231:207-222 (1999); and references cited therein.

[0332] Polynucleotides Encoding Antibodies

[0333] The invention further provides polynucleotides comprising a nucleotide sequence encoding an antibody of the invention and fragments thereof. The invention also encompasses polynucleotides that hybridize under stringent or alternatively, under lower stringency hybridization conditions, e.g., as defined supra, to polynucleotides that encode an antibody, preferably, that specifically binds to a polypeptide of the invention, preferably, an antibody that binds to a polypeptide having the amino acid sequence of SEQ ID NO:Y, to a polypeptide encoded by a portion of SEQ ID NO:X as defined in columns 8 and 9 of Table 2, and/or to a polypeptide encoded by the cDNA contained in ATCC Deposit No:Z.

[0334] The polynucleotides may be obtained, and the nucleotide sequence of the polynucleotides determined, by any method known in the art. For example, if the nucleotide sequence of the antibody is known, a polynucleotide encoding the antibody may be assembled from chemically synthesized oligonucleotides (e.g., as described in Kutmeier et al., BioTechniques 17:242 (1994)), which, briefly, involves the synthesis of overlapping oligonucleotides containing portions of the sequence encoding the antibody, annealing and ligating of those oligonucleotides, and then amplification of the ligated oligonucleotides by PCR.

[0335] Alternatively, a polynucleotide encoding an antibody may be generated from nucleic acid from a suitable source. If a clone containing a nucleic acid encoding a particular antibody is not available, but the sequence of the antibody molecule is known, a nucleic acid encoding the immunoglobulin may be chemically synthesized or obtained from a suitable source (e.g., an antibody cDNA library, or a cDNA library generated from, or nucleic acid, preferably poly A+ RNA, isolated from, any tissue or cells expressing the antibody, such as hybridoma cells selected to express an antibody of the invention) by PCR amplification using synthetic primers hybridizable to the 3′ and 5′ ends of the sequence or by cloning using an oligonucleotide probe specific for the particular gene sequence to identify, e.g., a cDNA clone from a cDNA library that encodes the antibody. Amplified nucleic acids generated by PCR may then be cloned into replicable cloning vectors using any method well known in the art.

[0336] Once the nucleotide sequence and corresponding amino acid sequence of the antibody is determined, the nucleotide sequence of the antibody may be manipulated using methods well known in the art for the manipulation of nucleotide sequences, e.g., recombinant DNA techniques, site directed mutagenesis, PCR, etc. (see, for example, the techniques described in Sambrook et al., 1990, Molecular Cloning, A Laboratory Manual, 2d Ed., Cold Spring Harbor Laboratory, Cold Spring Harbor, N.Y. and Ausubel et al., eds., 1998, Current Protocols in Molecular Biology, John Wiley & Sons, NY, which are both incorporated by reference herein in their entireties), to generate antibodies having a different amino acid sequence, for example to create amino acid substitutions, deletions, and/or insertions.

[0337] In a specific embodiment, the amino acid sequence of the heavy and/or light chain variable domains may be inspected to identify the sequences of the complementarity determining regions (CDRs) by methods that are well know in the art, e.g., by comparison to known amino acid sequences of other heavy and light chain variable regions to determine the regions of sequence hypervariability. Using routine recombinant DNA techniques, one or more of the CDRs may be inserted within framework regions, e.g., into human framework regions to humanize a non-human antibody, as described supra. The framework regions may be naturally occurring or consensus framework regions, and preferably human framework regions (see, e.g., Chothia et al., J. Mol. Biol. 278: 457-479 (1998) for a listing of human framework regions). Preferably, the polynucleotide generated by the combination of the framework regions and CDRs encodes an antibody that specifically binds a polypeptide of the invention. Preferably, as discussed supra, one or more amino acid substitutions may be made within the framework regions, and, preferably, the amino acid substitutions improve binding of the antibody to its antigen. Additionally, such methods may be used to make amino acid substitutions or deletions of one or more variable region cysteine residues participating in an intrachain disulfide bond to generate antibody molecules lacking one or more intrachain disulfide bonds. Other alterations to the polynucleotide are encompassed by the present invention and within the skill of the art.

[0338] In addition, techniques developed for the production of “chimeric antibodies” (Morrison et al., Proc. Natl. Acad. Sci. 81:851-855 (1984); Neuberger et al., Nature 312:604-608 (1984); Takeda et al., Nature 314:452-454 (1985)) by splicing genes from a mouse antibody molecule of appropriate antigen specificity together with genes from a human antibody molecule of appropriate biological activity can be used. As described supra, a chimeric antibody is a molecule in which different portions are derived from different animal, species, such as those having a variable region derived from a murine mAb and a human immunoglobulin constant region, e.g., humanized antibodies.

[0339] Alternatively, techniques described for the production of single chain antibodies (U.S. Pat. No. 4,946,778; Bird, Science 242:423-42 (1988); Huston et al., Proc. Natl. Acad. Sci. USA 85:5879-5883 (1988); and Ward et al., Nature 334:544-54 (1989)) can be adapted to produce single chain antibodies. Single chain antibodies are formed by linking the heavy and light chain fragments of the Fv region via an amino acid bridge, resulting in a single chain polypeptide. Techniques for the assembly of functional Fv fragments in E. coli may also be used (Skerra et al., Science 242:1038-1041 (1988)).

[0340] Methods of Producing Antibodies

[0341] The antibodies of the invention can be produced by any method known in the art for the synthesis of antibodies, in particular, by chemical synthesis or preferably, by recombinant expression techniques. Methods of producing antibodies include, but are not limited to, hybridoma technology, EBV transformation, and other methods discussed herein as well as through the use recombinant DNA technology, as discussed below.

[0342] Recombinant expression of an antibody of the invention, or fragment, derivative or analog thereof, (e.g., a heavy or light chain of an antibody of the invention or a single chain antibody of the invention), requires construction of an expression vector containing a polynucleotide that encodes the antibody. Once a polynucleotide encoding an antibody molecule or a heavy or light chain of an antibody, or portion thereof (preferably containing the heavy or light chain variable domain), of the invention has been obtained, the vector for the production of the antibody molecule may be produced by recombinant DNA technology using techniques well known in the art. Thus, methods for preparing a protein by expressing a polynucleotide containing an antibody encoding nucleotide sequence are described herein. Methods which are well known to those skilled in the art can be used to construct expression vectors containing antibody coding sequences and appropriate transcriptional and translational control signals. These methods include, for example, in vitro recombinant DNA techniques, synthetic techniques, and in vivo genetic recombination. The invention, thus, provides replicable vectors comprising a nucleotide sequence encoding an antibody molecule of the invention, or a heavy or light chain thereof, or a heavy or light chain variable domain, operably linked to a promoter. Such vectors may include the nucleotide sequence encoding the constant region of the antibody molecule (see, e.g., PCT Publication WO 86/05807; PCT Publication WO 89/01036; and U.S. Pat. No. 5,122,464) and the variable domain of the antibody may be cloned into such a vector for expression of the entire heavy or light chain.

[0343] The expression vector is transferred to a host cell by conventional techniques and the transfected cells are then cultured by conventional techniques to produce an antibody of the invention. Thus, the invention includes host cells containing a polynucleotide encoding an antibody of the invention, or a heavy or light chain thereof, or a single chain antibody of the invention, operably linked to a heterologous promoter. In preferred embodiments for the expression of double-chained antibodies, vectors encoding both the heavy and light chains may be co-expressed in the host cell for expression of the entire immunoglobulin molecule, as detailed below.

[0344] A variety of host-expression vector systems may be utilized to express the antibody molecules of the invention. Such host-expression systems represent vehicles by which the coding sequences of interest may be produced and subsequently purified, but also represent cells which may, when transformed or transfected with the appropriate nucleotide coding sequences, express an antibody molecule of the invention in situ. These include but are not limited to microorganisms such as bacteria (e.g., E. coli, B. subtilis) transformed with recombinant bacteriophage DNA, plasmid DNA or cosmid DNA expression vectors containing antibody coding sequences; yeast (e.g., Saccharomyces, Pichia) transformed with recombinant yeast expression vectors containing antibody coding sequences; insect cell systems infected with recombinant virus expression vectors (e.g., baculovirus) containing antibody coding sequences; plant cell systems infected with recombinant virus expression vectors (e.g., cauliflower mosaic virus, CaMV; tobacco mosaic virus, TMV) or transformed with recombinant plasmid expression vectors (e.g., Ti plasmid) containing antibody coding sequences; or mammalian cell systems (e.g., COS, CHO, BHK, 293, 3T3 cells) harboring recombinant expression constructs containing promoters derived from the genome of mammalian cells (e.g., metallothionein promoter) or from mammalian viruses (e.g., the adenovirus late promoter; the vaccinia virus 7.5K promoter). Preferably, bacterial cells such as Escherichia coli, and more preferably, eukaryotic cells, especially for the expression of whole recombinant antibody molecule, are used for the expression of a recombinant antibody molecule. For example, mammalian cells such as Chinese hamster ovary cells (CHO), in conjunction with a vector such as the major intermediate early gene promoter element from human cytomegalovirus is an effective expression system for antibodies (Foecking et al., Gene 45:101 (1986); Cockett et al., Bio/Technology 8:2 (1990)).

[0345] In bacterial systems, a number of expression vectors may be advantageously selected depending upon the use intended for the antibody molecule being expressed. For example, when a large quantity of such a protein is to be produced, for the generation of pharmaceutical compositions of an antibody molecule, vectors which direct the expression of high levels of fusion protein products that are readily purified may be desirable. Such vectors include, but are not limited, to the E. coli expression vector pUR278 (Ruther et al., EMBO J. 2:1791 (1983)), in which the antibody coding sequence may be ligated individually into the vector in frame with the lac Z coding region so that a fusion protein is produced; pIN vectors (Inouye & Inouye, Nucleic Acids Res. 13:3101-3109 (1985); Van Heeke & Schuster, J. Biol. Chem. 24:5503-5509 (1989)); and the like. pGEX vectors may also be used to express foreign polypeptides as fusion proteins with glutathione S-transferase (GST). In general, such fusion proteins are soluble and can easily be purified from lysed cells by adsorption and binding to matrix glutathione-agarose beads followed by elution in the presence of free glutathione. The pGEX vectors are designed to include thrombin or factor Xa protease cleavage sites so that the cloned target gene product can be released from the GST moiety.

[0346] In an insect system, Autographa californica nuclear polyhedrosis virus (AcNPV) is used as a vector to express foreign genes. The virus grows in Spodoptera frugiperda cells. The antibody coding sequence may be cloned individually into non-essential regions (for example the polyhedrin gene) of the virus and placed under control of an AcNPV promoter (for example the polyhedrin promoter).

[0347] In mammalian host cells, a number of viral-based expression systems may be utilized. In cases where an adenovirus is used as an expression vector, the antibody coding sequence of interest may be ligated to an adenovirus transcription/translation control complex, e.g., the late promoter and tripartite leader sequence. This chimeric gene may then be inserted in the adenovirus genome by in vitro or in vivo recombination. Insertion in a non-essential region of the viral genome (e.g., region E1 or E3) will result in a recombinant virus that is viable and capable of expressing the antibody molecule in infected hosts. (e.g., see Logan & Shenk, Proc. Natl. Acad. Sci. USA 81:355-359 (1984)). Specific initiation signals may also be required for efficient translation of inserted antibody coding sequences. These signals include the ATG initiation codon and adjacent sequences. Furthermore, the initiation codon must be in phase with the reading frame of the desired coding sequence to ensure translation of the entire insert. These exogenous translational control signals and initiation codons can be of a variety of origins, both natural and synthetic. The efficiency of expression may be enhanced by the inclusion of appropriate transcription enhancer elements, transcription terminators, etc. (see Bittner et al., Methods in Enzymol. 153:51-544 (1987)).

[0348] In addition, a host cell strain may be chosen which modulates the expression of the inserted sequences, or modifies and processes the gene product in the specific fashion desired. Such modifications (e.g., glycosylation) and processing (e.g., cleavage) of protein products may be important for the function of the protein. Different host cells have characteristic and specific mechanisms for the post-translational processing and modification of proteins and gene products. Appropriate cell lines or host systems can be chosen to ensure the correct modification and processing of the foreign protein expressed. To this end, eukaryotic host cells which possess the cellular machinery for proper processing of the primary transcript, glycosylation, and phosphorylation of the gene product may be used. Such mammalian host cells include but are not limited to CHO, VERY, BHK, Hela, COS, MDCK, 293, 3T3, W138, and in particular, breast cancer cell lines such as, for example, BT483, Hs578T, HTB2, BT20 and T47D, and normal mammary gland cell line such as, for example, CRL7030 and Hs578Bst.

[0349] For long-term, high-yield production of recombinant proteins, stable expression is preferred. For example, cell lines which stably express the antibody molecule may be engineered. Rather than using expression vectors which contain viral origins of replication, host cells can be transformed with DNA controlled by appropriate expression control elements (e.g., promoter, enhancer, sequences, transcription terminators, polyadenylation sites, etc.), and a selectable marker. Following the introduction of the foreign DNA, engineered cells may be allowed to grow for 1-2 days in an enriched media, and then are switched to a selective media. The selectable marker in the recombinant plasmid confers resistance to the selection and allows cells to stably integrate the plasmid into their chromosomes and grow to form foci which in turn can be cloned and expanded into cell lines. This method may advantageously be used to engineer cell lines which express the antibody molecule. Such engineered cell lines may be particularly useful in screening and evaluation of compounds that interact directly or indirectly with the antibody molecule.

[0350] A number of selection systems may be used, including but not limited to the herpes simplex virus thymidine kinase (Wigler et al., Cell 11:223 (1977)), hypoxanthine-guanine phosphoribosyltransferase (Szybalska & Szybalski, Proc. Natl. Acad. Sci. USA 48:202 (1992)), and adenine phosphoribosyltransferase (Lowy et al., Cell 22:817 (1980)) genes can be employed in tk-, hgprt- or aprt-cells, respectively. Also, antimetabolite resistance can be used as the basis of selection for the following genes: dhfr, which confers resistance to methotrexate (Wigler et al., Natl. Acad. Sci. USA 77:357 (1980); OHare et al., Proc. Natl. Acad. Sci. USA 78:1527 (1981)); gpt, which confers resistance to mycophenolic acid (Mulligan & Berg, Proc. Natl. Acad. Sci. USA 78:2072 (1981)); neo, which confers resistance to the aminoglycoside G418 Clinical Pharmacy 12:488-505; Wu and Wu, Biotherapy 3:87-95 (1991); Tolstoshev, Ann. Rev. Pharmacol. Toxicol. 32:573-596 (1993); Mulligan, Science 260:926-932 (1993); and Morgan and Anderson, Ann. Rev. Biochem. 62:191-217 (1993); May, 1993, TIB TECH 11(5):155-215 (1993)); and hygro, which confers resistance to hygromycin (Santerre et al., Gene 30:147 (1984)). Methods commonly known in the art of recombinant DNA technology may be routinely applied to select the desired recombinant clone, and such methods are described, for example, in Ausubel et al. (eds.), Current Protocols in Molecular Biology, John Wiley & Sons, NY (1993); Kriegler, Gene Transfer and Expression, A Laboratory Manual, Stockton Press, NY (1990); and in Chapters 12 and 13, Dracopoli et al. (eds), Current Protocols in Human Genetics, John Wiley & Sons, NY (1994); Colberre-Garapin et al., J. Mol. Biol. 150:1 (1981), which are incorporated by reference herein in their entireties.

[0351] The expression levels of an antibody molecule can be increased by vector amplification (for a review, see Bebbington and Hentschel, The use of vectors based on gene amplification for the expression of cloned genes in mammalian cells in DNA cloning, Vol. 3. (Academic Press, New York, 1987)). When a marker in the vector system expressing antibody is amplifiable, increase in the level of inhibitor present in culture of host cell will increase the number of copies of the marker gene. Since the amplified region is associated with the antibody gene, production of the antibody will also increase (Crouse et al., Mol. Cell. Biol. 3:257 (1983)).

[0352] Vectors which use glutamine synthase (GS) or DHFR as the selectable markers can be amplified in the presence of the drugs methionine sulphoximine or methotrexate, respectively. An advantage of glutamine synthase based vectors are the availabilty of cell lines (e.g., the murine myeloma cell line, NS0) which are glutamine synthase negative. Glutamine synthase expression systems can also function in glutamine synthase expressing cells (e.g. Chinese Hamster Ovary (CHO) cells) by providing additional inhibitor to prevent the functioning of the endogenous gene. A glutamine synthase expression system and components thereof are detailed in PCT publications: WO87/04462; WO86/05807; WO89/01036; WO89/10404; and WO91/06657 which are incorporated in their entireties by reference herein. Additionally, glutamine synthase expression vectors that may be used according to the present invention are commercially available from suplliers, including, for example Lonza Biologics, Inc. (Portsmouth, N.H.). Expression and production of monoclonal antibodies using a GS expression system in murine myeloma cells is described in Bebbington et al., Bio/technology 10:169(1992) and in Biblia and Robinson Biotechnol. Prog. 11:1 (1995) which are incorporated in their entirities by reference herein.

[0353] The host cell may be co-transfected with two expression vectors of the invention, the first vector encoding a heavy chain derived polypeptide and the second vector encoding a light chain derived polypeptide. The two vectors may contain identical selectable markers which enable equal expression of heavy and light chain polypeptides. Alternatively, a single vector may be used which encodes, and is capable of expressing, both heavy and light chain polypeptides. In such situations, the light chain should be placed before the heavy chain to avoid an excess of toxic free heavy chain (Proudfoot, Nature 322:52 (1986); Kohler, Proc. Natl. Acad. Sci. USA 77:2197 (1980)). The coding sequences for the heavy and light chains may comprise cDNA or genomic DNA.

[0354] Once an antibody molecule of the invention has been produced by an animal, chemically synthesized, or recombinantly expressed, it may be purified by any method known in the art for purification of an immunoglobulin molecule, for example, by chromatography (e.g., ion exchange, affinity, particularly by affinity for the specific antigen after Protein A, and sizing column chromatography), centrifugation, differential solubility, or by any other standard technique for the purification of proteins. In addition, the antibodies of the present invention or fragments thereof can be fused to heterologous polypeptide sequences described herein or otherwise known in the art, to facilitate purification.

[0355] The present invention encompasses antibodies recombinantly fused or chemically conjugated (including both covalently and non-covalently conjugations) to a polypeptide (or portion thereof, preferably at least 10, 20, 30, 40, 50, 60, 70, 80, 90 or 100 amino acids of the polypeptide) of the present invention to generate fusion proteins. The fusion does not necessarily need to be direct, but may occur through linker sequences. The antibodies may be specific for antigens other than polypeptides (or portion thereof, preferably at least 10, 20, 30; 40, 50, 60, 70, 80, 90 or 100 amino acids of the polypeptide) of the present invention. For example, antibodies may be used to target the polypeptides of the present invention to particular cell types, either in vitro or in vivo, by fusing or conjugating the polypeptides of the present invention to antibodies specific for particular cell surface receptors. Antibodies fused or conjugated to the polypeptides of the present invention may also be used in in vitro immunoassays and purification methods using methods known in the art. See e.g., Harbor et al., supra, and PCT publication WO 93/21232; EP 439,095; Naramura et al., Immunol. Lett 39:91-99 (1994); U.S. Pat. No. 5,474,981; Gillies et al., PNAS 89:1428-1432 (1992); Fell et al., J. Immunol. 146:2446-2452 (1991), which are incorporated by reference in their entireties.

[0356] The present invention further includes compositions comprising the polypeptides of the present invention fused or conjugated to antibody domains other than the variable regions. For example, the polypeptides of the present invention may be fused or conjugated to an antibody Fc region, or portion thereof. The antibody portion fused to a polypeptide of the present invention may comprise the constant region, hinge region, CH1 domain, CH2 domain, and CH3 domain or any combination of whole domains or portions thereof. The polypeptides may also be fused or conjugated to the above antibody portions to form multimers. For example, Fc portions fused to the polypeptides of the present invention can form dimers through disulfide bonding between the Fc portions. Higher multimeric forms can be made by fusing the polypeptides to portions of IgA and IgM. Methods for fusing or conjugating the polypeptides of the present invention to antibody portions are known in the art. See, e.g., U.S. Pat. Nos. 5,336,603; 5,622,929; 5,359,046; 5,349,053; 5,447,851; 5,112,946; EP 307,434; EP 367,166; PCT publications WO 96/04388; WO 91/06570; Ashkenazi et al., Proc. Natl. Acad. Sci. USA 88:10535-10539 (1991); Zheng et al., J. Immunol. 154:5590-5600 (1995); and Vil et al., Proc. Natl. Acad. Sci. USA 89:11337-11341 (1992) (said references incorporated by reference in their entireties).

[0357] As discussed, supra, the polypeptides corresponding to a polypeptide, polypeptide fragment, or a variant of SEQ ID NO:Y may be fused or conjugated to the above antibody portions to increase the in vivo half life of the polypeptides or for use in immunoassays using methods known in the art. Further, the polypeptides corresponding to SEQ ID NO:Y may be fused or conjugated to the above antibody portions to facilitate purification. One reported example describes chimeric proteins consisting of the first two domains of the human CD4-polypeptide and various domains of the constant regions of the heavy or light chains of mammalian immunoglobulins. See EP 394,827; and Traunecker et al., Nature 331:84-86 (1988). The polypeptides of the present invention fused or conjugated to an antibody having disulfide-linked dimeric structures (due to the IgG) may also be more efficient in binding and neutralizing other molecules, than the monomeric secreted protein or protein fragment alone. See, for example, Fountoulakis et al., J. Biochem. 270:3958-3964 (1995). In many cases, the Fc part in a fusion protein is beneficial in therapy and diagnosis, and thus can result in, for example, improved pharmacokinetic properties. See, for example, EP A 232,262. Alternatively, deleting the Fc part after the fusion protein has been expressed, detected, and purified, would be desired. For example, the Fc portion may hinder therapy and diagnosis if the fusion protein is used as an antigen for immunizations. In drug discovery, for example, human proteins, such as hIL-5, have been fused with Fc portions for the purpose of high-throughput screening assays to identify antagonists of hIL-5. (See, Bennett et al., J. Molecular Recognition 8:52-58 (1995); Johanson et al., J. Biol. Chem. 270:9459-9471 (1995)).

[0358] Moreover, the antibodies or fragments thereof of the present invention can be fused to marker sequences, such as a peptide to facilitate purification. In preferred embodiments, the marker amino acid sequence is a hexa-histidine peptide, such as the tag provided in a pQE vector (QIAGEN, Inc., 9259 Eton Avenue, Chatsworth, Calif., 91311), among others, many of which are commercially available. As described in Gentz et al., Proc. Natl. Acad. Sci. USA 86:821-824 (1989), for instance, hexa-histidine provides for convenient purification of the fusion protein. Other peptide tags useful for purification include, but are not limited to, the “HA” tag, which corresponds to an epitope derived from the influenza hemagglutinin protein (Wilson et al., Cell 37:767 (1984)) and the “flag” tag.

[0359] The present invention further encompasses antibodies or fragments thereof conjugated to a diagnostic or therapeutic agent. The antibodies can be used diagnostically to, for example, monitor the development or progression of a tumor as part of a clinical testing procedure to, e.g., determine the efficacy of a given treatment regimen. Detection can be facilitated by coupling the antibody to a detectable substance. Examples of detectable substances include various enzymes, prosthetic groups, fluorescent materials, luminescent materials, bioluminescent materials, radioactive materials, positron emitting metals using various positron emission topographies, and nonradioactive paramagnetic metal ions. The detectable substance may be coupled or conjugated either directly to the antibody (or fragment thereof) or indirectly, through an intermediate (such as, for example, a linker known in the art) using techniques known in the art. See, for example, U.S. Pat. No. 4,741,900 for metal ions which can be conjugated to antibodies for use as diagnostics according to the present invention. Examples of suitable enzymes include horseradish peroxidase, alkaline phosphatase, beta-galactosidase, or acetylcholinesterase; examples of suitable prosthetic group complexes include streptavidin/biotin and avidin/biotin; examples of suitable fluorescent materials include umbelliferone, fluorescein, fluorescein isothiocyanate, rhodamine, dichlorotriazinylamine fluorescein, dansyl chloride or phycoerythrin; an example of a luminescent material includes luminol; examples of bioluminescent materials include luciferase, luciferin, and aequorin; and examples of suitable radioactive material include 125I, 131I, 111In or 99Tc.

[0360] Further, an antibody or fragment thereof may be conjugated to a therapeutic moiety such as a cytotoxin, e.g., a cytostatic or cytocidal agent, a therapeutic agent or a radioactive metal ion, e.g., alpha-emitters such as, for example, 213Bi. A cytotoxin or cytotoxic agent includes any agent that is detrimental to cells. Examples include paclitaxol, cytochalasin B, gramicidin D, ethidium bromide, emetine, mitomycin, etoposide, tenoposide, vincristine, vinblastine, colchicin, doxorubicin, daunorubicin, dihydroxy anthracin dione, mitoxantrone, mithramycin, actinomycin D, 1-dehydrotestosterone, glucocorticoids, procaine, tetracaine, lidocaine, propranolol, and puromycin and analogs or homologs thereof. Therapeutic agents include, but are not limited to, antimetabolites (e.g., methotrexate, 6-mercaptopurine, 6-thioguanine, cytarabine, 5-fluorouracil decarbazine), alkylating agents (e.g., mechlorethamine, thioepa chlorambucil, melphalan, carmustine (BSNU) and lomustine (CCNU), cyclothosphamide, busulfan, dibromomannitol, streptozotocin, mitomycin C, and cis-dichlorodiamine platinum (II) (DDP) cisplatin), anthracyclines (e.g., daunorubicin (formerly daunomycin) and doxorubicin), antibiotics (e.g., dactinomycin (formerly actinomycin), bleomycin, mithramycin, and anthramycin (AMC)), and anti-mitotic agents (e.g., vincristine and vinblastine).

[0361] The conjugates of the invention can be used for modifying a given biological response, the therapeutic agent or drug moiety is not to be construed as limited to classical chemical therapeutic agents. For example, the drug moiety may be a protein or polypeptide possessing a desired biological activity. Such proteins may include, for example, a toxin such as abrin, ricin A, pseudomonas exotoxin, or diphtheria toxin; a protein such as tumor necrosis factor, a-interferon, β-interferon, nerve growth factor, platelet derived growth factor, tissue plasminogen activator, an apoptotic agent, e.g., TNF-alpha, TNF-beta, AIM I (See, International Publication No. WO 97/33899), AIM II (See, International Publication No. WO 97/34911), Fas Ligand (Takahashi et al., Int. Immunol., 6:1567-1574 (1994)), VEGI (See, International Publication No. WO 99/23105), a thrombotic agent or an anti-angiogenic agent, e.g., angiostatin or endostatin; or, biological response modifiers such as, for example, lymphokines, interleukin-1 (“IL-1”), interleukin-2 (“IL-2”), interleukin-6 (“IL-6”), granulocyte macrophage colony stimulating factor (“GM-CSF”), granulocyte colony stimulating factor (“G-CSF”), or other growth factors.

[0362] Antibodies may also be attached to solid supports, which are particularly useful for immunoassays or purification of the target antigen. Such solid supports include, but are not limited to, glass, cellulose, polyacrylamide, nylon, polystyrene, polyvinyl chloride or polypropylene.

[0363] Techniques for conjugating such therapeutic moiety to antibodies are well known. See, for example, Arnon et al., “Monoclonal Antibodies For Immunotargeting Of Drugs In Cancer Therapy”, in Monoclonal Antibodies And Cancer Therapy, Reisfeld et al. (eds.), pp. 243-56 (Alan R. Liss, Inc. 1985); Hellstrom et al., “Antibodies For Drug Delivery”, in Controlled Drug Delivery (2nd Ed.), Robinson et al. (eds.), pp. 623-53 (Marcel Dekker, Inc. 1987); Thorpe, “Antibody Carriers Of Cytotoxic Agents In Cancer Therapy: A Review”, in Monoclonal Antibodies '84: Biological And Clinical Applications, Pinchera et al. (eds.), pp. 475-506 (1985); “Analysis, Results, And Future Prospective Of The Therapeutic Use Of Radiolabeled Antibody In Cancer Therapy”, in Monoclonal Antibodies For Cancer Detection And Therapy, Baldwin et al. (eds.), pp. 303-16 (Academic Press 1985), and Thorpe et al., “The Preparation And Cytotoxic Properties Of Antibody-Toxin Conjugates”, Immunol. Rev. 62:119-58 (1982).

[0364] Alternatively, an antibody can be conjugated to a second antibody to form an antibody heteroconjugate as described by Segal in U.S. Pat. No. 4,676,980, which is incorporated herein by reference in its entirety.

[0365] An antibody, with or without a therapeutic moiety conjugated to it, administered alone or in combination with cytotoxic factor(s) and/or cytokine(s) can be used as a therapeutic.

[0366] Immunophenotyping

[0367] The antibodies of the invention may be utilized for immunophenotyping of cell lines and biological samples. Translation products of the gene of the present invention may be useful as cell-specific markers, or more specifically as cellular markers that are differentially expressed at various stages of differentiation and/or maturation of particular cell types. Monoclonal antibodies directed against a specific epitope, or combination of epitopes, will allow for the screening of cellular populations expressing the marker. Various techniques can be utilized using monoclonal antibodies to screen for cellular populations expressing the marker(s), and include magnetic separation using antibody-coated magnetic beads, “panning” with antibody attached to a solid matrix (i.e., plate), and flow cytometry (See, e.g., U.S. Pat. No. 5,985,660; and Morrison et al., Cell, 96:737-49 (1999)).

[0368] These techniques allow for the screening of particular populations of cells, such as might be found with hematological malignancies (i.e. minimal residual disease (MRD) in acute leukemic patients) and “non-self” cells in transplantations to prevent Graft-versus-Host Disease (GVHD). Alternatively, these techniques allow for the screening of hematopoietic stem and progenitor cells capable of undergoing proliferation and/or differentiation, as might be found in human umbilical cord blood.

[0369] Assays for Antibody Binding

[0370] The antibodies of the invention may be assayed for immunospecific binding by any method known in the art. The immunoassays which can be used include but are not limited to competitive and non-competitive assay systems using techniques such as western blots, radioimmunoassays, ELISA (enzyme linked immunosorbent assay), “sandwich” immunoassays, immunoprecipitation assays, precipitin reactions, gel diffusion precipitin reactions, immunodiffusion assays, agglutination assays, complement-fixation assays, immunoradiometric assays, fluorescent immunoassays, and protein A immunoassays, to name but a few. Such assays are routine and well known in the art (see, e.g., Ausubel et al, eds, 1994, Current Protocols in Molecular Biology, Vol. 1, John Wiley & Sons, Inc., New York, which is incorporated by reference herein in its entirety). Exemplary immunoassays are described briefly below (but are not intended by way of limitation).

[0371] Immunoprecipitation protocols generally comprise lysing a population of cells in a lysis buffer such as RIPA buffer (1% NP-40 or Triton X-100, 1% sodium deoxycholate, 0.1% SDS, 0.15 M NaCl, 0.01 M sodium phosphate at pH 7.2, 1% Trasylol) supplemented with protein phosphatase and/or protease inhibitors (e.g., EDTA, PMSF, aprotinin, sodium vanadate), adding the antibody of interest to the cell lysate, incubating for a period of time (e.g., 1-4 hours) at 4° C., adding protein A and/or protein G sepharose beads to the cell lysate, incubating for about an hour or more at 4° C., washing the beads in lysis buffer and resuspending the beads in SDS/sample buffer. The ability of the antibody of interest to immunoprecipitate a particular antigen can be assessed by, e.g., western blot analysis. One of skill in the art would be knowledgeable as to the parameters that can be modified to increase the binding of the antibody to an antigen and decrease the background (e.g., pre-clearing the cell lysate with sepharose beads). For further discussion regarding immunoprecipitation protocols see, e.g., Ausubel et al., eds., (1994), Current Protocols in Molecular Biology, Vol. 1, John Wiley & Sons, Inc., New York, section 10.16.1.

[0372] Western blot analysis generally comprises preparing protein samples, electrophoresis of the protein samples in a polyacrylamide gel (e.g., 8%-20% SDS-PAGE depending on the molecular weight of the antigen), transferring the protein sample from the polyacrylamide gel to a membrane such as nitrocellulose, PVDF or nylon, blocking the membrane in blocking solution (e.g., PBS with 3% BSA or non-fat milk), washing the membrane in washing buffer (e.g., PBS-Tween 20), blocking the membrane with primary antibody (the antibody of interest) diluted in blocking buffer, washing the membrane in washing buffer, blocking the membrane with a secondary antibody (which recognizes the primary antibody, e.g., an anti-human antibody) conjugated to an enzymatic substrate (e.g., horseradish peroxidase or alkaline phosphatase) or radioactive molecule (e.g., 32P or 125I) diluted in blocking buffer, washing the membrane in wash buffer, and detecting the presence of the antigen. One of skill in the art would be knowledgeable as to the parameters that can be modified to increase the signal detected and to reduce the background noise. For further discussion regarding western blot protocols see, e.g., Ausubel et al, eds, (1994), Current Protocols in Molecular Biology, Vol. 1, John Wiley & Sons, Inc., New York, section 10.8.1.

[0373] ELISAs comprise preparing antigen, coating the well of a 96 well microtiter plate with the antigen, adding the antibody of interest conjugated to a detectable compound such as an enzymatic substrate (e.g., horseradish peroxidase or alkaline phosphatase) to the well and incubating for a period of time, and detecting the presence of the antigen. In ELISAs the antibody of interest does not have to be conjugated to a detectable compound; instead, a second antibody (which recognizes the antibody of interest) conjugated to a detectable compound may be added to the well. Further, instead of coating the well with the antigen, the antibody may be coated to the well. In this case, a second antibody conjugated to a detectable compound may be added following the addition of the antigen of interest to the coated well. One of skill in the art would be knowledgeable as to the parameters that can be modified to increase the signal detected as well as other variations of ELISAs known in the art. For further discussion regarding ELISAs see, e.g., Ausubel et al, eds, (1994), Current Protocols in Molecular Biology, Vol. 1, John Wiley & Sons, Inc., New York, section 11.2.1.

[0374] The binding affinity of an antibody to an antigen and the off-rate of an antibody-antigen interaction can be determined by competitive binding assays. One example of a competitive binding assay is a radioimmunoassay comprising the incubation of labeled antigen (e.g., 3H or 125I) with the antibody of interest in the presence of increasing amounts of unlabeled antigen, and the detection of the antibody bound to the labeled antigen. The affinity of the antibody of interest for a particular antigen and the binding off-rates can be determined from the data by scatchard plot analysis. Competition with a second antibody can also be determined using radioimmunoassays. In this case, the antigen is incubated with antibody of interest conjugated to a labeled compound (e.g., 3H or 125I) in the presence of increasing amounts of an unlabeled second antibody.

[0375] Antibodies of the invention may be characterized using immunocytochemistry methods on cells (e.g., mammalian cells, such as CHO cells) transfected with a vector enabling the expression of an antigen or with vector alone using techniques commonly known in the art. Antibodies that bind antigen transfected cells, but not vector-only transfected cells, are antigen specific.

[0376] Therapeutic Uses

[0377] Table 1D also provides information regarding biological activities and preferred therapeutic uses (i.e. see, “Preferred Indications” column) for polynucleotides and polypeptides of the invention (including antibodies, agonists, and/or antagonists thereof). Table 1D also provides information regarding assays which may be used to test polynucleotides and polypeptides of the invention (including antibodies, agonists, and/or antagonists thereof) for the corresponding biological activities. The first column (“Gene No.”) provides the gene number in the application for each clone identifier. The second column (“cDNA ATCC Deposit No:Z”) provides the unique clone identifier for each clone as previously described and indicated in Table 1A, Table 1B, and Table 1C. The third column (“AA SEQ ID NO:Y”) indicates the Sequence Listing SEQ ID umber for polypeptide sequences encoded by the corresponding cDNA clones (also as indicated n Table 1A, Table 1B, and Table 2). The fourth column (“Biological Activity”) indicates a biological activity corresponding to the indicated polypeptides (or polynucleotides encoding said polypeptides). The fifth column (“Exemplary Activity Assay”) further describes the corresponding biological activity and also provides information pertaining to the various types of assays which may be performed to test, demonstrate, or quantify the corresponding biological activity.

[0378] The present invention is further directed to antibody-based therapies which involve administering antibodies of the invention to an animal, preferably a mammal, and most preferably a human, patient for treating one or more of the disclosed diseases, disorders, or conditions. Therapeutic compounds of the invention include, but are not limited to, antibodies of the invention (including fragments, analogs and derivatives thereof as described herein) and nucleic acids encoding antibodies of the invention (including fragments, analogs and derivatives thereof and anti-idiotypic antibodies as described herein). The antibodies of the invention can be used to detect, prevent, diagnose, prognosticate, treat, and/or ameliorate diseases, disorders or conditions associated with aberrant expression and/or activity of a polypeptide of the invention, including, but not limited to, cancer and other hyperproliferative diseases and disorders. The treatment and/or prevention of cancer and other hyperproliferative diseases and disorders associated with aberrant expression and/or activity of a polypeptide of the invention includes, but is not limited to, alleviating symptoms associated with cancer and other hyperproliferative diseases and disorders. Antibodies of the invention may be provided in pharmaceutically acceptable compositions as known in the art or as described herein.

[0379] In a specific and preferred embodiment, the present invention is directed to antibody-based therapies which involve administering antibodies of the invention to an animal, preferably a mammal, and most preferably a human, patient for treating cancer and other hyperproliferative diseases and disorders. Therapeutic compounds of the invention include, but are not limited to, antibodies of the invention (e.g., antibodies directed to the full length protein expressed on the cell surface of a mammalian cell; antibodies directed to an epitope of a polypeptide of the invention (such as, for example, a predicted linear epitope shown in column 7 of Table 1B.1; or a conformational epitope, including fragments, analogs and derivatives thereof as described herein) and nucleic acids encoding antibodies of the invention (including fragments, analogs and derivatives thereof and anti-idiotypic antibodies as described herein). The antibodies of the invention can be used to detect, diagnose, prevent, treat, prognosticate, and/or ameliorate cancer and other hyperproliferative diseases, disorders or conditions associated with aberrant expression and/or activity of a polypeptide of the invention. The treatment and/or prevention of cancer and other hyperproliferative diseases, disorders, or conditions associated with aberrant expression and/or activity of a polypeptide of the invention includes, but is not limited to, alleviating symptoms associated with those diseases, disorders or conditions. Antibodies of the invention may be provided in pharmaceutically acceptable compositions as known in the art or as described herein.

[0380] A summary of the ways in which the antibodies of the present invention may be used therapeutically includes binding polynucleotides or polypeptides of the present invention locally or systemically in the body or by direct cytotoxicity of the antibody, e.g. as mediated by complement (CDC) or by effector cells (ADCC). Some of these approaches are described in more detail below. Armed with the teachings provided herein, one of ordinary skill in the art will know how to use the antibodies of the present invention for diagnostic, monitoring or therapeutic purposes without undue experimentation.

[0381] The antibodies of this invention may be advantageously utilized in combination with other monoclonal or chimeric antibodies, or with lymphokines or hematopoietic growth factors (such as, e.g., IL-2, IL-3 and IL-7), for example, which serve to increase the number or activity of effector cells which interact with the antibodies.

[0382] The antibodies of the invention may be administered alone or in combination with other types of treatments (e.g., radiation therapy, chemotherapy, hormonal therapy, immunotherapy and anti-tumor agents). Generally, administration of products of a species origin or species reactivity (in the case of antibodies) that is the same species as that of the patient is preferred. Thus, in a preferred embodiment, human antibodies, fragments derivatives, analogs, or nucleic acids, are administered to a human patient for therapy or prophylaxis.

[0383] It is preferred to use high affinity and/or potent in vivo inhibiting and/or neutralizing antibodies against polypeptides or polynucleotides of the present invention, fragments or regions thereof, for both immunoassays directed to and therapy of cancer and other hyperproliferative diseases and disorders related to polynucleotides or polypeptides, including fragments thereof, of the present invention. Such antibodies, fragments, or regions, will preferably have an affinity for polynucleotides or polypeptides of the invention, including fragments thereof. Preferred binding affinities include those with a dissociation constant or Kd less than 5×10⁻²M, 10⁻²M, 5×10⁻³ M, 10⁻³ M, 5×10⁻⁴ M, 10⁻⁴ M, 5×10⁻⁵ M, 10⁻⁵ M, 5×10⁻⁶ M, 10⁻⁶ M, 5×10⁻⁷ M, 10⁻⁷ M, 5×10⁻⁸ M, 10⁻⁸ M, 5×10⁻⁹ M, 10⁻⁹ M, 5×10⁻¹⁰ M, 10⁻¹⁰ M, 5×10⁻¹¹ M, 10⁻¹¹ M, 5×10⁻¹² M, 10⁻¹² M, 5×10⁻¹³ M, 10⁻¹³ M, 5×10⁻¹⁴ M, 10⁻¹⁴ M, 5×10⁻¹⁵ M, and 10⁻¹⁵ M.

[0384] Gene Therapy

[0385] In a specific embodiment, nucleic acids comprising sequences encoding antibodies or functional derivatives thereof, are administered to treat, inhibit or prevent cancer and other hyperproliferative disease or disorder associated with aberrant expression and/or activity of a polypeptide of the invention, by way of gene therapy. Gene therapy refers to therapy performed by the administration to a subject of an expressed or expressible nucleic acid. In this embodiment of the invention, the nucleic acids produce their encoded protein that mediates a therapeutic effect.

[0386] Any of the methods for gene therapy available in the art can be used according to the present invention. Exemplary methods are described below.

[0387] For general reviews of the methods of gene therapy, see Goldspiel et al., Clinical Pharmacy 12:488-505 (1993); Wu and Wu, Biotherapy 3:87-95 (1991); Tolstoshev, Ann. Rev. Pharmacol. Toxicol. 32:573-596 (1993); Mulligan, Science 260:926-932 (1993); and Morgan and Anderson, Ann. Rev. Biochem. 62:191-217 (1993); May, TIBTECH 11(5):155-215 (1993). Methods commonly known in the art of recombinant DNA technology which can be used are described in Ausubel et al. (eds.), Current Protocols in Molecular Biology, John Wiley & Sons, NY (1993); and Kriegler, Gene Transfer and Expression, A Laboratory Manual, Stockton Press, NY (1990).

[0388] In a preferred embodiment, the compound comprises nucleic acid sequences encoding an antibody, said nucleic acid sequences being part of expression vectors that express the antibody or fragments or chimeric proteins or heavy or light chains thereof in a suitable host. In particular, such nucleic acid sequences have promoters operably linked to the antibody coding region, said promoter being inducible or constitutive, and, optionally, tissue-specific. In another particular embodiment, nucleic acid molecules are used in which the antibody coding sequences and any other desired sequences are flanked by regions that promote homologous recombination at a desired site in the genome, thus providing for intrachromosomal expression of the antibody encoding nucleic acids (Koller and Smithies, Proc. Natl. Acad. Sci. USA 86:8932-8935 (1989); Zijlstra et al., Nature 342:435-438 (1989). In specific embodiments, the expressed antibody molecule is a single chain antibody; alternatively, the nucleic acid sequences include sequences encoding both the heavy and light chains, or fragments thereof, of the antibody.

[0389] Delivery of the nucleic acids into a patient may be either direct, in which case the patient is directly exposed to the nucleic acid or nucleic acid-carrying vectors, or indirect, in which case, cells are first transformed with the nucleic acids in vitro, then transplanted into the patient. These two approaches are known, respectively, as in vivo or ex vivo gene therapy.

[0390] In a specific embodiment, the nucleic acid sequences are directly administered in vivo, where it is expressed to produce the encoded product. This can be accomplished by any of numerous methods known in the art, e.g., by constructing them as part of an appropriate nucleic acid expression vector and administering it so that they become intracellular, e.g., by infection using defective or attenuated retrovirals or other viral vectors (see U.S. Pat. No. 4,980,286), or by direct injection of naked DNA, or by use of microparticle bombardment (e.g., a gene gun; Biolistic, Dupont), or coating with lipids or cell-surface receptors or transfecting agents, encapsulation in liposomes, microparticles, or microcapsules, or by administering them in linkage to a peptide which is known to enter the nucleus, by administering it in linkage to a ligand subject to receptor-mediated endocytosis (see, e.g., Wu and Wu, J. Biol. Chem. 262:4429-4432 (1987)) (which can be used to target cell types specifically expressing the receptors), etc. In another embodiment, nucleic acid-ligand complexes can be formed in which the ligand comprises a fusogenic viral peptide to disrupt endosomes, allowing the nucleic acid to avoid lysosomal degradation. In yet another embodiment, the nucleic acid can be targeted in vivo for cell specific uptake and expression, by targeting a specific receptor (see, e.g., PCT Publications WO 92/06180; WO 92/22635; WO92/20316; WO93/14188, WO 93/20221). Alternatively, the nucleic acid can be introduced intracellularly and incorporated within host cell DNA for expression, by homologous recombination (Koller and Smithies, Proc. Natl. Acad. Sci. USA 86:8932-8935 (1989); Zijlstra et al., Nature 342:435-438 (1989)).

[0391] In a specific embodiment, viral vectors that contains nucleic acid sequences encoding an antibody of the invention are used. For example, a retroviral vector can be used (see Miller et al., Meth. Enzymol. 217:581-599 (1993)). These retroviral vectors contain the components necessary for the correct packaging of the viral genome and integration into the host cell DNA. The nucleic acid sequences encoding the antibody to be used in gene therapy are cloned into one or more vectors, which facilitates delivery of the gene into a patient. More detail about retroviral vectors can be found in Boesen et al., Biotherapy 6:291-302 (1994), which describes the use of a retroviral vector to deliver the mdr1 gene to hematopoietic stem cells in order to make the stem cells more resistant to chemotherapy. Other references illustrating the use of retroviral vectors in gene therapy are: Clowes et al., J. Clin. Invest. 93:644-651 (1994); Kiem et al., Blood 83:1467-1473 (1994); Salmons and Gunzberg, Human Gene Therapy 4:129-141 (1993); and Grossman and Wilson, Curr. Opin. in Genetics and Devel. 3:110-114 (1993).

[0392] Adenoviruses are other viral vectors that can be used in gene therapy. Adenoviruses are especially attractive vehicles for delivering genes to respiratory epithelia. Adenoviruses naturally infect respiratory epithelia where they cause a mild disease. Other targets for adenovirus-based delivery systems are liver, the central nervous system, endothelial cells, and muscle. Adenoviruses have the advantage of being capable of infecting non-dividing cells. Kozarsky and Wilson, Current Opinion in Genetics and Development 3:499-503 (1993) present a review of adenovirus-based gene therapy. Bout et al., Human Gene Therapy 5:3-10 (1994) demonstrated the use of adenovirus vectors to transfer genes to the respiratory epithelia of rhesus monkeys. Other instances of the use of adenoviruses in gene therapy can be found in Rosenfeld et al., Science 252:431-434 (1991); Rosenfeld et al., Cell 68:143-155 (1992); Mastrangeli et al., J. Clin. Invest 91:225-234 (1993); PCT Publication WO94/12649; and Wang, et al., Gene Therapy 2:775-783 (1995). In a preferred embodiment, adenovirus vectors are used.

[0393] Adeno-associated virus (AAV) has also been proposed for use in gene therapy (Walsh et al., Proc. Soc. Exp. Biol. Med. 204:289-300 (1993); U.S. Pat. No. 5,436,146).

[0394] Another approach to gene therapy involves transferring a gene to cells in tissue culture by such methods as electroporation, lipofection, calcium phosphate mediated transfection, or viral infection. Usually, the method of transfer includes the transfer of a selectable marker to the cells. The cells are then placed under selection to isolate those cells that have taken up and are expressing the transferred gene. Those cells are then delivered to a patient.

[0395] In this embodiment, the nucleic acid is introduced into a cell prior to administration in vivo of the resulting recombinant cell. Such introduction can be carried out by any method known in the art, including but not limited to transfection, electroporation, microinjection, infection with a viral or bacteriophage vector containing the nucleic acid sequences, cell fusion, chromosome-mediated gene transfer, microcell-mediated gene transfer, spheroplast fusion, etc. Numerous techniques are known in the art for the introduction of foreign genes into cells (see, e.g., Loeffler and Behr, Meth. Enzymol. 217:599-618 (1993); Cohen et al., Meth. Enzymol. 217:618-644 (1993); Cline, Pharmac. Ther. 29:69-92m (1985) and may be used in accordance with the present invention, provided that the necessary developmental and physiological functions of the recipient cells are not disrupted. The technique should provide for the stable transfer of the nucleic acid to the cell, so that the nucleic acid is expressible by the cell and preferably heritable and expressible by its cell progeny.

[0396] The resulting recombinant cells can be delivered to a patient by various methods known in the art. Recombinant blood cells (e.g., hematopoietic stem or progenitor cells) are preferably administered intravenously. The amount of cells envisioned for use depends on the desired effect, patient state, etc., and can be determined by one skilled in the art.

[0397] Cells into which a nucleic acid can be introduced for purposes of gene therapy encompass any desired, available cell type, and include but are not limited to epithelial cells, endothelial cells, keratinocytes, fibroblasts, muscle cells, hepatocytes; blood cells such as T lymphocytes, B lymphocytes, monocytes, macrophages, neutrophils, eosinophils, megakaryocytes, granulocytes; various stem or progenitor cells, in particular hematopoietic stem or progenitor cells, e.g., as obtained from bone marrow, umbilical cord blood, peripheral blood, fetal liver, etc.

[0398] In a preferred embodiment, the cell used for gene therapy is autologous to the patient.

[0399] In an embodiment in which recombinant cells are used in gene therapy, nucleic acid sequences encoding an antibody are introduced into the cells such that they are expressible by the cells or their progeny, and the recombinant cells are then administered in vivo for therapeutic effect. In a specific embodiment, stem or progenitor cells are used. Any stem and/or progenitor cells which can be isolated and maintained in vitro can potentially be used in accordance with this embodiment of the present invention (see e.g. PCT Publication WO 94/08598; Stemple and Anderson, Cell 71:973-985 (1992); Rheinwald, Meth. Cell Bio. 21A:229 (1980); and Pittelkow and Scott, Mayo Clinic Proc. 61:771 (1986)).

[0400] In a specific embodiment, the nucleic acid to be introduced for purposes of gene therapy comprises an inducible promoter operably linked to the coding region, such that expression of the nucleic acid is controllable by the presence or absence of an appropriate inducer of transcription.

[0401] Demonstration of Therapeutic or Prophylactic Activity

[0402] The compounds or pharmaceutical compositions of the invention are preferably tested in vitro, and then in vivo for the desired therapeutic or prophylactic activity, prior to use in humans. For example, in vitro assays to demonstrate the therapeutic or prophylactic utility of a compound or pharmaceutical composition include, the effect of a compound on a cell line or a patient tissue sample. The effect of the compound or composition on the cell line and/or tissue sample can be determined utilizing techniques known to those of skill in the art including, but not limited to, rosette formation assays and cell lysis assays. In accordance with the invention, in vitro assays which can be used to determine whether administration of a specific compound is indicated, include in vitro cell culture assays in which a patient tissue sample is grown in culture, and exposed to or otherwise administered a compound, and the effect of such compound upon the tissue sample is observed.

[0403] Therapeutic/Prophylactic Administration and Composition

[0404] The invention provides methods of treatment, inhibition and prophylaxis by administration to a subject of an effective amount of a compound or pharmaceutical composition of the invention, preferably a polypeptide or antibody of the invention. In a preferred embodiment, the compound is substantially purified (e.g., substantially free from substances that limit its effect or produce undesired side-effects). The subject is preferably an animal, including but not limited to animals such as cows, pigs, horses, chickens, cats, dogs, etc., and is preferably a mammal, and most preferably human.

[0405] Formulations and methods of administration that can be employed when the compound comprises a nucleic acid or an immunoglobulin are described above; additional appropriate formulations and routes of administration can be selected from among those described herein below.

[0406] Various delivery systems are known and can be used to administer a compound of the invention, e.g., encapsulation in liposomes, microparticles, microcapsules, recombinant cells capable of expressing the compound, receptor-mediated endocytosis (see, e.g., Wu and Wu, J. Biol. Chem. 262:4429-4432 (1987)), construction of a nucleic acid as part of a retroviral or other vector, etc. Methods of introduction include but are not limited to intradermal, intramuscular, intraperitoneal, intravenous, subcutaneous, intranasal, epidural, and oral routes. The compounds or compositions may be administered by any convenient route, for example by infusion or bolus injection, by absorption through epithelial or mucocutaneous linings (e.g., oral mucosa, rectal and intestinal mucosa, etc.) and may be administered together with other biologically active agents. Administration can be systemic or local. In addition, it may be desirable to introduce the pharmaceutical compounds or compositions of the invention into the central nervous system by any suitable route, including intraventricular and intrathecal injection; intraventricular injection may be facilitated by an intraventricular catheter, for example, attached to a reservoir, such as an Ommaya reservoir. Pulmonary administration can also be employed, e.g., by use of an inhaler or nebulizer, and formulation with an aerosolizing agent.

[0407] In a specific embodiment, it may be desirable to administer the pharmaceutical compounds or compositions of the invention locally to the area in need of treatment; this may be achieved by, for example, and not by way of limitation, local infusion during surgery, topical application, e.g., in conjunction with a wound dressing after surgery, by injection, by means of a catheter, by means of a suppository, or by means of an implant, said implant being of a porous, non-porous, or gelatinous material, including membranes, such as sialastic membranes, or fibers. Preferably, when administering a protein, including an antibody, of the invention, care must be taken to use materials to which the protein does not absorb.

[0408] In another embodiment, the compound or composition can be delivered in a vesicle, in particular a liposome (see Langer, Science 249:1527-1533 (1990); Treat et al., in Liposomes in the Therapy of Infectious Disease and Cancer, Lopez-Berestein and Fidler (eds.), Liss, New York, pp. 353-365 (1989); Lopez-Berestein, ibid., pp. 317-327; see generally ibid.)

[0409] In yet another embodiment, the compound or composition can be delivered in a controlled release system. In one embodiment, a pump may be used (see Langer, supra; Sefton, CRC Crit. Ref. Biomed. Eng. 14:201 (1987); Buchwald et al., Surgery 88:507 (1980); Saudek et al., N. Engl. J. Med. 321:574 (1989)). In another embodiment, polymeric materials can be used (see Medical Applications of Controlled Release, Langer and Wise (eds.), CRC Pres., Boca Raton, Fla. (1974); Controlled Drug Bioavailability, Drug Product Design and Performance, Smolen and Ball (eds.), Wiley, New York (1984); Ranger and Peppas, J., Macromol. Sci. Rev. Macromol. Chem. 23:61 (1983); see also Levy et al., Science 228:190 (1985); During et al., Ann. Neurol. 25:351 (1989); Howard et al., J. Neurosurg. 71:105 (1989)). In yet another embodiment, a controlled release system can be placed in proximity of the therapeutic target, e.g., the brain, thus requiring only a fraction of the systemic dose (see, e.g., Goodson, in Medical Applications of Controlled Release, supra, vol. 2, pp. 115-138 (1984)).

[0410] Other controlled release systems are discussed in the review by Langer (Science 249:1521-1533 (1990)).

[0411] In a specific embodiment where the compound of the invention is a nucleic acid encoding a protein, the nucleic acid can be administered in vivo to promote expression of its encoded protein, by constructing it as part of an appropriate nucleic acid expression vector and administering it so that it becomes intracellular, e.g., by use of a retroviral vector (see U.S. Pat. No. 4,980,286), or by direct injection, or by use of microparticle bombardment (e.g., a gene gun; Biolistic, Dupont), or coating with lipids or cell-surface receptors or transfecting agents, or by administering it in linkage to a homeobox-like peptide which is known to enter the nucleus (see e.g., Joliot et al., Proc. Natl. Acad. Sci. USA 88:1864-1868 (1991)), etc. Alternatively, a nucleic acid can be introduced intracellularly and incorporated within host cell DNA for expression, by homologous recombination.

[0412] The present invention also provides pharmaceutical compositions. Such compositions comprise a therapeutically effective amount of a compound, and a pharmaceutically acceptable carrier. In a specific embodiment, the term “pharmaceutically acceptable” means approved by a regulatory agency of the Federal or a state government or listed in the U.S. Pharmacopeia or other generally recognized pharmacopeia for use in animals, and more particularly in humans. The term “carrier” refers to a diluent, adjuvant, excipient, or vehicle with which the therapeutic is administered. Such pharmaceutical carriers can be sterile liquids, such as water and oils, including those of petroleum, animal, vegetable or synthetic origin, such as peanut oil, soybean oil, mineral oil, sesame oil and the like. Water is a preferred carrier when the pharmaceutical composition is administered intravenously. Saline solutions and aqueous dextrose and glycerol solutions can also be employed as liquid carriers, particularly for injectable solutions. Suitable pharmaceutical excipients include starch, glucose, lactose, sucrose, gelatin, malt, rice, flour, chalk, silica gel, sodium stearate, glycerol monostearate, talc, sodium chloride, dried skim milk, glycerol, propylene, glycol, water, ethanol and the like. The composition, if desired, can also contain minor amounts of wetting or emulsifying agents, or pH buffering agents. These compositions can take the form of solutions, suspensions, emulsion, tablets, pills, capsules, powders, sustained-release formulations and the like. The composition can be formulated as a suppository, with traditional binders and carriers such as triglycerides. Oral formulation can include standard carriers such as pharmaceutical grades of mannitol, lactose, starch, magnesium stearate, sodium saccharine, cellulose, magnesium carbonate, etc. Examples of suitable pharmaceutical carriers are described in “Remington's Pharmaceutical Sciences” by E. W. Martin. Such compositions will contain a therapeutically effective amount of the compound, preferably in purified form, together with a suitable amount of carrier so as to provide the form for proper administration to the patient. The formulation should suit the mode of administration.

[0413] In a preferred embodiment, the composition is formulated in accordance with routine procedures as a pharmaceutical composition adapted for intravenous administration to human beings. Typically, compositions for intravenous administration are solutions in sterile isotonic aqueous buffer. Where necessary, the composition may also include a solubilizing agent and a local anesthetic such as lignocaine to ease pain at the site of the injection. Generally, the ingredients are supplied either separately or mixed together in unit dosage form, for example, as a dry lyophilized powder or water free concentrate in a hermetically sealed container such as an ampoule or sachette indicating the quantity of active agent. Where the composition is to be administered by infusion, it can be dispensed with an infusion bottle containing sterile pharmaceutical grade water or saline. Where the composition is administered by injection, an ampoule of sterile water for injection or saline can be provided so that the ingredients may be mixed prior to administration.

[0414] The compounds of the invention can be formulated as neutral or salt forms. Pharmaceutically acceptable salts include those formed with anions such as those derived from hydrochloric, phosphoric, acetic, oxalic, tartaric acids, etc., and those formed with cations such as those derived from sodium, potassium, ammonium, calcium, ferric hydroxides, isopropylamine, triethylamine, 2-thylamino ethanol, histidine, procaine, etc.

[0415] The amount of the compound of the invention which will be effective in the treatment, inhibition and prevention of a disease or disorder associated with aberrant expression and/or activity of a polypeptide of the invention can be determined by standard clinical techniques. In addition, in vitro assays may optionally be employed to help identify optimal dosage ranges. The precise dose to be employed in the formulation will also depend on the route of administration, and the seriousness of the disease or disorder, and should be decided according to the judgment of the practitioner and each patient's circumstances. Effective doses may be extrapolated from dose-response curves derived from in vitro or animal model test systems.

[0416] For antibodies, the dosage administered to a patient is typically 0.1 mg/kg to 100 mg/kg of the patient's body weight. Preferably, the dosage administered to a patient is between 0.1 mg/kg and 20 mg/kg of the patient's body weight, more preferably 1 mg/kg to 10 mg/kg of the patient's body weight. Generally, human antibodies have a longer half-life within the human body than antibodies from other species due to the immune response to the foreign polypeptides. Thus, lower dosages of human antibodies and less frequent administration is often possible. Further, the dosage and frequency of administration of antibodies of the invention may be reduced by enhancing uptake and tissue penetration (e.g., into the brain) of the antibodies by modifications such as, for example, lipidation.

[0417] The invention also provides a pharmaceutical pack or kit comprising one or more containers filled with one or more of the ingredients of the pharmaceutical compositions of the invention. Optionally associated with such container(s) can be a notice in the form prescribed by a governmental agency regulating the manufacture, use or sale of pharmaceuticals or biological products, which notice reflects approval by the agency of manufacture, use or sale for human administration.

[0418] Diagnosis and Imaging

[0419] Labeled antibodies, and derivatives and analogs thereof, which specifically bind to a polypeptide of interest can be used for diagnostic purposes to detect, diagnose, prognosticate, or monitor cancer and other hyperproliferative diseases, disorders, and/or conditions associated with the aberrant expression and/or activity of a polypeptide of the invention. The invention provides for the detection of aberrant expression of a polypeptide of interest, comprising (a) assaying the expression of the polypeptide of interest in cells or body fluid of an individual using one or more antibodies specific to the polypeptide interest and (b) comparing the level of gene expression with a standard gene expression level, whereby an increase or decrease in the assayed polypeptide gene expression level compared to the standard expression level is indicative of aberrant expression.

[0420] The invention provides a diagnostic assay for diagnosing cancer and other hyperproliferative disease or disorder, comprising (a) assaying the expression of the polypeptide of interest in cells or body fluid of an individual using one or more antibodies specific to the polypeptide interest and (b) comparing the level of gene expression with a standard gene expression level, whereby an increase or decrease in the assayed polypeptide gene expression level compared to the standard expression level is indicative of a particular cancer or other hyperproliferative disease or disorder. With respect to cancer and other hyperproliferative diseases and disorders, the presence of a relatively high amount of transcript in biopsied tissue from an individual may indicate a predisposition for the development of the disease, or may provide a means for detecting the disease prior to the appearance of actual clinical symptoms. A more definitive diagnosis of this type may allow health professionals to employ preventative measures or aggressive treatment earlier thereby preventing the development or further progression of the cancer or other hyperproliferative disease.

[0421] Antibodies of the invention can be used to assay protein levels in a biological sample using classical immunohistological methods known to those of skill in the art (e.g., see Jalkanen et al., J. Cell. Biol. 101:976-985 (1985); Jalkanen et al., J. Cell. Biol. 105:3087-3096 (1987)). Other antibody-based methods useful for detecting protein gene expression include immunoassays, such as the enzyme linked immunosorbent assay (ELISA) and the radioimmunoassay (RIA). Suitable antibody assay labels are known in the art and include enzyme labels, such as, glucose oxidase; radioisotopes, such as iodine (125I, 121I), carbon (14C), sulfur (35S), tritium (3H), indium (112In), and technetium (99Tc); luminescent labels, such as luminol; and fluorescent labels, such as fluorescein and rhodamine, and biotin.

[0422] One facet of the invention is the detection and diagnosis of a disease or disorder associated with aberrant expression of a polypeptide of interest in an animal, preferably a mammal and most preferably a human. In one embodiment, diagnosis comprises: a) administering (for example, parenterally, subcutaneously, or intraperitoneally) to a subject an effective amount of a labeled molecule which specifically binds to the polypeptide of interest; b) waiting for a time interval following the administering for permitting the labeled molecule to preferentially concentrate at sites in the subject where the polypeptide is expressed (and for unbound labeled molecule to be cleared to background level); c) determining background level; and d) detecting the labeled molecule in the subject, such that detection of labeled molecule above the background level indicates that the subject has a particular disease or disorder associated with aberrant expression of the polypeptide of interest. Background level can be determined by various methods including, comparing the amount of labeled molecule detected to a standard value previously determined for a particular system.

[0423] It will be understood in the art that the size of the subject and the imaging system used will determine the quantity of imaging moiety needed to produce diagnostic images. In the case of a radioisotope moiety, for a human subject, the quantity of radioactivity injected will normally range from about 5 to 20 millicuries of 99mTc. The labeled antibody or antibody fragment will then preferentially accumulate at the location of cells which contain the specific protein. In vivo tumor imaging is described in S. W. Burchiel et al., “Immunopharmacokinetics of Radiolabeled Antibodies and Their Fragments.” (Chapter 13 in Tumor Imaging: The Radiochemical Detection of Cancer, S. W. Burchiel and B. A. Rhodes, eds., Masson Publishing Inc. (1982)).

[0424] Depending on several variables, including the type of label used and the mode of administration, the time interval following the administration for permitting the labeled molecule to preferentially concentrate at sites in the subject and for unbound labeled molecule to be cleared to background level is 6 to 48 hours or 6 to 24 hours or 6 to 12 hours. In another embodiment the time interval following administration is 5 to 20 days or 5 to 10 days.

[0425] In an embodiment, monitoring of the disease or disorder is carried out by repeating the method for diagnosing the disease or disease, for example, one month after initial diagnosis, six months after initial diagnosis, one year after initial diagnosis, etc.

[0426] Presence of the labeled molecule can be detected in the patient using methods known in the art for in vivo scanning. These methods depend upon the type of label used. Skilled artisans will be able to determine the appropriate method for detecting a particular label. Methods and devices that may be used in the diagnostic methods of the invention include, but are not limited to, computed tomography (CT), whole body scan such as position emission tomography (PET), magnetic resonance imaging (N), and sonography.

[0427] In a specific embodiment, the molecule is labeled with a radioisotope and is detected in the patient using a radiation responsive surgical instrument (Thurston et al., U.S. Pat. No. 5,441,050). In another embodiment, the molecule is labeled with a fluorescent compound and is detected in the patient using a fluorescence responsive scanning instrument. In another embodiment, the molecule is labeled with a positron emitting metal and is detected in the patent using positron emission-tomography. In yet another embodiment, the molecule is labeled with a paramagnetic label and is detected in a patient using magnetic resonance imaging (MRI).

[0428] Kits

[0429] The present invention provides kits that can be used in the above methods. In one embodiment, a kit comprises an antibody of the invention, preferably a purified antibody, in one or more containers. In a specific embodiment, the kits of the present invention contain a substantially isolated polypeptide comprising an epitope which is specifically immunoreactive with an antibody included in the kit. Preferably, the kits of the present invention further comprise a control antibody which does not react with the polypeptide of interest. In another specific embodiment, the kits of the present invention contain a means for detecting the binding of an antibody to a polypeptide of interest (e.g., the antibody may be conjugated to a detectable substrate such as a fluorescent compound, an enzymatic substrate, a radioactive compound or a luminescent compound, or a second antibody which recognizes the first antibody may be conjugated to a detectable substrate).

[0430] In another specific embodiment of the present invention, the kit is a diagnostic kit for use in screening serum containing antibodies specific against proliferative and/or cancerous polynucleotides and polypeptides. Such a kit may include a control antibody that does not react with the polypeptide of interest. Such a kit may include a substantially isolated polypeptide antigen comprising an epitope which is specifically immunoreactive with at least one anti-polypeptide antigen antibody. Further, such a kit includes means for detecting the binding of said antibody to the antigen (e.g., the antibody may be conjugated to a fluorescent compound such as fluorescein or rhodamine which can be detected by flow cytometry). In specific embodiments, the kit may include a recombinantly produced or chemically synthesized polypeptide antigen. The polypeptide antigen of the kit may also be attached to a solid support.

[0431] In a more specific embodiment the detecting means of the above-described kit includes a solid support to which said polypeptide antigen is attached. Such a kit may also include a non-attached reporter-labeled anti-human antibody. In this embodiment, binding of the antibody to the polypeptide antigen can be detected by binding of the said reporter-labeled antibody.

[0432] In an additional embodiment, the invention includes a diagnostic kit for use in screening serum containing antigens of the polypeptide of the invention. The diagnostic kit includes a substantially isolated antibody specifically immunoreactive with polypeptide or polynucleotide antigens, and means for detecting the binding of the polynucleotide or polypeptide antigen to the antibody. In one embodiment, the antibody is attached to a solid support. In a specific embodiment, the antibody may be a monoclonal antibody. The detecting means of the kit may include a second, labeled monoclonal antibody. Alternatively, or in addition, the detecting means may include a labeled, competing antigen.

[0433] In one diagnostic configuration, test serum is reacted with a solid phase reagent having a surface-bound antigen obtained by the methods of the present invention. After binding with specific antigen antibody to the reagent and removing unbound serum components by washing, the reagent is reacted with reporter-labeled anti-human antibody to bind reporter to the reagent in proportion to the amount of bound anti-antigen antibody on the solid support. The reagent is again washed to remove unbound labeled antibody, and the amount of reporter associated with the reagent is determined. Typically, the reporter is an enzyme which is detected by incubating the solid phase in the presence of a suitable fluorometric, luminescent or colorimetric substrate (Sigma, St. Louis, Mo.).

[0434] The solid surface reagent in the above assay is prepared by known techniques for attaching protein material to solid support material, such as polymeric beads, dip sticks, 96-well plate or filter material. These attachment methods generally include non-specific adsorption of the protein to the support or covalent attachment of the protein, typically through a free amine group, to a chemically reactive group on the solid support, such as an activated carboxyl, hydroxyl, or aldehyde group. Alternatively, streptavidin coated plates can be used in conjunction with biotinylated antigen(s).

[0435] Thus, the invention provides an assay system or kit for carrying out this diagnostic method. The kit generally includes a support with surface-bound recombinant antigens, and a reporter-labeled anti-human antibody for detecting surface-bound anti-antigen antibody.

[0436] Uses of the Polynucleotides

[0437] Each of the polynucleotides identified herein can be used in numerous ways as reagents. The following description should be considered exemplary and utilizes known techniques.

[0438] The polynucleotides of the present invention are useful for chromosome identification. There exists an ongoing need to identify new chromosome markers, since few chromosome marking reagents, based on actual sequence data (repeat polymorphisms), are presently available. Each sequence is specifically targeted to and can hybridize with a particular location on an individual human chromosome, thus each polynucleotide of the present invention can routinely be used as a chromosome marker using techniques known in the art. Table 1B.1, column 8 provides the chromosome location of some of the polynucleotides of the invention.

[0439] Briefly, sequences can be mapped to chromosomes by preparing PCR primers (preferably at least 15 bp (e.g., 15-25 bp) from the sequences shown in SEQ ID NO:X. Primers can optionally be selected using computer analysis so that primers do not span more than one predicted exon in the genomic DNA. These primers are then used for PCR screening of somatic cell hybrids containing individual human chromosomes. Only those hybrids containing the human gene corresponding to SEQ ID NO:X will yield an amplified fragment.

[0440] Similarly, somatic hybrids provide a rapid method of PCR mapping the polynucleotides to particular chromosomes. Three or more clones can be assigned per day using a single thermal cycler. Moreover, sublocalization of the polynucleotides can be achieved with panels of specific chromosome fragments. Other gene mapping strategies that can be used include in situ hybridization, prescreening with labeled flow-sorted chromosomes, preselection by hybridization to construct chromosome specific-cDNA libraries, and computer mapping techniques (See, e.g., Shuler, Trends Biotechnol 16:456-459 (1998) which is hereby incorporated by reference in its entirety).

[0441] Precise chromosomal location of the polynucleotides can also be achieved using fluorescence in situ hybridization (FISH) of a metaphase chromosomal spread. This technique uses polynucleotides as short as 500 or 600 bases; however, polynucleotides 2,000 bp are preferred. For a review of this technique, see Verma et al., “Human Chromosomes: a Manual of Basic Techniques,” Pergamon Press, New York (1988).

[0442] For chromosome mapping, the polynucleotides can be used individually (to mark a single chromosome or a single site on that chromosome) or in panels (for marking multiple sites and/or multiple chromosomes).

[0443] Thus, the present invention also provides a method for chromosomal localization which involves (a) preparing PCR primers from the polynucleotide sequences in Table 1B and/or Table 2 and SEQ ID NO:X and (b) screening somatic cell hybrids containing individual chromosomes.

[0444] The polynucleotides of the present invention would likewise be useful for radiation hybrid mapping, HAPPY mapping, and long range restriction mapping. For a review of these techniques and others known in the art, see, e.g. Dear, “Genome Mapping: A Practical Approach,” IRL Press at Oxford University Press, London (1997); Aydin, J. Mol. Med. 77:691-694 (1999); Hacia et al., Mol. Psychiatry 3:483-492 (1998); Herrick et al., Chromosome Res. 7:409-423 (1999); Hamilton et al., Methods Cell Biol. 62:265-280 (2000); and/or Ott, J. Hered. 90:68-70 (1999) each of which is hereby incorporated by reference in its entirety.

[0445] Once a polynucleotide has been mapped to a precise chromosomal location, the physical position of the polynucleotide can be used in linkage analysis. Linkage analysis establishes coinheritance between a chromosomal location and presentation of a particular disease. (Disease mapping data are found, for example, in V. McKusick, Mendelian Inheritance in Man (available on line through Johns Hopkins University Welch Medical Library)). Column 9 of Table 1B.1 provides an OMIM reference identification number of diseases associated with the cytologic band disclosed in column 8 of Table 1B.1, as determined using techniques described herein and by reference to Table 5. Assuming 1 megabase mapping resolution and one gene per 20 kb, a cDNA precisely localized to a chromosomal region associated with the disease could be one of 50-500 potential causative genes.

[0446] Thus, once coinheritance is established, differences in a polynucleotide of the invention and the corresponding gene between affected and unaffected individuals can be examined. First, visible structural alterations in the chromosomes, such as deletions or translocations, are examined in chromosome spreads or by PCR. If no structural alterations exist, the presence of point mutations are ascertained. Mutations observed in some or all affected individuals, but not in normal individuals, indicates that the mutation may cause the disease. However, complete sequencing of the polypeptide and the corresponding gene from several normal individuals is required to distinguish the mutation from a polymorphism. If a new polymorphism is identified, this polymorphic polypeptide can be used for further linkage analysis.

[0447] Furthermore, increased or decreased expression of the gene in affected individuals as compared to unaffected individuals can be assessed using the polynucleotides of the invention. Any of these alterations (altered expression, chromosomal rearrangement, or mutation) can be used as a diagnostic or prognostic marker. Diagnostic and prognostic methods, kits and reagents encompassed by the present invention are briefly described below and more thoroughly elsewhere herein (see e.g., the sections labeled “Antibodies”, “Diagnostic Assays”, and “Methods for Detecting Diseases”).

[0448] Thus, the invention also provides a diagnostic method useful during diagnosis of a disorder, involving measuring the expression level of polynucleotides of the present invention in cells or body fluid from an individual and comparing the measured gene expression level with a standard level of polynucleotide expression level, whereby an increase or decrease in the gene expression level compared to the standard is indicative of a disorder. Additional non-limiting examples of diagnostic methods encompassed by the present invention are more thoroughly described elsewhere herein (see, e.g., Example 12).

[0449] In still another embodiment, the invention includes a kit for analyzing samples for the presence of proliferative and/or cancerous polynucleotides derived from a test subject. In a general embodiment, the kit includes at least one polynucleotide probe containing a nucleotide sequence that will specifically hybridize with a polynucleotide of the invention and a suitable container. In a specific embodiment, the kit includes two polynucleotide probes defining an internal region of the polynucleotide of the invention, where each probe has one strand containing a 31′mer-end internal to the region. In a further embodiment, the probes may be useful as primers for polymerase chain reaction amplification.

[0450] Where a diagnosis of a related disorder, including, for example, diagnosis of a tumor, has already been made according to conventional methods, the present invention is useful as a prognostic indicator, whereby patients exhibiting enhanced or depressed polynucleotide of the invention expression will experience a worse clinical outcome relative to patients expressing the gene at a level nearer the standard level.

[0451] By “measuring the expression level of polynucleotides of the invention” is intended qualitatively or quantitatively measuring or estimating the level of the polypeptide of the invention or the level of the mRNA encoding the polypeptide of the invention in a first biological sample either directly (e.g., by determining or estimating absolute protein level or mRNA level) or relatively (e.g., by comparing to the polypeptide level or mRNA level in a second biological sample). Preferably, the polypeptide level or mRNA level in the first biological sample is measured or estimated and compared to a standard polypeptide level or mRNA level, the standard being taken from a second biological sample obtained from an individual not having the related disorder or being determined by averaging-levels from a population of individuals not having a related disorder. As will be appreciated in the art, once a standard polypeptide level or mRNA level is known, it can be used repeatedly as a standard for comparison.

[0452] By “biological sample” is intended any biological sample obtained from an individual, body fluid, cell line, tissue culture, or other source which contains polypeptide of the present invention or the corresponding mRNA. As indicated, biological samples include body fluids (such as semen, lymph, vaginal pool, sera, plasma, urine, synovial fluid and spinal fluid) which contain the polypeptide of the present invention, and tissue sources found to express the polypeptide of the present invention. Methods for obtaining tissue biopsies and body fluids from mammals are well known in the art. Where the biological sample is to include mRNA, a tissue biopsy is the preferred source.

[0453] The method(s) provided above may preferably be applied in a diagnostic method and/or kits in which polynucleotides and/or polypeptides of the invention are attached to a solid support. In one exemplary method, the support may be a “gene chip” or a “biological chip” as described in U.S. Pat. Nos. 5,837,832, 5,874,219, and 5,856,174. Further, such a gene chip with polynucleotides of the invention attached may be used to identify polymorphisms between the isolated polynucleotide sequences of the invention, with polynucleotides isolated from a test subject. The knowledge of such polymorphisms (i.e. their location, as well as, their existence) would be beneficial in identifying disease loci for many disorders, such as for example, in neural disorders, immune system disorders, muscular disorders, reproductive disorders, gastrointestinal disorders, pulmonary disorders, digestive disorders, metabolic disorders, cardiovascular disorders, renal disorders, proliferative disorders, and/or cancerous diseases and conditions. Such a method is described in U.S. Pat. Nos. 5,858,659 and 5,856,104. The U.S. patents referenced supra are hereby incorporated by reference in their entirety herein.

[0454] The present invention encompasses polynucleotides of the present invention that are chemically synthesized, or reproduced as peptide nucleic acids (PNA), or according to other methods known in the art. The use of PNAs would serve as the preferred form if the polynucleotides of the invention are incorporated onto a solid support, or gene chip. For the purposes of the present invention, a peptide nucleic acid (PNA) is a polyamide type of DNA analog and the monomeric units for adenine, guanine, thymine and cytosine are available commercially (Perceptive Biosystems). Certain components of DNA, such as phosphorus, phosphorus oxides, or deoxyribose derivatives, are not present in PNAs. As disclosed by Nielsen et al., Science 254, 1497 (1991); and Egholm et al., Nature 365, 666 (1993), PNAs bind specifically and tightly to complementary DNA strands and are not degraded by nucleases. In fact, PNA binds more strongly to DNA than DNA itself does. This is probably because there is no electrostatic repulsion between the two strands, and also the polyamide backbone is more flexible. Because of this, PNA/DNA duplexes bind under a wider range of stringency conditions than DNA/DNA duplexes, making it easier to perform multiplex hybridization. Smaller probes can be used than with DNA due to the strong binding. In addition, it is more likely that single base mismatches can be determined with PNA/DNA hybridization because a single mismatch in a PNA/DNA 15-mer lowers the melting point (T.sub.m) by 8°-20° C., vs. 4°-16° C. for the DNA/DNA 15-mer duplex. Also, the absence of charge groups in PNA means that hybridization can be done at low ionic strengths and reduce possible interference by salt during the analysis.

[0455] The compounds of the present invention have uses which include, but are not limited to, detecting cancer in mammals. In particular the invention is useful during diagnosis of pathological cell proliferative neoplasias which include, but are not limited to: acute myelogenous leukemias including acute monocytic leukemia, acute myeloblastic leukemia, acute promyelocytic leukemia, acute myelomonocytic leukemia, acute erythroleukemia, acute megakaryocytic leukemia, and acute undifferentiated leukemia, etc.; and chronic myelogenous leukemias including chronic myelomonocytic leukemia, chronic granulocytic leukemia, etc. Preferred mammals include monkeys, apes, cats, dogs, cows, pigs, horses, rabbits and humans. Particularly preferred are humans.

[0456] Pathological cell proliferative disorders are often associated with inappropriate activation of proto-oncogenes. (Gelmann, E. P. et al., “The Etiology of Acute Leukemia: Molecular Genetics and Viral Oncology,” in Neoplastic Diseases of the Blood, Vol 1., Wiernik, P. H. et al. eds., 161-182 (1985)). Neoplasias are now believed to result from the qualitative alteration of a normal cellular gene product, or from the quantitative modification of gene expression by insertion into the chromosome of a viral sequence, by chromosomal translocation of a gene to a more actively transcribed region, or by some other mechanism. (Gelmann et al., supra) It is likely that mutated or altered expression of specific genes is involved in the pathogenesis of some leukemias, among other tissues and cell types. (Gelmann et al., supra) Indeed, the human counterparts of the oncogenes involved in some animal neoplasias have been amplified or translocated in some cases of human leukemia and carcinoma. (Gelmann et al., supra)

[0457] For example, c-myc expression is highly amplified in the non-lymphocytic leukemia cell line HL-60. When HL-60 cells are chemically induced to stop proliferation, the level of c-myc is found to be downregulated. (International Publication Number WO 91/15580). However, it has been shown that exposure of HL-60 cells to a DNA construct that is complementary to the 5′ end of c-myc or c-myb blocks translation of the corresponding mRNAs which down-regulates expression of the c-myc or c-myb proteins and causes arrest of cell proliferation and differentiation of the treated cells. (International Publication Number WO 91/15580; Wickstrom et al., Proc. Natl. Acad. Sci. 85:1028 (1988); Anfossi et al., Proc. Natl. Acad. Sci. 86:3379 (1989)). However, the skilled artisan would appreciate the present invention's usefulness is not be limited to treatment, prevention, and/or prognosis of proliferative disorders of cells and tissues of hematopoietic origin, in light of the numerous cells and cell types of varying origins which are known to exhibit proliferative phenotypes.

[0458] In addition to the foregoing, a polynucleotide of the present invention can be used to control gene expression through triple helix formation or through antisense DNA or RNA. Antisense techniques are discussed, for example, in Okano, J. Neurochem. 56: 560 (1991); “Oligodeoxynucleotides as Antisense Inhibitors of Gene Expression, CRC Press, Boca Raton, Fla. (1988). Triple helix formation is discussed in, for instance Lee et al., Nucleic Acids Research 6: 3073 (1979); Cooney et al., Science 241: 456 (1988); and Dervan et al., Science 251: 1360 (1991). Both methods rely on binding of the polynucleotide to a complementary DNA or RNA. For these techniques, preferred polynucleotides are usually oligonucleotides 20 to 40 bases in length and complementary to either the region of the gene involved in transcription (triple helix—see Lee et al., Nucl. Acids Res. 6:3073 (1979); Cooney et al., Science 241:456 (1988); and Dervan et al., Science 251:1360 (1991)) or to the mRNA itself (antisense—Okano, J. Neurochem. 56:560 (1991); Oligodeoxy-nucleotides as Antisense Inhibitors of Gene Expression, CRC Press, Boca Raton, Fla. (1988)). Triple helix formation optimally results in a shut-off of RNA transcription from DNA, while antisense RNA hybridization blocks translation of an mRNA molecule into polypeptide. The oligonucleotide described above can also be delivered to cells such that the antisense RNA or DNA may be expressed in vivo to inhibit production of polypeptide of the present invention antigens. Both techniques are effective in model systems, and the information disclosed herein can be used to design antisense or triple helix polynucleotides in an effort to treat disease, and in particular, for the treatment of proliferative diseases and/or conditions. Non-limiting antisense and triple helix methods encompassed by the present invention are more thoroughly described elsewhere herein (see, e.g., the section labeled “Antisense and Ribozyme (Antagonists)”).

[0459] Polynucleotides of the present invention are also useful in gene therapy. One goal of gene therapy is to insert a normal gene into an organism having a defective gene, in an effort to correct the genetic defect. The polynucleotides disclosed in the present invention offer a means of targeting such genetic defects in a highly accurate manner. Another goal is to insert a new gene that was not present in the host genome, thereby producing a new trait in the host cell. Additional non-limiting examples of gene therapy methods encompassed by the present invention are more thoroughly described elsewhere herein (see, e.g., the sections labeled “Gene Therapy Methods”, and Examples 16, 17 and 18).

[0460] The polynucleotides are also useful for identifying individuals from minute biological samples. The United States military, for example, is considering the use of restriction fragment length polymorphism (RFLP) for identification of its personnel. In this technique, an individual's genomic DNA is digested with one or more restriction enzymes, and probed on a Southern blot to yield unique bands for identifying personnel. This method does not suffer from the current limitations of “Dog Tags” which can be lost, switched, or stolen, making positive identification difficult. The polynucleotides of the present invention can be used as additional DNA markers for RFLP.

[0461] The polynucleotides of the present invention can also be used as an alternative to RFLP, by determining the actual base-by-base DNA sequence of selected portions of an individual's genome. These sequences can be used to prepare PCR primers for amplifying and isolating such selected DNA, which can then be sequenced. Using this technique, individuals can be identified because each individual will have a unique set of DNA sequences. Once an unique ID database is established for an individual, positive identification of that individual, living or dead, can be made from extremely small tissue samples.

[0462] Forensic biology also benefits from using DNA-based identification techniques as disclosed herein. DNA sequences taken from very small biological samples such as tissues, e.g., hair or skin, or body fluids, e.g., blood, saliva, semen, synovial fluid, amniotic fluid, breast milk, lymph, pulmonary sputum or surfactant, urine, fecal matter, etc., can be amplified using PCR. In one prior art technique, gene sequences amplified from polymorphic loci, such as DQa class II HLA gene, are used in forensic biology to identify individuals. (Erlich, H., PCR Technology, Freeman and Co. (1992)). Once these specific polymorphic loci are amplified, they are digested with one or more restriction enzymes, yielding an identifying set of bands on a Southern blot probed with DNA corresponding to the DQa class II HLA gene. Similarly, polynucleotides of the present invention can be used as polymorphic markers for forensic purposes.

[0463] There is also a need for reagents capable of identifying the source of a particular tissue. Such need arises, for example, in forensics when presented with tissue of unknown origin. Appropriate reagents can comprise, for example, DNA probes or primers prepared from the sequences of the present invention, specific to tissues, including but not limited to those shown in Table 1B. Panels of such reagents can identify tissue by species and/or by organ type. In a similar fashion, these reagents can be used to screen tissue cultures for contamination. Additional non-limiting examples of such uses are further described herein.

[0464] The polynucleotides of the present invention are also useful as hybridization probes for differential identification of the tissue(s) or cell type(s) present in a biological sample. Similarly, polypeptides and antibodies directed to polypeptides of the present invention are useful to provide immunological probes for differential identification of the tissue(s) (e.g., immunohistochemistry assays) or cell type(s) (e.g., immunocytochemistry assays). In addition, for a number of disorders of the above tissues or cells, significantly higher or lower levels of gene expression of the polynucleotides/polypeptides of the present invention may be detected in certain tissues (e.g., tissues expressing polypeptides and/or polynucleotides of the present invention, for example, those disclosed in Table 1B, and/or cancerous and/or wounded tissues) or bodily fluids (e.g., semen, lymph, vaginal pool, serum, plasma, urine, synovial fluid or spinal fluid) taken from an individual having such a disorder, relative to a “standard” gene expression level, i.e., the expression level in healthy tissue from an individual not having the disorder.

[0465] Thus, the invention provides a diagnostic method of a disorder, which involves: (a) assaying gene expression level in cells or body fluid of an individual; (b) comparing the gene expression level with a standard gene expression level, whereby an increase or decrease in the assayed gene expression level compared to the standard expression level is indicative of a disorder.

[0466] In the very least, the polynucleotides of the present invention can be used as molecular weight markers on Southern gels, as diagnostic probes for the presence of a specific mRNA in a particular cell type, as a probe to “subtract-out” known sequences in the process of discovering novel polynucleotides, for selecting and making oligomers for attachment to a “gene chip” or other support, to raise anti-DNA antibodies using DNA immunization techniques, and as an antigen to elicit an immune response.

[0467] Uses of the Polypeptides

[0468] Each of the polypeptides identified herein can be used in numerous ways. The following description should be considered exemplary and utilizes known techniques.

[0469] Polypeptides and antibodies directed to polypeptides of the present invention are useful to provide immunological probes for differential identification of the tissue(s) (e.g., immunohistochemistry assays such as, for example, ABC immunoperoxidase (Hsu et al., J. Histochem. Cytochem. 29:577-580 (1981)) or cell type(s) (e.g., immunocytochemistry assays).

[0470] Antibodies can be used to assay levels of polypeptides encoded by polynucleotides of the invention in a biological sample using classical immunohistological methods known to those of skill in the art (e.g., see Jalkanen, et al., J. Cell. Biol. 101:976-985 (1985); Jalkanen, et al., J. Cell. Biol. 105:3087-3096 (1987)). Other antibody-based methods useful for detecting protein gene expression include immunoassays, such as the enzyme linked immunosorbent assay (ELISA) and the radioimmunoassay (RIA). Suitable antibody assay labels are known in the art and include enzyme labels, such as, glucose oxidase; radioisotopes, such as iodine (¹³¹I, ¹²⁵I, ¹²³I, ¹²¹I), carbon (¹⁴C), sulfur (³⁵S), tritium (³H), indium (^{115m}In, ^{113m}In, ¹¹²In, ¹¹¹In), and technetium (⁹⁹Tc, ^{99m}Tc), thallium (²⁰¹Ti), gallium (⁶⁸Ga, ⁶⁷Ga), palladium (¹⁰³Pd), molybdenum (⁹⁹Mo), xenon (¹³³Xe), fluorine (¹⁸F), ¹⁵³Sm, ¹⁷⁷Lu, ¹⁵⁹Gd, ¹⁴⁹Pm, ¹⁴⁰La, ¹⁷⁵Yb, ¹⁶⁶Ho, ⁹⁰Y, ⁴⁷Sc, ¹⁸⁶Re, ¹⁸⁸Re, ¹⁴²Pr, ¹⁰⁵Rh, ⁹⁷Ru; luminescent labels, such as luminol; and fluorescent labels, such as fluorescein and rhodamine, and biotin.

[0471] In addition to assaying levels of polypeptide of the present invention in a biological sample, proteins can also be detected in vivo by imaging. Antibody labels or markers for in vivo imaging of protein include those detectable by X-radiography, NMR or ESR. For X-radiography, suitable labels include radioisotopes such as barium or cesium, which emit detectable radiation but are not overtly harmful to the subject. Suitable markers for NMR and ESR include those with a detectable characteristic spin, such as deuterium, which may be incorporated into the antibody by labeling of nutrients for the relevant hybridoma.

[0472] A protein-specific antibody or antibody fragment which has been labeled with an appropriate detectable imaging moiety, such as a radioisotope (for example, ¹³¹I, ¹¹²In, ^{99m}Tc, (¹³¹I, ¹²⁵I, ¹²³I, ¹²¹I), carbon (¹⁴C), sulfur (³⁵S), tritium (³H), indium (^{115m}In, ^{113m}In, ¹¹²In, ¹¹¹In), and technetium (⁹⁹Tc, ^{99m}Tc), thallium (²⁰¹Ti), gallium (⁶⁸Ga, ⁶⁷Ga), palladium (¹⁰³Pd), molybdenum (⁹⁹Mo), xenon (¹³³Xe), fluorine (¹⁸F, ¹⁵³Sm, ¹⁷⁷Lu, ¹⁵⁹Gd, ¹⁴⁹Pm, ¹⁴⁰La, ¹⁷⁵Yb, ¹⁶⁶Ho, ⁹⁰Y, ⁴⁷Sc, ¹⁸⁶Re, ¹⁸⁸Re, ¹⁴²Pr, ¹⁰⁵Rh, ⁹⁷Ru), a radio-opaque substance, or a material detectable by nuclear magnetic resonance, is introduced (for example, parenterally, subcutaneously or intraperitoneally) into the mammal to be examined for immune system disorder. It will be understood in the art that the size of the subject and the imaging system used will determine the quantity of imaging moiety needed to produce diagnostic images. In the case of a radioisotope moiety, for a human subject, the quantity of radioactivity injected will normally range from about 5 to 20 millicuries of ^{99m}Tc. The labeled antibody or antibody fragment will then preferentially accumulate at the location of cells which express the polypeptide encoded by a polynucleotide of the invention. In vivo tumor imaging is described in S. W. Burchiel et al., “Immunopharmacokinetics of Radiolabeled Antibodies and Their Fragments” (Chapter 13 in Tumor Imaging: The Radiochemical Detection of Cancer, S. W. Burchiel and B. A. Rhodes, eds., Masson Publishing Inc. (1982)).

[0473] In one embodiment, the invention provides a method for the specific delivery of compositions of the invention to cells by administering polypeptides of the invention (e.g., polypeptides encoded by polynucleotides of the invention and/or antibodies) that are associated with heterologous polypeptides or nucleic acids. In one example, the invention provides a method for delivering a therapeutic protein into the targeted cell. In another example, the invention provides a method for delivering a single stranded nucleic acid (e.g., antisense or ribozymes) or double stranded nucleic acid (e.g., DNA that can integrate into the cell's genome or replicate episomally and that can be transcribed) into the targeted cell.

[0474] In another embodiment, the invention provides a method for the specific destruction of cells (e.g., the destruction of tumor cells) by administering polypeptides of the invention in association with toxins or cytotoxic prodrugs.

[0475] By “toxin” is meant one or more compounds that bind and activate endogenous cytotoxic effector systems, radioisotopes, holotoxins, modified toxins, catalytic subunits of toxins, or any molecules or enzymes not normally present in or on the surface of a cell that under defined conditions cause the cell's death. Toxins that may be used according to the methods of the invention include, but are not limited to, radioisotopes known in the art, compounds such as, for example, antibodies (or complement fixing containing portions thereof) that bind an inherent or induced endogenous cytotoxic effector system, thymidine kinase, endonuclease, RNAse, alpha toxin, ricin, abrin, Pseudomonas exotoxin A, diphtheria toxin, saporin, momordin, gelonin, pokeweed antiviral protein, alpha-sarcin and cholera toxin. “Toxin” also includes a cytostatic or cytocidal agent, a therapeutic agent or a radioactive metal ion, e.g., alpha-emitters such as, for example, ²¹³Bi, or other radioisotopes such as, for example, ¹⁰³Pd, ¹³³Xe, ¹³¹I, ⁶⁸Ge, ⁵⁷Co, ⁶⁵Zn, ⁸⁵Sr, ³²P, ³⁵S, ⁹⁰Y, ¹⁵³Sm, ¹⁵³Gd, ¹⁶⁹Yb, ⁵¹Cr, ⁵⁴Mn, ⁷⁵Se, ¹¹³Sn, ⁹⁰Yttriurn, ¹¹⁷Tin, ¹⁸⁶Rhenium, ¹⁶⁶Holmium, and ¹⁸⁸Rhenium; luminescent labels, such as luminol; and fluorescent labels, such as fluorescein and rhodamine, and biotin. In a specific embodiment, the invention provides a method for the specific destruction of cells (e.g., the destruction of tumor cells) by administering polypeptides of the invention or antibodies of the invention in association with the radioisotope ⁹⁰Y. In another specific embodiment, the invention provides a method for the specific destruction of cells (e.g., the destruction of tumor cells) by administering polypeptides of the invention or antibodies of the invention in association with the radioisotope ¹¹¹In. In a further specific embodiment, the invention provides a method for the specific destruction of cells (e.g., the destruction of tumor cells) by administering polypeptides of the invention or antibodies of the invention in association with the radioisotope ¹³¹I.

[0476] Techniques known in the art may be applied to label polypeptides of the invention (including antibodies). Such techniques include, but are not limited to, the use of bifunctional conjugating agents (see e.g., U.S. Pat. Nos. 5,756,065; 5,714,631; 5,696,239; 5,652,361; 5,505,931; 5,489,425; 5,435,990; 5,428,139; 5,342,604; 5,274,119; 4,994,560; and 5,808,003; the contents of each of which are hereby incorporated by reference in its entirety).

[0477] Thus, the invention provides a diagnostic method of a disorder, which involves (a) assaying the expression level of a polypeptide of the present invention in cells or body fluid of an individual; and (b) comparing the assayed polypeptide expression level with a standard polypeptide expression level, whereby an increase or decrease in the assayed polypeptide expression level compared to the standard expression level is indicative of a disorder. With respect to cancer, the presence of a relatively high amount of transcript in biopsied tissue from an individual may indicate a predisposition for the development of the disease, or may provide a means for detecting the disease prior to the appearance of actual clinical symptoms. A more definitive diagnosis of this type may allow health professionals to employ preventative measures or aggressive treatment earlier thereby preventing the development or further progression of the cancer.

[0478] Moreover, polypeptides of the present invention can be used to treat or prevent diseases or conditions such as, for example, neural disorders, immune system disorders, muscular disorders, reproductive disorders, gastrointestinal disorders, pulmonary disorders, cardiovascular disorders, renal disorders, proliferative disorders, and/or cancerous diseases and conditions. For example, patients can be administered a polypeptide of the present invention in an effort to replace absent or decreased levels of the polypeptide (e.g., insulin), to supplement absent or decreased levels of a different polypeptide (e.g., hemoglobin S for hemoglobin B, SOD, catalase, DNA repair proteins), to inhibit the activity of a polypeptide (e.g., an oncogene or tumor supressor), to activate the activity of a polypeptide (e.g., by binding to a receptor), to reduce the activity of a membrane bound receptor by competing with it for free ligand (e.g., soluble TNF receptors used in reducing inflammation), or to bring about a desired response (e.g., blood vessel growth inhibition, enhancement of the immune response to proliferative cells or tissues).

[0479] Similarly, antibodies directed to a polypeptide of the present invention can also be used to treat disease (as described supra, and elsewhere herein). For example, administration of an antibody directed to a polypeptide of the present invention can bind, and/or neutralize the polypeptide, and/or reduce overproduction of the polypeptide. Similarly, administration of an antibody can activate the polypeptide, such as by binding to a polypeptide bound to a membrane (receptor).

[0480] At the very least, the polypeptides of the present invention can be used as molecular weight markers on SDS-PAGE gels or on molecular sieve gel filtration columns using methods well known to those of skill in the art. Polypeptides can also be used to raise antibodies, which in turn are used to measure protein expression from a recombinant cell, as a way of assessing transformation of the host cell. Moreover, the polypeptides of the present invention can be used to test the biological activities described herein.

[0481] Diagnostic Assays

[0482] The compounds of the present invention are useful for diagnosis, treatment, prevention and/or prognosis of various disorders in mammals, preferably humans. Such disorders include, but are not limited to, those related to biological activities described in Table 1D and, also as described herein under the section heading “Biological Activities”.

[0483] For a number of disorders, substantially altered (increased or decreased) levels of gene expression can be detected in tissues, cells or bodily fluids (e.g., sera, plasma, urine, semen, synovial fluid or spinal fluid) taken from an individual having such a disorder, relative to a “standard” gene expression level, that is, the expression level in tissues or bodily fluids from an individual not having the disorder. Thus, the invention provides a diagnostic method useful during diagnosis of a disorder, which involves measuring the expression level of the gene encoding the polypeptide in tissues, cells or body fluid from an individual and comparing the measured gene expression level with a standard gene expression level, whereby an increase or decrease in the gene expression level(s) compared to the standard is indicative of a disorder. These diagnostic assays may be performed in vivo or in vitro, such as, for example, on blood samples, biopsy tissue or autopsy tissue.

[0484] The present invention is also useful as a prognostic indicator, whereby patients exhibiting enhanced or depressed gene expression will experience a worse clinical outcome relative to patients expressing the gene at a level nearer the standard level.

[0485] In certain embodiments, a polypeptide of the invention, or polynucleotides, antibodies, agonists, or antagonists corresponding to that polypeptide, may be used to diagnose and/or prognosticate diseases and/or disorders associated with the tissue(s) in which the polypeptide of the invention is expressed, including one, two, three, four, five, or more tissues disclosed in Table 1B.2, column 5 (Tissue Distribution Library Code).

[0486] By “assaying the expression level of the gene encoding the polypeptide” is intended qualitatively or quantitatively measuring or estimating the level of the polypeptide of the invention or the level of the mRNA encoding the polypeptide of the invention in a first biological sample either directly (e.g., by determining or estimating absolute protein level or mRNA level) or relatively (e.g., by comparing to the polypeptide level or mRNA level in a second biological sample). Preferably, the polypeptide expression level or mRNA level in the first biological sample is measured or estimated and compared to a standard polypeptide level or mRNA level, the standard being taken from a second biological sample obtained from an individual not having the disorder or being determined by averaging levels from a population of individuals not having the disorder. As will be appreciated in the art, once a standard polypeptide level or mRNA level is known, it can be used repeatedly as a standard for comparison.

[0487] By “biological sample” is intended any biological sample obtained from an individual, cell line, tissue culture, or other source containing polypeptides of the invention (including portions thereof) or mRNA. As indicated, biological samples include body fluids (such as sera, plasma, urine, synovial fluid and spinal fluid) and tissue sources found to express the full length or fragments thereof of a polypeptide or mRNA. Methods for obtaining tissue biopsies and body fluids from mammals are well known in the art. Where the biological sample is to include mRNA, a tissue biopsy is the preferred source.

[0488] Total cellular RNA can be isolated from a biological sample using any suitable technique such as the single-step guanidinium-thiocyanate-phenol-chloroform method described in Chomczynski and Sacchi, Anal. Biochem. 162:156-159 (1987). Levels of mRNA encoding the polypeptides of the invention are then assayed using any appropriate method. These include Northern blot analysis, S1 nuclease mapping, the polymerase chain reaction (PCR), reverse transcription in combination with the polymerase chain reaction (RT-PCR), and reverse transcription in combination with the ligase chain reaction (RT-LCR).

[0489] The present invention also relates to diagnostic assays such as quantitative and diagnostic assays for detecting levels of polypeptides of the invention, in a biological sample (e.g., cells and tissues), including determination of normal and abnormal levels of polypeptides. Thus, for instance, a diagnostic assay in accordance with the invention for detecting over-expression of polypeptides of the invention compared to normal control tissue samples may be used to detect the presence of tumors. Assay techniques that can be used to determine levels of a polypeptide, such as a polypeptide of the present invention in a sample derived from a host are well-known to those of skill in the art. Such assay methods include radioimmunoassays, competitive-binding assays, Western Blot analysis and ELISA assays. Assaying polypeptide levels in a biological sample can occur using any art-known method.

[0490] Assaying polypeptide levels in a biological sample can occur using antibody-based techniques. For example, polypeptide expression in tissues can be studied with classical immunohistological methods (Jalkanen et al., J. Cell. Biol. 101:976-985 (1985); Jalkanen, M., et al., J. Cell. Biol. 105:3087-3096 (1987)). Other antibody-based methods useful for detecting polypeptide gene expression include immunoassays, such as the enzyme linked immunosorbent assay (ELISA) and the radioimmunoassay (RIA). Suitable antibody assay labels are known in the art and include enzyme labels, such as, glucose oxidase, and radioisotopes, such as iodine (¹²⁵I, ¹²¹I), carbon (¹⁴C), sulfur (³⁵S), tritium (³H), indium (¹¹²In), and technetium (^{99m}Tc), and fluorescent labels, such as fluorescein and rhodamine, and biotin.

[0491] The tissue or cell type to be analyzed will generally include those which are known, or suspected, to express the gene of inteest (such as, for example, cancer). The protein isolation methods employed herein may, for example, be such as those described in Harlow and Lane (Harlow, E. and Lane, D., 1988, “Antibodies: A Laboratory Manual”, Cold Spring Harbor Laboratory Press, Cold Spring Harbor, N.Y.), which is incorporated herein by reference in its entirety. The isolated cells can be derived from cell culture or from a patient. The analysis of cells taken from culture may be a necessary step in the assessment of cells that could be used as part of a cell-based gene therapy technique or, alternatively, to test the effect of compounds on the expression of the gene.

[0492] For example, antibodies, or fragments of antibodies, such as those described herein, may be used to quantitatively or qualitatively detect the presence of gene products or conserved variants or peptide fragments thereof. This can be accomplished, for example, by immunofluorescence techniques employing a fluorescently labeled antibody coupled with light microscopic, flow cytometric, or fluorimetric detection.

[0493] In a preferred embodiment, antibodies, or fragments of antibodies directed to any one or all of the predicted epitope domains of the polypeptides of the invention (shown in column 7 of Table 1B.1) may be used to quantitatively or qualitatively detect the presence of gene products or conserved variants or peptide fragments thereof. This can be accomplished, for example, by immunofluorescence techniques employing a fluorescently labeled antibody coupled with light microscopic, flow cytometric, or fluorimetric detection.

[0494] In an additional preferred embodiment, antibodies, or fragments of antibodies directed to a conformational epitope of a polypeptide of the invention may be used to quantitatively or qualitatively detect the presence of gene products or conserved variants or peptide fragments thereof. This can be accomplished, for example, by immunofluorescence techniques employing a fluorescently labeled antibody coupled with light microscopic, flow cytometric, or fluorimetric detection.

[0495] The antibodies (or fragments thereof), and/or polypeptides of the present invention may, additionally, be employed histologically, as in immunofluorescence, immunoelectron microscopy or non-immunological assays, for in situ detection of gene products or conserved variants or peptide fragments thereof. In situ detection may be accomplished by removing a histological specimen from a patient, and applying thereto a labeled antibody or polypeptide of the present invention. The antibody (or fragment thereof) or polypeptide is preferably applied by overlaying the labeled antibody (or fragment) onto a biological sample. Through the use of such a procedure, it is possible to determine not only the presence of the gene product, or conserved variants or peptide fragments, or polypeptide binding, but also its distribution in the examined tissue. Using the present invention, those of ordinary skill will readily perceive that any of a wide variety of histological methods (such as staining procedures) can be modified in order to achieve such in situ detection.

[0496] Immunoassays and non-immunoassays for gene products or conserved variants or peptide fragments thereof will typically comprise incubating a sample, such as a biological fluid, a tissue extract, freshly harvested cells, or lysates of cells which have been incubated in cell culture, in the presence of a detectably labeled antibody capable of binding gene products or conserved variants or peptide fragments thereof, and detecting the bound antibody by any of a number of techniques well-known in the art.

[0497] The biological sample may be brought in contact with and immobilized onto a solid phase support or carrier such as nitrocellulose, or other solid support which is capable of immobilizing cells, cell particles or soluble proteins. The support may then be washed with suitable buffers followed by treatment with the detectably labeled antibody or detectable polypeptide of the invention. The solid phase support may then be washed with the buffer a second time to remove unbound antibody or polypeptide. Optionally the antibody is subsequently labeled. The amount of bound label on solid support may then be detected by conventional means.

[0498] By “solid phase support or carrier” is intended any support capable of binding an antigen or an antibody. Well-known supports or carriers include glass, polystyrene, polypropylene, polyethylene, dextran, nylon, amylases, natural and modified celluloses, polyacrylamides, gabbros, and magnetite. The nature of the carrier can be either soluble to some extent or insoluble for the purposes of the present invention. The support material may have virtually any possible structural configuration so long as the coupled molecule is capable of binding to an antigen or antibody. Thus, the support configuration may be spherical, as in a bead, or cylindrical, as in the inside surface of a test tube, or the external surface of a rod. Alternatively, the surface may be flat such as a sheet, test strip, etc. Preferred supports include polystyrene beads. Those skilled in the art will know many other suitable carriers for binding antibody or antigen, or will be able to ascertin the same by use of routine experimentation.

[0499] The binding activity of a given lot of antibody or antigen polypeptide may be determined according to well known methods. Those skilled in the art will be able to determine operative and optimal assay conditions for each determination by employing routine experimentation.

[0500] In addition to assaying polypeptide levels or polynucleotide levels in a biological sample obtained from an individual, polypeptide or polynucleotide can also be detected in vivo by imaging. For example, in one embodiment of the invention, polypeptides and/or antibodies of the invention are used to image diseased cells, such as neoplasms. In another embodiment, polynucleotides of the invention (e.g., polynucleotides complementary to all or a portion of an mRNA) and/or antibodies (e.g., antibodies directed to any one or a combination of the epitopes of a polypeptide of the invention, antibodies directed to a conformational epitope of a polypeptide of the invention, or antibodies directed to the full length polypeptide expressed on the cell surface of a mammalian cell) are used to image diseased or neoplastic cells.

[0501] Antibody labels or markers for in vivo imaging of polypeptides of the invention include those detectable by X-radiography, NMR, MRI, CAT-scans or ESR. For X-radiography, suitable labels include radioisotopes such as barium or cesium, which emit detectable radiation but are not overtly harmful to the subject. Suitable markers for NMR and ESR include those with a detectable characteristic spin, such as deuterium, which may be incorporated into the antibody by labeling of nutrients for the relevant hybridoma. Where in vivo imaging is used to detect enhanced levels of polypeptides for diagnosis in humans, it may be preferable to use human antibodies or “humanized” chimeric monoclonal antibodies. Such antibodies can be produced using techniques described herein or otherwise known in the art. For example methods for producing chimeric antibodies are known in the art. See, for review, Morrison, Science 229:1202 (1985); Oi et al., BioTechniques 4:214 (1986); Cabilly et al., U.S. Pat. No. 4,816,567; Taniguchi et al., EP 171496; Morrison et al., EP 173494; Neuberger et al., WO 8601533; Robinson et al., WO 8702671; Boulianne et al., Nature 312:643 (1984); Neuberger et al., Nature 314:268 (1985).

[0502] Additionally, any polypeptides of the invention whose presence can be detected, can be administered. For example, polypeptides of the invention labeled with a radio-opaque or other appropriate compound can be administered and visualized in vivo, as discussed, above for labeled antibodies. Further, such polypeptides can be utilized for in vitro diagnostic procedures.

[0503] A polypeptide-specific antibody or antibody fragment which has been labeled with an appropriate detectable imaging moiety, such as a radioisotope (for example, ¹³¹I, ¹¹²In, ^{99m}Tc), a radio-opaque substance, or a material detectable by nuclear magnetic resonance, is introduced (for example, parenterally, subcutaneously or intraperitoneally) into the mammal to be examined for a disorder. It will be understood in the art that the size of the subject and the imaging system used will determine the quantity of imaging moiety needed to produce diagnostic images. In the case of a radioisotope moiety, for a human subject, the quantity of radioactivity injected will normally range from about 5 to 20 millicuries of ^{99m}Tc. The labeled antibody or antibody fragment will then preferentially accumulate at the location of cells which contain the antigenic protein. In vivo tumor imaging is described in S. W. Burchiel et al., “Immunopharmacokinetics of Radiolabeled Antibodies and Their Fragments” (Chapter 13 in Tumor Imaging: The Radiochemical Detection of Cancer, S. W. Burchiel and B. A. Rhodes, eds., Masson Publishing Inc. (1982)).

[0504] With respect to antibodies, one of the ways in which an antibody of the present invention can be detectably labeled is by linking the same to a reporter enzyme and using the linked product in an enzyme immunoassay (EIA) (Voller, A., “The Enzyme Linked Immunosorbent Assay (ELISA)”, 1978, Diagnostic Horizons 2:1-7, Microbiological Associates Quarterly Publication, Walkersville, Md.); Voller et al., J. Clin. Pathol. 31:507-520 (1978); Butler, J. E., Meth. Enzymol. 73:482-523 (1981); Maggio, E. (ed.), 1980, Enzyme Immunoassay, CRC Press, Boca Raton, Fla.,; Ishikawa, E. et al., (eds.), 1981, Enzyme Immunoassay, Kgaku Shoin, Tokyo). The reporter enzyme which is bound to the antibody will react with an appropriate substrate, preferably a chromogenic substrate, in such a manner as to produce a chemical moiety which can be detected, for example, by spectrophotometric, fluorimetric or by visual means. Reporter enzymes which can be used to detectably label the antibody include, but are not limited to, malate dehydrogenase, staphylococcal nuclease, delta-5-steroid isomerase, yeast alcohol dehydrogenase, alpha-glycerophosphate, dehydrogenase, triose phosphate isomerase, horseradish peroxidase, alkaline phosphatase, asparaginase, glucose oxidase, beta-galactosidase, ribonuclease, urease, catalase, glucose-6-phosphate dehydrogenase, glucoamylase and acetylcholinesterase. Additionally, the detection can be accomplished by colorimetric methods which employ a chromogenic substrate for the reporter enzyme. Detection may also be accomplished by visual comparison of the extent of enzymatic reaction of a substrate in comparison with similarly prepared standards.

[0505] Detection may also be accomplished using any of a variety of other immunoassays. For example, by radioactively labeling the antibodies or antibody fragments, it is possible to detect polypeptides through the use of a radioimmunoassay (RIA) (see, for example, Weintraub, B., Principles of Radioimmunoassays, Seventh Training Course on Radioligand Assay Techniques, The Endocrine Society, March, 1986, which is incorporated by reference herein). The radioactive isotope can be detected by means including, but not limited to, a gamma counter, a scintillation counter, or autoradiography.

[0506] It is also possible to label the antibody with a fluorescent compound. When the fluorescently labeled antibody is exposed to light of the proper wave length, its presence can then be detected due to fluorescence. Among the most commonly used fluorescent labeling compounds are fluorescein isothiocyanate, rhodamine, phycoerythrin, phycocyanin, allophycocyanin, ophthaldehyde and fluorescamine.

[0507] The antibody can also be detectably labeled using fluorescence emitting metals such as ¹⁵²Eu, or others of the lanthanide series. These metals can be attached to the antibody using such metal chelating groups as diethylenetriaminepentacetic acid (DTPA) or ethylenediaminetetraacetic acid (EDTA).

[0508] The antibody also can be detectably labeled by coupling it to a chemiluminescent compound. The presence of the chemiluminescent-tagged antibody is then determined by detecting the presence of luminescence that arises during the course of a chemical reaction. Examples of particularly useful chemiluminescent labeling compounds are luminol, isoluminol, theromatic acridinium ester, imidazole, acridinium salt and oxalate ester.

[0509] Likewise, a bioluminescent compound may be used to label the antibody of the present invention. Bioluminescence is a type of chemiluminescence found in biological systems in, which a catalytic protein increases the efficiency of the chemiluminescent reaction. The presence of a bioluminescent protein is determined by detecting the presence of luminescence. Important bioluminescent compounds for purposes of labeling are luciferin, luciferase and aequorin.

[0510] Methods for Detecting Diseases

[0511] In general, a disease may be detected in a patient based on the presence of one or more proteins of the invention and/or polynucleotides encoding such proteins in a biological sample (for example, blood, sera, urine, and/or tumor biopsies) obtained from the patient. In other words, such proteins may be used as markers to indicate the presence or absence of a disease or disorder, including cancer and/or as described elsewhere herein. In addition, such proteins may be useful for the detection of other diseases and cancers. The binding agents provided herein generally permit detection of the level of antigen that binds to the agent in the biological sample. Polynucleotide primers and probes may be used to detect the level of mRNA encoding polypeptides of the invention, which is also indicative of the presence or absence of a disease or disorder, including cancer. In general, polypeptides of the invention should be present at a level that is at least three fold higher in diseased tissue than in normal tissue.

[0512] There are a variety of assay formats known to those of ordinary skill in the art for using a binding agent to detect polypeptide markers in a sample. See, e.g., Harlow and Lane, supra. In general, the presence or absence of a disease in a patient may be determined by (a) contacting a biological sample obtained from a patient with a binding agent; (b) detecting in the sample a level of polypeptide that binds to the binding agent; and (c) comparing the level of polypeptide with a predetermined cut-off value.

[0513] In a preferred embodiment, the assay involves the use of a binding agent(s) immobilized on a solid support to bind to and remove the polypeptide of the invention from the remainder of the sample. The bound polypeptide may then be detected using a detection reagent that contains a reporter group and specifically binds to the binding agent/polypeptide complex. Such detection reagents may comprise, for example, a binding agent that specifically binds to the polypeptide or an antibody or other agent that specifically binds to the binding agent, such as an anti-immunoglobulin, protein G, protein A or a lectin. Alternatively, a competitive assay may be utilized, in which a polypeptide is labeled with a reporter group and allowed to bind to the immobilized binding agent after incubation of the binding agent with the sample. The extent to which components of the sample inhibit the binding of the labeled polypeptide to the binding agent is indicative of the reactivity of the sample with the immobilized binding agent. Suitable polypeptides for use within such assays include polypeptides of the invention and portions thereof, or antibodies, to which the binding agent binds, as described above.

[0514] The solid support may be any material known to those of skill in the art to which polypeptides of the invention may be attached. For example, the solid support may be a test well in a microtiter plate or a nitrocellulose or other suitable membrane. Alternatively, the support may be a bead or disc, such as glass fiberglass, latex or a plastic material such as polystyrene or polyvinylchloride. The support may also be a magnetic particle or a fiber optic sensor, such as those disclosed, for example, in U.S. Pat. No. 5,359,681. The binding agent may be immobilized on the solid support using a variety of techniques known to those of skill in the art, which are amply described in the patent and scientific literature. In the context of the present invention, the term “immobilization” refers to both noncovalent association, such as adsorption, and covalent attachment (which may be a direct linkage between the agent and functional groups on the support or may be a linkage by way of a cross-inking agent). Immobilization by adsorption to a well in a microtiter plate or to a membrane is preferred. In such cases, adsorption may be achieved by contacting the binding agent, in a suitable buffer, with the solid support for the suitable amount of time. The contact time varies with temperature, but is typically between about 1 hour and about 1 day. In general, contacting a well of plastic microtiter plate (such as polystyrene or polyvinylchloride) with an amount of binding agent ranging from about 10 ng to about 10 ug, and preferably about 100 ng to about 1 ug, is sufficient to immobilize an adequate amount of binding agent.

[0515] Covalent attachment of binding agent to a solid support may generally be achieved by first reacting the support with a bifunctional reagent that will react with both the support and a functional group, such as a hydroxyl or amino group, on the binding agent. For example, the binding agent may be covalently attached to supports having an appropriate polymer coating using benzoquinone or by condensation of an aldehyde group on the support with an amine and an active hydrogen on the binding partner (see, e.g., Pierce Immunotechnology Catalog and Handbook, 1991, at A12-A13).

[0516] Gene Therapy Methods

[0517] Also encompassed by the invention are gene therapy methods for treating or preventing disorders, diseases and conditions. The gene therapy methods relate to the introduction of nucleic acid (DNA, RNA and antisense DNA or RNA) sequences into an animal to achieve expression of the polypeptide of the present invention. This method requires a polynucleotide which codes for a polypeptide of the present invention operatively linked to a promoter and any other genetic elements necessary for the expression of the polypeptide by the target tissue. Such gene therapy and delivery techniques are known in the art, see, for example, WO90/11092, which is herein incorporated by reference.

[0518] Thus, for example, cells from a patient may be engineered with a polynucleotide (DNA or RNA) comprising a promoter operably linked to a polynucleotide of the present invention ex vivo, with the engineered cells then being provided to a patient to be treated with the polypeptide of the present invention. Such methods are well-known in the art. For example, see Belldegrun, A., et al., J. Natl. Cancer Inst. 85: 207-216 (1993); Ferrantini, M. et al., Cancer Research 53: 1107-1112 (1993); Ferrantini, M. et al., J. Immunology 153: 4604-4615 (1994); Kaido, T., et al., Int. J. Cancer 60: 221-229 (1995); Ogura, H., et al., Cancer Research 50: 5102-5106 (1990); Santodonato, L., et al., Human Gene Therapy 7:1-10 (1996); Santodonato, L., et al., Gene Therapy 4:1246-1255 (1997); and Zhang, J.-F. et al., Cancer Gene Therapy 3: 31-38 (1996)), which are herein incorporated by reference. In one embodiment, the cells which are engineered are arterial cells. The arterial cells may be reintroduced into the patient through direct injection to the artery, the tissues surrounding the artery, or through catheter injection.

[0519] As discussed in more detail below, the polynucleotide constructs can be delivered by any method that delivers injectable materials to the cells of an animal, such as, injection into the interstitial space of tissues (heart, muscle, skin, lung, liver, and the like). The polynucleotide constructs may be delivered in a pharmaceutically acceptable liquid or aqueous carrier.

[0520] In one embodiment, the polynucleotide of the present invention is delivered as a naked polynucleotide. The term “naked” polynucleotide, DNA or RNA refers to sequences that are free from any delivery vehicle that acts to assist, promote or facilitate entry into the cell, including viral sequences, viral particles, liposome formulations, lipofectin or precipitating agents and the like. However, the polynucleotide of the present invention can also be delivered in liposome formulations and lipofectin formulations and the like can be prepared by methods well known to those skilled in the art. Such methods are described, for example, in U.S. Pat. Nos. 5,593,972, 5,589,466, and 5,580,859, which are herein incorporated by reference.

[0521] The polynucleotide vector constructs used in the gene therapy method are preferably constructs that will not integrate into the host genome nor will they contain sequences that allow for replication. Appropriate vectors include pWLNEO, pSV2CAT, pOG44, pXT1 and pSG available from Stratagene; pSVK3, pBPV, pMSG and pSVL available from Pharmacia; and pEF1/V5, pcDNA3.1, and pRc/CMV2 available from Invitrogen. Other suitable vectors will be readily apparent to the skilled artisan.

[0522] Any strong promoter known to those skilled in the art can be used for driving the expression of the polynucleotide sequence. Suitable promoters include adenoviral promoters, such as the adenoviral major late promoter; or heterologous promoters, such as the cytomegalovirus (CMV) promoter, the respiratory syncytial virus (RSV) promoter, inducible promoters, such as the MMT promoter, the metallothionein promoter, heat shock promoters; the albumin promoter; the ApoAI promoter; human globin promoters; viral thymidine kinase promoters, such as the Herpes Simplex thymidine kinase promoter; retroviral LTRs; the b-actin promoter; and human growth hormone promoters. The promoter also may be the native promoter for the polynucleotide of the present invention.

[0523] Unlike other gene therapy techniques, one major advantage of introducing naked nucleic acid sequences into target cells is the transitory nature of the polynucleotide synthesis in the cells. Studies have shown that non-replicating DNA sequences can be introduced into cells to provide production of the desired polypeptide for periods of up to six months.

[0524] The polynucleotide construct can be delivered to the interstitial space of tissues within the an animal, including of muscle, skin, brain, lung, liver, spleen, bone marrow, thymus, heart, lymph, blood, bone, cartilage, pancreas, kidney, gall bladder, stomach, intestine, testis, ovary, uterus, rectum, nervous system, eye, gland, and connective tissue. Interstitial space of the tissues comprises the intercellular, fluid, mucopolysaccharide matrix among the reticular fibers of organ tissues, elastic fibers in the walls of vessels or chambers, collagen fibers of fibrous tissues, or that same matrix within connective tissue ensheathing muscle cells or in the lacunae of bone. It is similarly the space occupied by the plasma of the circulation and the lymph fluid of the lymphatic channels. Delivery to the interstitial space of muscle tissue is preferred for the reasons discussed below. They may be conveniently delivered by injection into the tissues comprising these cells. They are preferably delivered to and expressed in persistent, non-dividing cells which are differentiated, although delivery and expression may be achieved in non-differentiated or less completely differentiated cells, such as, for example, stem cells of blood or skin fibroblasts. In vivo muscle cells are particularly competent in their ability to take up and express polynucleotides.

[0525] For the naked nucleic acid sequence injection, an effective dosage amount of DNA or RNA will be in the range of from about 0.05 mg/kg body weight to about 50 mg/kg body weight. Preferably the dosage will be from about 0.005 mg/kg to about 20 mg/kg and more preferably from about 0.05 mg/kg to about 5 mg/kg. Of course, as the artisan of ordinary skill will appreciate, this dosage will vary according to the tissue site of injection. The appropriate and effective dosage of nucleic acid sequence can readily be determined by those of ordinary skill in the art and may depend on the condition being treated and the route of administration.

[0526] The preferred route of administration is by the parenteral route of injection into the interstitial space of tissues. However, other parenteral routes may also be used, such as, inhalation of an aerosol formulation particularly for delivery to lungs or bronchial tissues, throat or mucous membranes of the nose. In addition, naked DNA constructs can be delivered to arteries during angioplasty by the catheter used in the procedure.

[0527] The naked polynucleotides are delivered by any method known in the art, including, but not limited to, direct needle injection at the delivery site, intravenous injection, topical administration, catheter infusion, and so-called “gene guns”. These delivery methods are known in the art.

[0528] The constructs may also be delivered with delivery vehicles such as viral sequences, viral particles, liposome formulations, lipofectin, precipitating agents, etc. Such methods of delivery are known in the art.

[0529] In certain embodiments, the polynucleotide constructs are complexed in a liposome preparation. Liposomal preparations for use in the instant invention include cationic (positively charged), anionic (negatively charged) and neutral preparations. However, cationic liposomes are particularly preferred because a tight charge complex can be formed between the cationic liposome and the polyanionic nucleic acid. Cationic liposomes have been shown to mediate intracellular delivery of plasmid DNA (Felgner et al., Proc. Natl. Acad. Sci. USA (1987) 84:7413-7416, which is herein incorporated by reference); mRNA (Malone et al., Proc. Natl. Acad. Sci. USA (1989) 86:6077-6081, which is herein incorporated by reference); and purified transcription factors (Debs et al., J. Biol. Chem. (1990) 265:10189-10192, which is herein incorporated by reference), in functional form.

[0530] Cationic liposomes are readily available. For example, N[1-2,3-dioleyloxy)propyl]-N,N,N-triethylammonium (DOTMA) liposomes are particularly useful and are available under the trademark Lipofectin, from GIBCO BRL, Grand Island, N.Y. (See, also, Felgner et al., Proc. Natl. Acad. Sci. USA (1987) 84:7413-7416, which is herein incorporated by reference). Other commercially available liposomes include transfectace (DDAB/DOPE) and DOTAP/DOPE (Boehringer).

[0531] Other cationic liposomes can be prepared from readily available materials using techniques well known in the art. See, e.g. PCT Publication No. WO 90/11092 (which is herein incorporated by reference) for a description of the synthesis of DOTAP (1,2-bis(oleoyloxy)-3-(trimethylammonio)propane) liposomes. Preparation of DOTMA liposomes is explained in the literature, see, e.g., P. Felgner et al., Proc. Natl. Acad. Sci. USA 84:7413-7417, which is herein incorporated by reference. Similar methods can be used to prepare liposomes from other cationic lipid materials.

[0532] Similarly, anionic and neutral liposomes are readily available, such as from Avanti Polar Lipids (Birmingham, Ala.), or can be easily prepared using readily available materials. Such materials include phosphatidyl, choline, cholesterol, phosphatidyl ethanolamine, dioleoylphosphatidyl choline (DOPC), dioleoylphosphatidyl glycerol (DOPG), dioleoylphoshatidyl ethanolamine (DOPE), among others. These materials can also be mixed with the DOTMA and DOTAP starting materials in appropriate ratios. Methods for making liposomes using these materials are well known in the art.

[0533] For example, commercially dioleoylphosphatidyl choline (DOPC), dioleoylphosphatidyl glycerol (DOPG), and dioleoylphosphatidyl ethanolamine (DOPE) can be used in various combinations to make conventional liposomes, with or without the addition of cholesterol. Thus, for example, DOPG/DOPC vesicles can be prepared by drying 50 mg each of DOPG and DOPC under a stream of nitrogen gas into a sonication vial. The sample is placed under a vacuum pump overnight and is hydrated the following day with deionized water. The sample is then sonicated for 2 hours in a capped vial, using a Heat Systems model 350 sonicator equipped with an inverted cup (bath type) probe at the maximum setting while the bath is circulated at 15EC. Alternatively, negatively charged vesicles can be prepared without sonication to produce multilamellar vesicles or by extrusion through nucleopore membranes to produce unilamellar vesicles of discrete size. Other methods are known and available to those of skill in the art.

[0534] The liposomes can comprise multilamellar vesicles (MLVs), small unilamellar vesicles (SUVs), or large unilamellar vesicles (LUVs), with SUVs being preferred. The various liposome-nucleic acid complexes are prepared using methods well known in the art. See, e.g., Straubinger et al., Methods of Immunology (1983), 101:512-527, which is herein incorporated by reference. For example, MLVs containing nucleic acid can be prepared by depositing a thin film of phospholipid on the walls of a glass tube and subsequently hydrating with a solution of the material to be encapsulated. SUVs are prepared by extended sonication of MLVs to produce a homogeneous population of unilamellar liposomes. The material to be entrapped is added to a suspension of preformed MLVs and then sonicated. When using liposomes containing cationic lipids, the dried lipid film is resuspended in an appropriate solution such as sterile water or an isotonic buffer solution such as 10 mM Tris/NaCl, sonicated, and then the preformed liposomes are mixed directly with the DNA. The liposome and DNA form a very stable complex due to binding of the positively charged liposomes to the cationic DNA. SUVs find use with small nucleic acid fragments. LUVs are prepared by a number of methods, well known in the art. Commonly used methods include Ca²⁺-EDTA chelation (Papahadjopoulos et al., Biochim. Biophys. Acta (1975) 394:483; Wilson et al., Cell 17:77 (1979)); ether injection (Deamer, D. and Bangham, A., Biochim. Biophys. Acta 443:629 (1976); Ostro et al., Biochem. Biophys. Res. Commun. 76:836 (1977); Fraley et al., Proc. Natl. Acad. Sci. USA 76:3348 (1979)); detergent dialysis (Enoch, H. and Strittmatter, P., Proc. Natl. Acad. Sci. USA 76-145 (1979)); and reverse-phase evaporation (REV) (Fraley et al., J. Biol. Chem. 255:10431 (1980); Szoka, F. and Papahadjopoulos, D., Proc. Natl. Acad. Sci. USA 75:145 (1978); Schaefer-Ridder et al., Science 215:166 (1982)), which are herein incorporated by reference.

[0535] Generally, the ratio of DNA to liposomes will be from about 10:1 to about 1:10. Preferably, the ration will be from about 5:1 to about 1:5. More preferably, the ration will be about 3:1 to about 1:3. Still more preferably, the ratio will be about 1:1.

[0536] U.S. Pat. No. 5,676,954 (which is herein incorporated by reference) reports on the injection of genetic material, complexed with cationic liposomes carriers, into mice. U.S. Pat. Nos. 4,897,355, 4,946,787, 5,049,386, 5,459,127, 5,589,466, 5,693,622, 5,580,859, 5,703,055, and international publication no. WO 94/9469 (which are herein incorporated by reference) provide cationic lipids for use in transfecting DNA into cells and mammals. U.S. Pat. Nos. 5,589,466, 5,693,622, 5,580,859, 5,703,055, and international publication no. WO 94/9469 provide methods for delivering DNA-cationic lipid complexes to mammals.

[0537] In certain embodiments, cells are engineered, ex vivo or in vivo, using a retroviral particle containing RNA which comprises a sequence encoding a polypeptide of the present invention. Retroviruses from which the retroviral plasmid vectors may be derived include, but are not limited to, Moloney Murine Leukemia Virus, spleen necrosis virus, Rous sarcoma Virus, Harvey Sarcoma Virus, avian leukosis virus, gibbon ape leukemia virus, human immunodeficiency virus, Myeloproliferative Sarcoma Virus, and mammary tumor virus.

[0538] The retroviral plasmid vector is employed to transduce packaging cell lines to form producer cell lines. Examples of packaging cells which may be transfected include, but are not limited to, the PE501, PA317, R-2, R-AM, PA12, T19-14X, VT-19-17-H2, RCRE, RCRIP, GP+E-86, GP+envAm12, and DAN cell lines as described in Miller, Human Gene Therapy 1:5-14 (1990), which is incorporated herein by reference in its entirety. The vector may transduce the packaging cells through any means known in the art. Such means include, but are not limited to, electroporation, the use of liposomes, and CaPO₄ precipitation. In one alternative, the retroviral plasmid vector may be encapsulated into a liposome, or coupled to a lipid, and then administered to a host.

[0539] The producer cell line generates infectious retroviral vector particles which include polynucleotide encoding a polypeptide of the present invention. Such retroviral vector particles then may be employed, to transduce eukaryotic cells, either in vitro or in vivo. The transduced eukaryotic cells will express a polypeptide of the present invention.

[0540] In certain other embodiments, cells are engineered, ex vivo or in vivo, with polynucleotide contained in an adenovirus vector. Adenovirus can be manipulated such that it encodes and expresses a polypeptide of the present invention, and at the same time is inactivated in terms of its ability to replicate in a normal lytic viral life cycle. Adenovirus expression is achieved without integration of the viral DNA into the host cell chromosome, thereby alleviating concerns about insertional mutagenesis. Furthermore, adenoviruses have been used as live enteric vaccines for many years with an excellent safety profile (Schwartz et al. As Rev. Respir. Dis. 109:233-238 (1974)). Finally, adenovirus mediated gene transfer has been demonstrated in a number of instances including transfer of alpha-1-antitrypsin and CFTR to the lungs of cotton rats (Rosenfeld, M. A. et al. (1991) Science 252:431-434; Rosenfeld et al., (1992) Cell 68:143-155). Furthermore, extensive studies to attempt to establish adenovirus as a causative agent in human cancer were uniformly negative (Green, M. et al. (1979) Proc. Natl. Acad. Sci. USA 76:6606).

[0541] Suitable adenoviral vectors useful in the present invention are described, for example, in Kozarsky and Wilson, Curr. Opin. Genet Devel. 3:499-503 (1993); Rosenfeld et al., Cell 68:143-155 (1992); Engelhardt et al., Human Genet. Ther. 4:759-769 (1993); Yang et al., Nature Genet. 7:362-369 (1994); Wilson et al., Nature 365:691-692 (1993); and U.S. Pat. No. 5,652,224, which are herein incorporated by reference. For example, the adenovirus vector Ad2 is useful and can be grown in human 293 cells. These cells contain the E1 region of adenovirus and constitutively express E1a and E1b, which complement the defective adenoviruses by providing the products of the genes deleted from the vector. In addition to Ad2, other varieties of adenovirus (e.g., Ad3, Ad5, and Ad7) are also useful in the present invention.

[0542] Preferably, the adenoviruses used in the present invention are replication deficient. Replication deficient adenoviruses require the aid of a helper virus and/or packaging cell line to form infectious particles. The resulting virus is capable of infecting cells and can express a polynucleotide of interest which is operably linked to a promoter, but cannot replicate in most cells. Replication deficient adenoviruses may be deleted in one or more of all or a portion of the following genes: E1a, E1b, E3, E4, E2a, or L1 through L5.

[0543] In certain other embodiments, the cells are engineered, ex vivo or in vivo, using an adeno-associated virus (AAV). AAVs are naturally occurring defective viruses that require helper viruses to produce infectious particles (Muzyczka, N., Curr. Topics in Microbiol. Immunol. 158:97 (1992)). It is also one of the few viruses that may integrate its DNA into non-dividing cells. Vectors containing as little as 300 base pairs of AAV can be packaged and can integrate, but space for exogenous DNA is limited to about 4.5 kb. Methods for producing and using such AAVs are known in the art. See, for example, U.S. Pat. Nos. 5,139,941, 5,173,414, 5,354,678, 5,436,146, 5,474,935, 5,478,745, and 5,589,377.

[0544] For example, an appropriate AAV vector for use in the present invention will include all the sequences necessary for DNA replication, encapsidation, and host-cell integration. The polynucleotide construct is inserted into the AAV vector using standard cloning methods, such as those found in Sambrook et al., Molecular Cloning: A Laboratory Manual, Cold Spring Harbor Press (1989). The recombinant AAV vector is then transfected into packaging cells which are infected with a helper virus, using any standard technique, including lipofection, electroporation, calcium phosphate precipitation, etc. Appropriate helper viruses include adenoviruses, cytomegaloviruses, vaccinia viruses, or herpes viruses. Once the packaging cells are transfected and infected, they will produce infectious AAV viral particles which contain the polynucleotide construct. These viral particles are then used to transduce eukaryotic cells, either ex vivo or in vivo. The transduced cells will contain the polynucleotide construct integrated into its genome, and will express a polypeptide of the invention.

[0545] Another method of gene therapy involves operably associating heterologous control regions and endogenous polynucleotide sequences (e.g. encoding a polypeptide of the present invention) via homologous recombination (see, e.g., U.S. Pat. No. 5,641,670, issued Jun. 24, 1997; International Publication No. WO 96/29411, published Sep. 26, 1996; International Publication No. WO 94/12650, published Aug. 4, 1994; Koller et al., Proc. Natl. Acad. Sci. USA 86:8932-8935 (1989); and Zijlstra et al., Nature 342:435-438 (1989), which are herein encorporated by reference. This method involves the activation of a gene which is present in the target cells, but which is not normally expressed in the cells, or is expressed at a lower level than desired.

[0546] Polynucleotide constructs are made, using standard techniques known in the art, which contain the promoter with targeting sequences flanking the promoter. Suitable promoters are described herein. The targeting sequence is sufficiently complementary to an endogenous sequence to permit homologous recombination of the promoter-targeting sequence with the endogenous sequence. The targeting sequence will be sufficiently near the 5′ end of the desired endogenous polynucleotide sequence so the promoter will be operably linked to the endogenous sequence upon homologous recombination.

[0547] The promoter and the targeting sequences can be amplified using PCR. Preferably, the amplified promoter contains distinct restriction enzyme sites on the 5′ and 3′ ends. Preferably, the 3′ end of the first targeting sequence contains the same restriction enzyme site as the 5′ end of the amplified promoter and the 5′ end of the second targeting sequence contains the same restriction site as the 3′ end of the amplified promoter. The amplified promoter and targeting sequences are digested and ligated together.

[0548] The promoter-targeting sequence construct is delivered to the cells, either as naked polynucleotide, or in conjunction with transfection-facilitating agents, such as liposomes, viral sequences, viral particles, whole viruses, lipofection, precipitating agents, etc., described in more detail above. The P promoter-targeting sequence can be delivered by any method, included direct needle injection, intravenous injection, topical administration, catheter infusion, particle accelerators, etc. The methods are described in more detail below.

[0549] The promoter-targeting sequence construct is taken up by cells. Homologous recombination between the construct and the endogenous sequence takes place, such that an endogenous sequence is placed under the control of the promoter. The promoter then drives the expression of the endogenous sequence.

[0550] The polynucleotide encoding a polypeptide of the present invention may contain a secretory signal sequence that facilitates secretion of the protein. Typically, the signal sequence is positioned in the coding region of the polynucleotide to be expressed towards or at the 5′ end of the coding region. The signal sequence may be homologous or heterologous to the polynucleotide of interest and may be homologous or heterologous to the cells to be transfected. Additionally, the signal sequence may be chemically synthesized using methods known in the art.

[0551] Any mode of administration of any of the above-described polynucleotides constructs can be used so long as the mode results in the expression of one or more molecules in an amount sufficient to provide a therapeutic effect. This includes direct needle injection, systemic injection, catheter infusion, biolistic injectors, particle accelerators (i.e., “gene guns”), gelfoam sponge depots, other commercially available depot materials, osmotic pumps (e.g., Alza minipumps), oral or suppositorial solid (tablet or pill) pharmaceutical formulations, and decanting or topical applications during surgery. For example, direct injection of naked calcium phosphate-precipitated plasmid into rat liver and rat spleen or a protein-coated plasmid into the portal vein has resulted in gene expression of the foreign gene in the rat livers (Kaneda et al., Science 243:375 (1989)).

[0552] A preferred method of local administration is by direct injection. Preferably, a recombinant molecule of the present invention complexed with a delivery vehicle is administered by direct injection into or locally within the area of arteries. Administration of a composition locally within the area of arteries refers to injecting the composition centimeters and preferably, millimeters within arteries.

[0553] Another method of local administration is to contact a polynucleotide construct of the present invention in or around a surgical wound. For example, a patient can undergo surgery and the polynucleotide construct can be coated on the surface of tissue inside the wound or the construct can be injected into areas of tissue inside the wound.

[0554] Therapeutic compositions useful in systemic administration, include recombinant molecules of the present invention complexed to a targeted delivery vehicle of the present invention. Suitable delivery vehicles for use with systemic administration comprise liposomes comprising ligands for targeting the vehicle to a particular site. In specific embodiments, suitable delivery vehicles for use with systemic administration comprise liposomes comprising polypeptides of the invention for targeting the vehicle to a particular site.

[0555] Preferred methods of systemic administration, include intravenous injection, aerosol, oral and percutaneous (topical) delivery. Intravenous injections can be performed using methods standard in the art. Aerosol delivery can also be performed using methods standard in the art (see, for example, Stribling et al., Proc. Natl. Acad. Sci. USA 189:11277-11281, 1992, which is incorporated herein by reference). Oral delivery can be performed by complexing a polynucleotide construct of the present invention to a carrier capable of withstanding degradation by digestive enzymes in the gut of an animal. Examples of such carriers, include plastic capsules or tablets, such as those known in the art. Topical delivery can be performed by mixing a polynucleotide construct of the present invention with a lipophilic reagent (e.g., DMSO) that is capable of passing into the skin.

[0556] Determining an effective amount of substance to be delivered can depend upon a number of factors including, for example, the chemical structure and biological activity of the substance, the age and weight of the animal, the precise condition requiring treatment and its severity, and the route of administration. The frequency of treatments depends upon a number of factors, such as the amount of polynucleotide constructs administered per dose, as well as the health and history of the subject. The precise amount, number of doses, and timing of doses will be determined by the attending physician or veterinarian.

[0557] Therapeutic compositions of the present invention can be administered to any animal, preferably to mammals and birds. Preferred mammals include humans, dogs, cats, mice, rats, rabbits sheep, cattle, horses and pigs, with humans being particularly preferred.

[0558] Biological Activities

[0559] Polynucleotides or polypeptides, or agonists or antagonists of the present invention, can be used in assays to test for one or more biological activities. If these polynucleotides or polypeptides, or agonists or antagonists of the present invention, do exhibit activity in a particular assay, it is likely that these molecules may be involved in the diseases associated with the biological activity. Thus, the polynucleotides and polypeptides, and agonists or antagonists could be used to treat the associated disease.

[0560] Members of the secreted family of proteins are believed to be involved in biological activities associated with, for example, cellular signaling. Accordingly, compositions of the invention (including polynucleotides, polypeptides and antibodies of the invention, and fragments and variants thereof) may be used in diagnosis, prognosis, prevention and/or treatment of diseases and/or disorders associated with aberrant activity of secreted polypeptides.

[0561] In preferred embodiments, compositions of the invention (including polynucleotides, polypeptides and antibodies of the invention, and fragments and variants thereof) may be used in the diagnosis, prognosis, prevention, treatment, and/or amelioration of cancer and other hyperproliferative diseases and/or disorders (e.g., as described in the “Hyperproliferative Disorders”). In certain embodiments, a polypeptide of the invention, or polynucleotides, antibodies, agonists, or antagonists corresponding to that polypeptide, may be used to diagnose and/or prognosticate diseases and/or disorders associated with the tissue(s) in which the polypeptide of the invention is expressed including one, two, three, four, five, or more tissues disclosed in Table 1B.2, column 5 (Tissue Distribution Library Code).

[0562] Thus, polynucleotides, translation products and antibodies of the invention are useful in the diagnosis, detection, prevention, prognistication, and/or treatment of diseases and/or disorders associated with activities that include, but are not limited to, prohormone activation, neurotransmitter activity, cellular signaling, cellular proliferation, cellular differentiation, and cell migration.

[0563] More generally, polynucleotides, translation products and antibodies corresponding to this gene may be useful for the diagnosis, prognosis, prevention, treatment and/or amelioration of diseases and/or disorders associated with the following system or systems.

[0564] Immune Activity

[0565] Polynucleotides, polypeptides, antibodies, and/or agonists or antagonists of the present invention may be useful in preventing, diagnosing, prognosticating, treating, and/or ameliorating diseases, disorders, and/or conditions of the immune system, by, for example, activating or inhibiting the proliferation, differentiation, or mobilization (chemotaxis) of immune cells. Immune cells develop through a process called hematopoiesis, producing myeloid (platelets, red blood cells, neutrophils, and macrophages) and lymphoid (B and T lymphocytes) cells from pluripotent stem cells. The etiology of these immune diseases, disorders, and/or conditions may be genetic, somatic, such as cancer and some autoimmune diseases, acquired (e.g., by chemotherapy or toxins), or infectious. Moreover, polynucleotides, polypeptides, antibodies, and/or agonists or antagonists of the present invention can be used as a marker or detector of a particular immune system disease or disorder.

[0566] In another embodiment, a polypeptide of the invention, or polynucleotides, antibodies, agonists, or antagonists corresponding to that polypeptide, may be used to treat diseases and disorders of the immune system and/or to inhibit or enhance an immune response generated by cells associated with the tissue(s) in which the polypeptide of the invention is expressed, including one, two, three, four, five, or more tissues disclosed in Table 1B.2, column 5 (Tissue Distribution Library Code).

[0567] Polynucleotides, polypeptides, antibodies, and/or agonists or antagonists of the present invention may be useful in preventing, diagnosing, prognosticating, treating and/or ameliorating immunodeficiencies, including both congenital and acquired immunodeficiencies. Examples of B cell immunodeficiencies in which immunoglobulin levels B cell function and/or B cell numbers are decreased include: X-linked agammaglobulinemia (Bruton's disease), X-linked infantile agammaglobulinemia, X-linked immunodeficiency with hyper IgM, non X-linked immunodeficiency with hyper IgM, X-linked lymphoproliferative syndrome (XLP), agammaglobulinemia including congenital and acquired agammaglobulinemia, adult onset agammaglobulinemia, late-onset agammaglobulinemia, dysgammaglobulinemia, hypogammaglobulinemia, unspecified hypogammaglobulinemia, recessive agammaglobulinemia (Swiss type), Selective IgM deficiency, selective IgA deficiency, selective IgG subclass deficiencies, IgG subclass deficiency (with or without IgA deficiency), Ig deficiency with increased IgM IgG and IgA deficiency with increased IgM, antibody deficiency with normal or elevated Igs, Ig heavy chain deletions, kappa chain deficiency, B cell lymphoproliferative disorder (BLPD), common variable immunodeficiency (CVID), common variable immunodeficiency (CVI) (acquired), and transient hypogammaglobulinemia of infancy.

[0568] In specific embodiments, ataxia-telangiectasia or conditions associated with ataxia-telangiectasia are detected, prevented, diagnosed, prognosticated, treated, and/or ameliorated using the polypeptides or polynucleotides of the invention, and/or agonists or antagonists thereof.

[0569] Examples of congenital immunodeficiencies in which T cell and/or B cell function and/or number is decreased include, but are not limited to: DiGeorge anomaly, severe combined immunodeficiencies (SCID) (including, but not limited to, X-linked SCID, autosomal recessive SCID, adenosine deaminase deficiency, purine nucleoside phosphorylase (PNP) deficiency, Class II MHC deficiency (Bare lymphocyte syndrome), Wiskott-Aldrich syndrome, and ataxia telangiectasia), thymic hypoplasia, third and fourth pharyngeal pouch syndrome, 22q11.2 deletion, chronic mucocutaneous candidiasis, natural killer cell deficiency (NK), idiopathic CD4+ T-lymphocytopenia, immunodeficiency with predominant T cell defect (unspecified), and unspecified immunodeficiency of cell mediated immunity.

[0570] In specific embodiments, DiGeorge anomaly or conditions associated with DiGeorge anomaly are prevented, detected, diagnosed, prognosticated, treated and/or ameliorated using polypeptides or polynucleotides of the invention, or antagonists or agonists thereof.

[0571] Other immunodeficiencies that may be prevented, detected, diagnosed, prognosticated, treated and/or ameliorated using polypeptides or polynucleotides of the invention, and/or agonists or antagonists thereof, include, but are not limited to, chronic granulomatous disease, Chediak-Higashi syndrome, myeloperoxidase deficiency, leukocyte glucose-6-phosphate dehydrogenase deficiency, X-linked lymphoproliferative syndrome (XLP), leukocyte adhesion deficiency, complement component deficiencies (including C1, C2, C3, C4, C5, C6, C7, C8 and/or C9 deficiencies), reticular dysgenesis, thymic alymphoplasia-aplasia, immunodeficiency with thymoma, severe congenital leukopenia, dysplasia with immunodeficiency, neonatal neutropenia, short limbed dwarfism, and Nezelof syndrome-combined immunodeficiency with Igs.

[0572] In a preferred embodiment, the immunodeficiencies and/or conditions associated with the immunodeficiencies recited above are prevented, detected, diagnosed, prognosticated, treated and/or ameliorated using polynucleotides, polypeptides, antibodies, and/or agonists or antagonists of the present invention.

[0573] In a preferred embodiment polynucleotides, polypeptides, antibodies, and/or agonists or antagonists of the present invention could be used as an agent to boost immunoresponsiveness among immunodeficient individuals. In specific embodiments, polynucleotides, polypeptides, antibodies, and/or agonists or antagonists of the present invention could be used as an agent to boost immunoresponsiveness among B cell and/or T cell immunodeficient individuals.

[0574] The polynucleotides, polypeptides, antibodies, and/or agonists or antagonists of the present invention may be useful in preventing, detecting, diagnosing, prognosticating, treating and/or ameliorating autoimmune disorders. Many autoimmune disorders result from inappropriate recognition of self as foreign material by immune cells. This inappropriate recognition results in an immune response leading to the destruction of the host tissue. Therefore, the administration of polynucleotides and polypeptides of the invention that can inhibit an immune response, particularly the proliferation, differentiation, or chemotaxis of T-cells, may be an effective therapy in preventing autoimmune disorders.

[0575] Autoimmune diseases or disorders that may be prevented, detected, diagnosed, prognosticated, treated, and/or ameliorated by polynucleotides, polypeptides, antibodies, and/or agonists or antagonists of the present invention include, but are not limited to, one or more of the following: systemic lupus erythematosus, rheumatoid arthritis, ankylosing spondylitis, multiple sclerosis, autoimmune thyroiditis, Hashimoto's thyroiditis, autoimmune hemolytic anemia, hemolytic anemia, thrombocytopenia, autoimmune thrombocytopenia purpura, autoimmune neonatal thrombocytopenia, idiopathic thrombocytopenia purpura, purpura (e.g., Henloch-Scoenlein purpura), autoimmunocytopenia, Goodpasture's syndrome, Pemphigus vulgaris, myasthenia gravis, Grave's disease (hyperthyroidism), and insulin-resistant diabetes mellitus.

[0576] Additional disorders that are likely to have an autoimmune component that may be prevented, detected, diagnosed, prognosticated, treated and/or ameliorated with the compositions of the invention include, but are not limited to, type II collagen-induced arthritis, antiphospholipid syndrome, dermatitis, allergic encephalomyelitis, myocarditis, relapsing polychondritis, rheumatic heart disease, neuritis, uveitis ophthalmia, polyendocrinopathies, Reiter's Disease, Stiff-Man Syndrome, autoimmune pulmonary inflammation, autism, Guillain-Barre Syndrome, insulin dependent diabetes mellitus, and autoimmune inflammatory eye disorders.

[0577] Additional disorders that are likely to have an autoimmune component that may be prevented, detected, diagnosed, prognosticated, treated and/or ameliorated with the compositions of the invention include, but are not limited to, scleroderma with anti-collagen antibodies (often characterized, e.g., by nucleolar and other nuclear antibodies), mixed connective tissue disease (often characterized, e.g., by antibodies to extractable nuclear antigens (e.g., ribonucleoprotein)), polymyositis (often characterized, e.g., by nonhistone ANA), pernicious anemia (often characterized, e.g., by antiparietal cell, microsomes, and intrinsic factor antibodies), idiopathic Addison's disease (often characterized, e.g., by humoral and cell-mediated adrenal cytotoxicity, infertility (often characterized, e.g., by antispermatozoal antibodies), glomerulonephritis (often characterized, e.g., by glomerular basement membrane antibodies or immune complexes), bullous pemphigoid (often characterized, e.g., by IgG and complement in basement membrane), Sjogren's syndrome (often characterized, e.g., by multiple tissue antibodies, and/or a specific nonhistone ANA (SS-B)), diabetes mellitus (often characterized, e.g., by cell-mediated and humoral islet cell antibodies), and adrenergic drug resistance (including adrenergic drug resistance with asthma or cystic fibrosis) (often characterized, e.g., by beta-adrenergic receptor antibodies).

[0578] Additional disorders that may have an autoimmune component that may be prevented, detected, diagnosed, prognosticated, treated and/or ameliorated with the compositions of the invention include, but are not limited to, chronic active hepatitis (often characterized, e.g., by smooth muscle antibodies), primary biliary cirrhosis (often characterized, e.g., by mitochondria antibodies), other endocrine gland failure (often characterized, e.g., by specific tissue antibodies in some cases), vitiligo (often characterized, e.g., by melanocyte antibodies), vasculitis (often characterized, e.g., by Ig and complement in vessel walls and/or low serum complement), post-MI (often characterized, e.g., by myocardial antibodies), cardiotomy syndrome (often characterized, e.g., by myocardial antibodies), urticaria (often characterized, e.g., by IgG and IgM antibodies to IgE), atopic dermatitis (often characterized, e.g., by IgG and IgM antibodies to IgE), asthma (often characterized, e.g., by IgG and IgM antibodies to IgE), and many other inflammatory, granulomatous, degenerative, and atrophic disorders.

[0579] In a preferred embodiment, the autoimmune diseases and disorders and/or conditions associated with the diseases and disorders recited above are prevented, detected, diagnosed, prognosticated, treated and/or ameliorated using for example, antagonists or agonists, polypeptides or polynucleotides, or antibodies of the present invention. In a specific preferred embodiment, rheumatoid arthritis is prevented, detected, diagnosed, prognosticated, treated and/or ameliorated using polynucleotides, polypeptides, antibodies, and/or agonists or antagonists of the present invention.

[0580] In another specific preferred embodiment, systemic lupus erythematosus is prevented, detected, diagnosed, prognosticated, treated and/or ameliorated using polynucleotides, polypeptides, antibodies, and/or agonists or antagonists of the present invention. In another specific preferred embodiment, idiopathic thrombocytopenia purpura is prevented, detected, diagnosed, prognosticated, treated and/or ameliorated using polynucleotides, polypeptides, antibodies, and/or agonists or antagonists of the present invention.

[0581] In another specific preferred embodiment IgA nephropathy is prevented, detected, diagnosed, prognosticated, treated and/or ameliorated using polynucleotides, polypeptides, antibodies, and/or agonists or antagonists of the present invention.

[0582] In a preferred embodiment, the autoimmune diseases and disorders and/or conditions associated with the diseases and disorders recited above are prevented, detected, diagnosed, prognosticated, treated and/or ameliorated using polynucleotides, polypeptides, antibodies, and/or agonists or antagonists of the present invention

[0583] In preferred embodiments, polypeptides, antibodies, polynucleotides and/or agonists or antagonists of the present invention are used as a immunosuppressive agent(s).

[0584] Polynucleotides, polypeptides, antibodies, and/or agonists or antagonists of the present invention may be useful in detecting, preventing, diagnosing, prognosticating, treating, and/or ameliorating diseases, disorders, and/or conditions of hematopoietic cells. Polynucleotides, polypeptides, antibodies, and/or agonists or antagonists of the present invention could be used to increase differentiation and proliferation of hematopoietic cells, including the pluripotent stem cells, in an effort to treat or prevent those diseases, disorders, and/or conditions associated with a decrease in certain (or many) types hematopoietic cells, including but not limited to, leukopenia, neutropenia, anemia, and thrombocytopenia. Alternatively, Polynucleotides, polypeptides, antibodies, and/or agonists or antagonists of the present invention could be used to increase differentiation and proliferation of hematopoietic cells, including the pluripotent stem cells, in an effort to treat or prevent those diseases, disorders, and/or conditions associated with an increase in certain (or many) types of hematopoietic cells, including but not limited to, histiocytosis.

[0585] Allergic reactions and conditions, such as asthma (particularly allergic asthma) or other respiratory problems, may also be detected, prevented, diagnosed, prognosticated, treated, and/or ameliorated using polypeptides, antibodies, or polynucleotides of the invention, and/or agonists or antagonists thereof. Moreover, these molecules can be used to treat, prevent, prognose, and/or diagnose anaphylaxis, hypersensitivity to an antigenic molecule, or blood group incompatibility.

[0586] Additionally, polypeptides or polynucleotides of the invention, and/or agonists or antagonists thereof, may be used to detect, prevent, diagnose, prognosticate, treat, and/or ameliorate IgE-mediated allergic reactions. Such allergic reactions include, but are not limited to, asthma, rhinitis, and eczema. In specific embodiments, polynucleotides, polypeptides, antibodies, and/or agonists or antagonists of the present invention may be used to modulate IgE concentrations in vitro or in vivo.

[0587] Moreover, polynucleotides, polypeptides, antibodies, and/or agonists or antagonists of the present invention have uses in the detection, prevention, diagnosis, prognostication, treatment, and/or amelioration of inflammatory conditions. For example, since polypeptides, antibodies, or polynucleotides of the invention, and/or agonists or antagonists of the invention may inhibit the activation, proliferation and/or differentiation of cells involved in an inflammatory response, these molecules can be used to prevent and/or treat chronic and acute inflammatory conditions. Such inflammatory conditions include, but are not limited to, for example, inflammation associated with infection (e.g., septic shock, sepsis, or systemic inflammatory response syndrome), ischemia-reperfusion injury, endotoxin lethality, complement-mediated hyperacute rejection, nephritis, cytokine or chemokine induced lung injury, inflammatory bowel disease, Crohn's disease, over production of cytokines (e.g., TNF or IL-1.), respiratory disorders (e.g., asthma and allergy); gastrointestinal disorders (e.g., inflammatory bowel disease); cancers (e.g., gastric, ovarian, lung, bladder, liver, and breast); CNS disorders (e.g., multiple sclerosis; ischemic brain injury and/or stroke, traumatic brain injury, neurodegenerative disorders (e.g., Parkinson's disease and Alzheimer's disease); AIDS-related dementia; and prion disease); cardiovascular disorders (e.g., atherosclerosis, myocarditis, cardiovascular disease, and cardiopulmonary bypass complications); as well as many additional diseases, conditions, and disorders that are characterized by inflammation (e.g., hepatitis, rheumatoid arthritis, gout, trauma, pancreatitis, sarcoidosis, dermatitis, renal ischemia-reperfusion injury, Grave's disease, systemic lupus erythematosus, diabetes mellitus, and allogenic transplant rejection).

[0588] Because inflammation is a fundamental defense mechanism, inflammatory disorders can effect virtually any tissue of the body. Accordingly, polynucleotides, polypeptides, and antibodies of the invention, as well as agonists or antagonists thereof, have uses in the treatment of tissue-specific inflammatory disorders, including, but not limited to, adrenalitis, alveolitis, angiocholecystitis, appendicitis, balanitis, blepharitis, bronchitis, bursitis, carditis, cellulitis, cervicitis, cholecystitis, chorditis, cochlitis, colitis, conjunctivitis, cystitis, dermatitis, diverticulitis, encephalitis, endocarditis, esophagitis, eustachitis, fibrositis, folliculitis, gastritis, gastroenteritis, gingivitis, glossitis, hepatosplenitis, keratitis, labyrinthitis, laryngitis, lymphangitis, mastitis, media otitis, meningitis, metritis, mucitis, myocarditis, myosititis, myringitis, nephritis, neuritis, orchitis, osteochondritis, otitis, pericarditis, peritendonitis, peritonitis, pharyngitis, phlebitis, poliomyelitis, prostatitis, pulpitis, retinitis, rhinitis, salpingitis, scleritis, sclerochoroiditis, scrotitis, sinusitis, spondylitis, steatitis, stomatitis, synovitis, syringitis, tendonitis, tonsillitis, urethritis, and vaginitis.

[0589] In specific embodiments, polypeptides, antibodies, or polynucleotides of the invention, and/or agonists or antagonists thereof, are useful to detect, prevent, diagnose, prognosticate, treat, and/or ameliorate organ transplant rejections and graft-versus-host disease. Organ rejection occurs by host immune cell destruction of the transplanted tissue through an immune response. Similarly, an immune response is also involved in GVHD, but, in this case, the foreign transplanted immune cells destroy the host tissues. Polypeptides, antibodies, or polynucleotides of the invention, and/or agonists or antagonists thereof, that inhibit an immune response, particularly the activation, proliferation, differentiation, or chemotaxis of T-cells, may be an effective therapy in preventing organ rejection or GVHD. In specific embodiments, polypeptides, antibodies, or polynucleotides of the invention, and/or agonists or antagonists thereof, that inhibit an immune response, particularly the activation, proliferation, differentiation, or chemotaxis of T-cells, may be an effective therapy in preventing experimental allergic and hyperacute xenograft rejection.

[0590] In other embodiments, polypeptides, antibodies, or polynucleotides of the invention, and/or agonists or antagonists thereof, are useful to detect, prevent, diagnose, prognosticate, treat, and/or ameliorate immune complex diseases, including, but not limited to, serum sickness, post streptococcal glomerulonephritis, polyarteritis nodosa, and immune complex-induced vasculitis.

[0591] Polypeptides, antibodies, polynucleotides and/or agonists or antagonists of the invention can be used to treat, detect, and/or prevent infectious agents. For example, by increasing the immune response, particularly increasing the proliferation activation and/or differentiation of B and/or T cells, infectious diseases may be treated, detected, and/or prevented. The immune response may be increased by either enhancing an existing immune response, or by initiating a new immune response. Alternatively, polynucleotides, polypeptides, antibodies, and/or agonists or antagonists of the present invention may also directly inhibit the infectious agent (refer to section of application listing infectious agents, etc), without necessarily eliciting an immune response.

[0592] In another embodiment, polypeptides, antibodies, polynucleotides and/or agonists or antagonists of the present invention are used as a vaccine adjuvant that enhances immune responsiveness to an antigen. In a specific embodiment, polypeptides, antibodies, polynucleotides and/or agonists or antagonists of the present invention are used as an adjuvant to enhance tumor-specific immune responses.

[0593] In another specific embodiment, polypeptides, antibodies, polynucleotides and/or agonists or antagonists of the present invention are used as an adjuvant to enhance anti-viral immune responses. Anti-viral immune responses that may be enhanced using the compositions of the invention as an adjuvant, include virus and virus associated diseases or symptoms described herein or otherwise known in the art. In specific embodiments, the compositions of the invention are used as an adjuvant to enhance an immune response to a virus, disease, or symptom selected from the group consisting of: AIDS, meningitis, Dengue, EBV, and hepatitis (e.g., hepatitis B). In another specific embodiment, the compositions of the invention are used as an adjuvant to enhance an immune response to a virus, disease, or symptom selected from the group consisting of: HIV/AIDS, respiratory syncytial virus, Dengue, rotavirus, Japanese B encephalitis, influenza A and B, parainfluenza, measles, cytomegalovirus, rabies, Junin, Chikungunya, Rift Valley Fever, herpes simplex, and yellow fever.

[0594] In another specific embodiment, polypeptides, antibodies, polynucleotides and/or agonists or antagonists of the present invention are used as an adjuvant to enhance anti-bacterial or anti-fungal immune responses. Anti-bacterial or anti-fungal immune responses that may be enhanced using the compositions of the invention as an adjuvant, include bacteria or fungus and bacteria or fungus associated diseases or symptoms described herein or otherwise known in the art. In specific embodiments, the compositions of the invention are used as an adjuvant to enhance an immune response to a bacteria or fungus, disease, or symptom selected from the group consisting of: tetanus, Diphtheria, botulism, and meningitis type B.

[0595] In another specific embodiment, the compositions of the invention are used as an adjuvant to enhance an immune response to a bacteria or fungus, disease, or symptom selected from the group consisting of: Vibrio cholerae, Mycobacterium leprae, Salmonella typhi, Salmonella paratyphi, Meisseria meningitides, Streptococcus pneumoniae, Group B streptococcus, Shigella spp., Enterotoxigenic Escherichia coli, Enterohemorrhagic E. coli, and Borrelia burgdorferi.

[0596] In another specific embodiment, polypeptides, antibodies, polynucleotides and/or agonists or antagonists of the present invention are used as an adjuvant to enhance anti-parasitic immune responses. Anti-parasitic immune responses that may be enhanced using the compositions of the invention as an adjuvant, include parasite and parasite associated diseases or symptoms described herein or otherwise known in the art. In specific embodiments, the compositions of the invention are used as an adjuvant to enhance an immune response to a parasite. In another specific embodiment, the compositions of the invention are used as an adjuvant to enhance an immune response to Plasmodium (malaria) or Leishmania.

[0597] In another specific embodiment, polypeptides, antibodies, polynucleotides and/or agonists or antagonists of the present invention may also be employed to treat infectious diseases including silicosis, sarcoidosis, and idiopathic pulmonary fibrosis; for example, by preventing the recruitment and activation of mononuclear phagocytes.

[0598] In another specific embodiment, polypeptides, antibodies, polynucleotides and/or agonists or antagonists of the present invention are used as an antigen for the generation of antibodies to inhibit or enhance immune mediated responses against polypeptides of the invention.

[0599] In one embodiment, polypeptides, antibodies, polynucleotides and/or agonists or antagonists of the present invention are administered to an animal (e.g., mouse, rat, rabbit, hamster, guinea pig, pigs, micro-pig, chicken, camel, goat, horse, cow, sheep, dog, cat, non-human primate, and human, most preferably human) to boost the immune system to produce increased quantities of one or more antibodies (e.g., IgG, IgA, IgM, and IgE), to induce higher affinity antibody production and immunoglobulin class switching (e.g., IgG, IgA, IgM, and IgE), and/or to increase an immune response.

[0600] In another specific embodiment, polypeptides, antibodies, polynucleotides and/or agonists or antagonists of the present invention are used as a stimulator of B cell responsiveness to pathogens.

[0601] In another specific embodiment, polypeptides, antibodies, polynucleotides and/or agonists or antagonists of the present invention are used as an activator of T cells.

[0602] In another specific embodiment, polypeptides, antibodies, polynucleotides and/or agonists or antagonists of the present invention are used as an agent that elevates the immune status of an individual prior to their receipt of immunosuppressive therapies.

[0603] In another specific embodiment, polypeptides, antibodies, polynucleotides and/or agonists or antagonists of the present invention are used as an agent to induce higher affinity antibodies.

[0604] In another specific embodiment, polypeptides, antibodies, polynucleotides and/or agonists or antagonists of the present invention are used as an agent to increase serum immunoglobulin concentrations.

[0605] In another specific embodiment, polypeptides, antibodies, polynucleotides and/or agonists or antagonists of the present invention are used as an agent to accelerate recovery of immunocompromised individuals.

[0606] In another specific embodiment, polypeptides, antibodies, polynucleotides and/or agonists or antagonists of the present invention are used as an agent to boost immunoresponsiveness among aged populations and/or neonates.

[0607] In another specific embodiment, polypeptides, antibodies, polynucleotides and/or agonists or antagonists of the present invention are used as an immune system enhancer prior to, during, or after bone marrow transplant and/or other transplants (e.g., allogeneic or xenogeneic organ transplantation). With respect to transplantation, compositions of the invention may be administered prior to, concomitant with, and/or after transplantation. In a specific embodiment, compositions of the invention are administered after transplantation, prior to the beginning of recovery of T-cell populations. In another specific embodiment, compositions of the invention are first administered after transplantation after the beginning of recovery of T cell populations, but prior to full recovery of B cell populations.

[0608] In another specific embodiment, polypeptides, antibodies, polynucleotides and/or agonists or antagonists of the present invention are used as an agent to boost immunoresponsiveness among individuals having an acquired loss of B cell function. Conditions resulting in an acquired loss of B cell function that may be ameliorated or treated by administering the polypeptides, antibodies, polynucleotides and/or agonists or antagonists thereof, include, but are not limited to, HIV Infection, AIDS, bone marrow transplant, and B cell chronic lymphocytic leukemia (CLL).

[0609] In another specific embodiment, polypeptides, antibodies, polynucleotides and/or agonists or antagonists of the present invention are used as an agent to boost immunoresponsiveness among individuals having a temporary immune deficiency. Conditions resulting in a temporary immune deficiency that may be ameliorated or treated by administering the polypeptides, antibodies, polynucleotides and/or agonists or antagonists thereof, include, but are not limited to, recovery from viral infections (e.g., influenza), conditions associated with malnutrition, recovery from infectious mononucleosis, or conditions associated with stress, recovery from measles, recovery from blood transfusion, and recovery from surgery.

[0610] In another specific embodiment, polypeptides, antibodies, polynucleotides and/or agonists or antagonists of the present invention are used as a regulator of antigen presentation by monocytes, dendritic cells, and/or B-cells. In one embodiment, polynucleotides, polypeptides, antibodies, and/or agonists or antagonists of the present invention enhance antigen presentation or antagonizes antigen presentation in vitro or in vivo. Moreover, in related embodiments, said enhancement or antagonism of antigen presentation may be useful as an anti-tumor treatment or to modulate the immune system.

[0611] In another specific embodiment, polypeptides, antibodies, polynucleotides and/or agonists or antagonists of the present invention are used as an agent to direct an individual's immune system towards development of a humoral response (i.e. TH2) as opposed to a TH1 cellular response.

[0612] In another specific embodiment, polypeptides, antibodies, polynucleotides and/or agonists or antagonists of the present invention are used as a means to induce tumor proliferation and thus make it more susceptible to anti-neoplastic agents. For example, multiple myeloma is a slowly dividing disease and is thus refractory to virtually all anti-neoplastic regimens. If these cells were forced to proliferate more rapidly their susceptibility profile would likely change.

[0613] In another specific embodiment, polypeptides, antibodies, polynucleotides and/or agonists or antagonists of the present invention are used as a stimulator of B cell production in pathologies such as AIDS, chronic lymphocyte disorder and/or Common Variable Immunodificiency.

[0614] In another specific embodiment, polypeptides, antibodies, polynucleotides and/or agonists or antagonists of the present invention are used as a therapy for generation and/or regeneration of lymphoid tissues following surgery, trauma or genetic defect. In another specific embodiment, polypeptides, antibodies, polynucleotides and/or agonists or antagonists of the present invention are used in the pretreatment of bone marrow samples prior to transplant.

[0615] In another specific embodiment, polypeptides, antibodies, polynucleotides and/or agonists or antagonists of the present invention are used as a gene-based therapy for genetically inherited disorders resulting in immuno-incompetence/immunodeficiency such as observed among SCID patients.

[0616] In another specific embodiment, polypeptides, antibodies, polynucleotides and/or agonists or antagonists of the present invention are used as a means of activating monocytes/macrophages to defend against parasitic diseases that effect monocytes such as Leishmania.

[0617] In another specific embodiment, polypeptides, antibodies, polynucleotides and/or agonists or antagonists of the present invention are used as a means of regulating secreted cytokines that are elicited by polypeptides of the invention.

[0618] In another embodiment, polypeptides, antibodies, polynucleotides and/or agonists or antagonists of the present invention are used in one or more of the applications decribed herein, as they may apply to veterinary medicine.

[0619] In another specific embodiment, polypeptides, antibodies, polynucleotides and/or agonists or antagonists of the present invention are used as a means of blocking various aspects of immune responses to foreign agents or self. Examples of diseases or conditions in which blocking of certain aspects of immune responses may be desired include autoimmune disorders such as lupus, and arthritis, as well as immunoresponsiveness to skin allergies, inflammation, bowel disease, injury and diseases/disorders associated with pathogens.

[0620] In another specific embodiment, polypeptides, antibodies, polynucleotides and/or agonists or antagonists of the present invention are used as a therapy for preventing the B cell proliferation and Ig secretion associated with autoimmune diseases such as idiopathic thrombocytopenic purpura, systemic lupus erythematosus and multiple sclerosis.

[0621] In another specific embodiment, polypeptides, antibodies, polynucleotides and/or agonists or antagonists of the present invention are used as a inhibitor of B and/or T cell migration in endothelial cells. This activity disrupts tissue architecture or cognate responses and is useful, for example in disrupting immune responses, and blocking sepsis.

[0622] In another specific embodiment, polypeptides, antibodies, polynucleotides and/or agonists or antagonists of the present invention are used as a therapy for chronic hypergammaglobulinemia evident in such diseases as monoclonal gammopathy of undetermined significance (MGUS), Waldenstrom's disease, related idiopathic monoclonal gammopathies, and plasmacytomas.

[0623] In another specific embodiment, polypeptides, antibodies, polynucleotides and/or agonists or antagonists of the present invention may be employed for instance to inhibit polypeptide chemotaxis and activation of macrophages and their precursors, and of neutrophils, basophils, B lymphocytes and some T-cell subsets, e.g., activated and CD8 cytotoxic T cells and natural killer cells, in certain autoimmune and chronic inflammatory and infective diseases. Examples of autoimmune diseases are described herein and include multiple sclerosis, and insulin-dependent diabetes.

[0624] The polypeptides, antibodies, polynucleotides and/or agonists or antagonists of the present invention may also be employed to treat idiopathic hyper-eosinophilic syndrome by, for example, preventing eosinophil production and migration.

[0625] In another specific embodiment, polypeptides, antibodies, polynucleotides and/or agonists or antagonists of the present invention are used to enhance or inhibit complement mediated cell lysis.

[0626] In another specific embodiment, polypeptides, antibodies, polynucleotides and/or agonists or antagonists of the present invention are used to enhance or inhibit antibody dependent cellular cytotoxicity.

[0627] In another specific embodiment, polypeptides, antibodies, polynucleotides and/or agonists or antagonists of the present invention may also be employed for treating atherosclerosis, for example, by preventing monocyte infiltration in the artery wall.

[0628] In another specific embodiment, polypeptides, antibodies, polynucleotides and/or agonists or antagonists of the present invention may be employed to treat adult respiratory distress syndrome (ARDS).

[0629] In another specific embodiment, polypeptides, antibodies, polynucleotides and/or agonists or antagonists of the present invention may be useful for stimulating wound and tissue repair, stimulating angiogenesis, and/or stimulating the repair of vascular or lymphatic diseases or disorders. Additionally, agonists and antagonists of the invention may be used to stimulate the regeneration of mucosal surfaces.

[0630] In a specific embodiment, polynucleotides or polypeptides, and/or agonists thereof are used to detect, prevent, diagnose, prognosticate, treat, and/or ameliorate a disorder characterized by primary or acquired immunodeficiency, deficient serum immunoglobulin production, recurrent infections, and/or immune system dysfunction. Moreover, polynucleotides or polypeptides, and/or agonists thereof may be used to treat or prevent infections of the joints, bones, skin, and/or parotid glands, blood-borne infections (e.g., sepsis, meningitis, septic arthritis, and/or osteomyelitis), autoimmune diseases (e.g., those disclosed herein), inflammatory disorders, and malignancies, and/or any disease or disorder or condition associated with these infections, diseases, disorders and/or malignancies) including, but not limited to, CVID, other primary immune deficiencies, HIV disease, CLL, recurrent bronchitis, sinusitis, otitis media, conjunctivitis, pneumonia, hepatitis, meningitis, herpes zoster (e.g., severe herpes zoster), and/or pneumocystis carnii. Other diseases and disorders that may be detected, prevented, diagnosed, prognosticated, treated, and/or ameliorated with polynucleotides or polypeptides, and/or agonists of the present invention include, but are not limited to, HIV infection, HTLV-BLV infection, lymphopenia, phagocyte bactericidal dysfunction anemia, thrombocytopenia, and hemoglobinuria.

[0631] In another embodiment, polynucleotides, polypeptides, antibodies, and/or agonists or antagonists of the present invention are used to treat, and/or diagnose an individual having common variable immunodeficiency disease (“CVID”; also known as “acquired agammaglobulinemia” and “acquired hypogammaglobulinemia”) or a subset of this disease.

[0632] In a specific embodiment, polynucleotides, polypeptides, antibodies, and/or agonists or antagonists of the present invention may be used to detect, prevent, diagnose, prognosticate, treat, and/or ameliorate cancers or neoplasms including immune cell or immune tissue-related cancers or neoplasms. Examples of cancers or neoplasms that may be detected, prevented, diagnosed, prognosticated, treated, and/or ameliorated by polynucleotides, polypeptides, antibodies, and/or agonists or antagonists of the present invention include, but are not limited to, acute myelogenous leukemia, chronic myelogenous leukemia, Hodgkin's disease, non-Hodgkin's lymphoma, acute lymphocytic anemia (ALL) Chronic lymphocyte leukemia, plasmacytomas, multiple myeloma, Burkitt's lymphoma, EBV-transformed diseases, and/or diseases and disorders described in the section entitled “Hyperproliferative Disorders” elsewhere herein.

[0633] In another specific embodiment, polypeptides, antibodies, polynucleotides and/or agonists or antagonists of the present invention are used as a therapy for decreasing cellular proliferation of Large B-cell Lymphomas.

[0634] In another specific embodiment, polypeptides, antibodies, polynucleotides and/or agonists or antagonists of the present invention are used as a means of decreasing the involvement of B cells and Ig associated with Chronic Myelogenous Leukemia.

[0635] In specific embodiments, the compositions of the invention are used as an agent to boost immunoresponsiveness among B cell immunodeficient individuals, such as, for example, an individual who has undergone a partial or complete splenectomy.

[0636] Antagonists of the invention include, for example, binding and/or inhibitory antibodies, antisense nucleic acids, ribozymes or soluble forms of the polypeptides of the present invention (e.g., Fc fusion protein; see, e.g., Example 9). Agonists of the invention include, for example, binding or stimulatory antibodies, and soluble forms of the polypeptides (e.g., Fc fusion proteins; see, e.g., Example 9). polypeptides, antibodies, polynucleotides and/or agonists or antagonists of the present invention may be employed in a composition with a pharmaceutically acceptable carrier, e.g., as described herein.

[0637] In another embodiment, polypeptides, antibodies, polynucleotides and/or agonists or antagonists of the present invention are administered to an animal (including, but not limited to, those listed above, and also including transgenic animals) incapable of producing functional endogenous antibody molecules or having an otherwise compromised endogenous immune system, but which is capable of producing human immunoglobulin molecules by means of a reconstituted or partially reconstituted immune system from another animal (see, e.g., published PCT Application Nos. WO98/24893, WO/9634096, WO/9633735, and WO/9110741). Administration of polypeptides, antibodies, polynucleotides and/or agonists or antagonists of the present invention to such animals is useful for the generation of monoclonal antibodies against the polypeptides, antibodies, polynucleotides and/or agonists or antagonists of the present invention.

[0638] Hyperproliferative Disorders

[0639] In certain embodiments, polynucleotides or polypeptides, or agonists or antagonists of the present invention can be used to treat or detect hyperproliferative disorders, including neoplasms. Polynucleotides or polypeptides, or agonists or antagonists of the present invention may inhibit the proliferation of the disorder through direct or indirect interactions. Alternatively, Polynucleotides or polypeptides, or agonists or antagonists of the present invention may proliferate other cells which can inhibit the hyperproliferative disorder.

[0640] For example, by increasing an immune response, particularly increasing antigenic qualities of the hyperproliferative disorder or by proliferating, differentiating, or mobilizing T-cells, hyperproliferative disorders can be treated. This immune response may be increased by either enhancing an existing immune response, or by initiating a new immune response. Alternatively, decreasing an immune response may also be a method of treating hyperproliferative disorders, such as a chemotherapeutic agent.

[0641] Examples of hyperproliferative disorders that can be treated or detected by polynucleotides or polypeptides, or agonists or antagonists of the present invention include, but are not limited to neoplasms located in the: colon, abdomen, bone, breast, digestive system, liver, pancreas, peritoneum, endocrine glands (adrenal, parathyroid, pituitary, testicles, ovary, thymus, thyroid), eye, head and neck, nervous (central and peripheral), lymphatic system, pelvis, skin, soft tissue, spleen, thorax, and urogenital tract.

[0642] Similarly, other hyperproliferative disorders can also be treated or detected by polynucleotides or polypeptides, or agonists or antagonists of the present invention. Examples of such hyperproliferative disorders include, but are not limited to: Acute Childhood Lymphoblastic Leukemia, Acute Lymphoblastic Leukemia, Acute Lymphocytic Leukemia, Acute Myeloid Leukemia, Adrenocortical Carcinoma, Adult (Primary) Hepatocellular Cancer, Adult (Primary) Liver Cancer, Adult Acute Lymphocytic Leukemia, Adult Acute Myeloid Leukemia, Adult Hodgkin's Disease, Adult Hodgkin's Lymphoma, Adult Lymphocytic Leukemia, Adult Non-Hodgkin's Lymphoma, Adult Primary Liver Cancer, Adult Soft Tissue Sarcoma, AIDS-Related Lymphoma, AIDS-Related Malignancies, Anal Cancer, Astrocytoma, Bile Duct Cancer, Bladder Cancer, Bone Cancer, Brain Stem Glioma, Brain Tumors, Breast Cancer, Cancer of the Renal Pelvis and Ureter, Central Nervous System (Primary) Lymphoma, Central Nervous System Lymphoma, Cerebellar Astrocytoma, Cerebral Astrocytoma, Cervical Cancer, Childhood (Primary) Hepatocellular Cancer, Childhood (Primary) Liver Cancer, Childhood Acute Lymphoblastic Leukemia, Childhood Acute Myeloid Leukemia, Childhood Brain Stem Glioma, Childhood Cerebellar Astrocytoma, Childhood Cerebral Astrocytoma, Childhood Extracranial Germ Cell Tumors, Childhood Hodgkin's Disease, Childhood Hodgkin's Lymphoma, Childhood Hypothalamic and Visual Pathway Glioma, Childhood Lymphoblastic Leukemia, Childhood Medulloblastoma, Childhood Non-Hodgkin's Lymphoma, Childhood Pineal and Supratentorial Primitive Neuroectodermal Tumors, Childhood Primary Liver Cancer, Childhood Rhabdomyosarcoma, Childhood Soft Tissue Sarcoma, Childhood Visual Pathway and Hypothalamic Glioma, Chronic Lymphocytic Leukemia, Chronic Myelogenous Leukemia, Colon Cancer, Cutaneous T-Cell Lymphoma, Endocrine Pancreas Islet Cell Carcinoma, Endometrial Cancer, Ependymoma, Epithelial Cancer, Esophageal Cancer, Ewing's Sarcoma and Related Tumors, Exocrine Pancreatic Cancer, Extracranial Germ Cell Tumor, Extragonadal Germ Cell Tumor, Extrahepatic Bile Duct Cancer, Eye Cancer, Female Breast Cancer, Gaucher's Disease, Gallbladder Cancer, Gastric Cancer, Gastrointestinal Carcinoid Tumor, Gastrointestinal Tumors, Germ Cell Tumors, Gestational Trophoblastic Tumor, Hairy Cell Leukemia, Head and Neck Cancer, Hepatocellular Cancer, Hodgkin's Disease, Hodgkin's Lymphoma, Hypergammaglobulinemia, Hypopharyngeal Cancer, Intestinal Cancers, Intraocular Melanoma, Islet Cell Carcinoma, Islet Cell Pancreatic Cancer, Kaposi's Sarcoma, Kidney Cancer, Laryngeal Cancer, Lip and Oral Cavity Cancer, Liver Cancer, Lung Cancer, Lymphoproliferative Disorders, Macroglobulinemia, Male Breast Cancer, Malignant Mesothelioma, Malignant Thymoma, Medulloblastoma, Melanoma, Mesothelioma, Metastatic Occult Primary Squamous Neck Cancer, Metastatic Primary Squamous Neck Cancer, Metastatic Squamous Neck Cancer, Multiple Myeloma, Multiple Myeloma/Plasma Cell Neoplasm, Myelodysplastic Syndrome, Myelogenous Leukemia, Myeloid Leukemia, Myeloproliferative Disorders, Nasal Cavity and Paranasal Sinus Cancer, Nasopharyngeal Cancer, Neuroblastoma, Non-Hodgkin's Lymphoma During Pregnancy, Nonmelanoma Skin Cancer, Non-Small Cell Lung Cancer, Occult Primary Metastatic Squamous Neck Cancer, Oropharyngeal Cancer, Osteo-/Malignant Fibrous Sarcoma, Osteosarcoma/Malignant Fibrous Histiocytoma, Osteosarcoma/Malignant Fibrous Histiocytoma of Bone, Ovarian Epithelial Cancer, Ovarian Germ Cell Tumor, Ovarian Low Malignant Potential Tumor, Pancreatic Cancer, Paraproteinemias, Purpura, Parathyroid Cancer, Penile Cancer, Pheochromocytoma, Pituitary Tumor, Plasma Cell Neoplasm/Multiple Myeloma, Primary Central Nervous System Lymphoma, Primary Liver Cancer, Prostate Cancer, Rectal Cancer, Renal Cell Cancer, Renal Pelvis and Ureter Cancer, Retinoblastoma, Rhabdomyosarcoma, Salivary Gland Cancer, Sarcoidosis Sarcomas, Sezary Syndrome, Skin Cancer, Small Cell Lung Cancer, Small Intestine Cancer, Soft Tissue Sarcoma, Squamous Neck Cancer, Stomach Cancer, Supratentorial Primitive Neuroectodermal and Pineal Tumors, T-Cell Lymphoma, Testicular Cancer, Thymoma, Thyroid Cancer, Transitional Cell Cancer of the Renal Pelvis and Ureter, Transitional Renal Pelvis and Ureter Cancer, Trophoblastic Tumors, Ureter and Renal Pelvis Cell Cancer, Urethral Cancer, Uterine Cancer, Uterine Sarcoma, Vaginal Cancer, Visual Pathway and Hypothalamic Glioma, Vulvar Cancer, Waldenstrom's Macroglobulinemia, Wilms' Tumor, and any other hyperproliferative disease, besides neoplasia, located in an organ system listed above.

[0643] In another preferred embodiment, polynucleotides or polypeptides, or agonists or antagonists of the present invention are used to detect, prevent, diagnose, prognosticate, treat, and/or ameliorate premalignant conditions and to prevent progression to a neoplastic or malignant state, including but not limited to those disorders described above. Such uses are indicated in conditions known or suspected of preceding progression to neoplasia or cancer, in particular, where non-neoplastic cell growth consisting of hyperplasia, metaplasia, or most particularly, dysplasia has occurred (for review of such abnormal growth conditions, see Robbins and Angell, 1976, Basic Pathology, 2d Ed., W. B. Saunders Co., Philadelphia, pp. 68-79.)

[0644] Hyperplasia is a form of controlled cell proliferation, involving an increase in cell number in a tissue or organ, without significant alteration in structure or function. Hyperplastic disorders which can be detected, prevented, diagnosed, prognosticated, treated, and/or ameliorated with compositions of the invention (including polynucleotides, polypeptides, agonists or antagonists) include, but are not limited to, angiofollicular mediastinal lymph node hyperplasia, angiolymphoid hyperplasia with eosinophilia, atypical melanocytic hyperplasia, basal cell hyperplasia, benign giant lymph node hyperplasia, cementum hyperplasia, congenital adrenal hyperplasia, congenital sebaceous hyperplasia, cystic hyperplasia, cystic hyperplasia of the breast, denture hyperplasia, ductal hyperplasia, endometrial hyperplasia, fibromuscular hyperplasia, focal epithelial hyperplasia, gingival hyperplasia, inflammatory fibrous hyperplasia, inflammatory papillary hyperplasia, intravascular papillary endothelial hyperplasia, nodular hyperplasia of prostate, nodular regenerative hyperplasia, pseudoepitheliomatous hyperplasia, senile sebaceous hyperplasia, and verrucous hyperplasia.

[0645] Metaplasia is a form of controlled cell growth in which one type of adult or fully differentiated cell substitutes for another type of adult cell. Metaplastic disorders which can be detected, prevented, diagnosed, prognosticated, treated, and/or ameliorated with compositions of the invention (including polynucleotides, polypeptides, agonists or antagonists) include, but are not limited to, agnogenic myeloid metaplasia, apocrine metaplasia, atypical metaplasia, autoparenchymatous metaplasia, connective tissue metaplasia, epithelial metaplasia, intestinal metaplasia, metaplastic anemia, metaplastic ossification, metaplastic polyps, myeloid metaplasia, primary myeloid metaplasia, secondary myeloid metaplasia, squamous metaplasia, squamous metaplasia of amnion, and symptomatic myeloid metaplasia.

[0646] Dysplasia is frequently a forerunner of cancer, and is found mainly in the epithelia; it is the most disorderly form of non-neoplastic cell growth, involving a loss in individual cell uniformity and in the architectural orientation of cells. Dysplastic cells often have abnormally large, deeply stained nuclei, and exhibit pleomorphism. Dysplasia characteristically occurs where there exists chronic irritation or inflammation. Dysplastic disorders which can be detected, prevented, diagnosed, prognosticated, treated, and/or ameliorated with compositions of the invention (including polynucleotides, polypeptides, agonists or antagonists) include, but are not limited to, anhidrotic ectodermal dysplasia, anterofacial dysplasia, asphyxiating thoracic dysplasia, atriodigital dysplasia, bronchopulmonary dysplasia, cerebral dysplasia, cervical dysplasia, chondroectodermal dysplasia, cleidocranial dysplasia, congenital ectodermal dysplasia, craniodiaphysial dysplasia, craniocarpotarsal dysplasia, craniometaphysial dysplasia, dentin dysplasia, diaphysial dysplasia, ectodermal dysplasia, enamel dysplasia, encephalo-ophthalmic dysplasia, dysplasia epiphysialis hemimelia, dysplasia epiphysialis multiplex, dysplasia epiphysialis punctata, epithelial dysplasia, faciodigitogenital dysplasia, familial fibrous dysplasia of jaws, familial white folded dysplasia, fibromuscular dysplasia, fibrous dysplasia of bone, florid osseous dysplasia, hereditary renal-retinal dysplasia, hidrotic ectodermal dysplasia, hypohidrotic ectodermal dysplasia, lymphopenic thymic dysplasia, mammary dysplasia, mandibulofacial dysplasia, metaphysial dysplasia, Mondini dysplasia, monostotic fibrous dysplasia, mucoepithelial dysplasia, multiple epiphysial dysplasia, oculoauriculovertebral dysplasia, oculodentodigital dysplasia, oculovertebral dysplasia, odontogenic dysplasia, ophthalmomandibulomelic dysplasia, periapical cemental dysplasia, polyostotic fibrous dysplasia, pseudoachondroplastic spondyloepiphysial dysplasia, retinal dysplasia, septo-optic dysplasia, spondyloepiphysial dysplasia, and ventriculoradial dysplasia.

[0647] Additional pre-neoplastic disorders which can be detected, prevented, diagnosed, prognosticated, treated, and/or ameliorated with compositions of the invention (including polynucleotides, polypeptides, agonists or antagonists) include, but are not limited to, benign dysproliferative disorders (e.g., benign tumors, fibrocystic conditions, tissue hypertrophy, intestinal polyps, colon polyps, and esophageal dysplasia), leukoplakia, keratoses, Bowen's disease, Farmer's Skin, solar cheilitis, and solar keratosis.

[0648] In another embodiment, a polypeptide of the invention, or polynucleotides, antibodies, agonists, or antagonists corresponding to that polypeptide, may be used to diagnose and/or prognosticate disorders associated with the tissue(s) in which the polypeptide of the invention is expressed, including one, two, three, four, five, or more tissues disclosed in Table 1B.2, column 5 (Tissue Distribution Library Code).

[0649] In another embodiment, polynucleotides, polypeptides, antibodies, and/or agonists or antagonists of the present invention conjugated to a toxin or a radioactive isotope, as described herein, may be used to treat cancers and neoplasms, including, but not limited to those described herein. In a further preferred embodiment, polynucleotides, polypeptides, antibodies, and/or agonists or antagonists of the present invention conjugated to a toxin or a radioactive isotope, as described herein, may be used to treat acute myelogenous leukemia.

[0650] Additionally, polynucleotides, polypeptides, and/or agonists or antagonists of the invention may affect apoptosis, and therefore, would be useful in treating a number of diseases associated with increased cell survival or the inhibition of apoptosis. For example, diseases associated with increased cell survival or the inhibition of apoptosis that could be detected, prevented, diagnosed, prognosticated, treated, and/or ameliorated by polynucleotides, polypeptides, and/or agonists or antagonists of the invention, include cancers (such as follicular lymphomas, carcinomas with p53 mutations, and hormone-dependent tumors, including, but not limited to colon cancer, cardiac tumors, pancreatic cancer, melanoma, retinoblastoma, glioblastoma, lung cancer, intestinal cancer, testicular cancer, stomach cancer, neuroblastoma, myxoma, myoma, lymphoma, endothelioma, osteoblastoma, osteoclastoma, osteosarcoma, chondrosarcoma, adenoma, breast cancer, prostate cancer, Kaposi's sarcoma and ovarian cancer); autoimmune disorders such as, multiple sclerosis, Sjogren's syndrome, Hashimoto's thyroiditis, biliary cirrhosis, Behcet's disease, Crohn's disease, polymyositis, systemic lupus erythematosus and immune-related glomerulonephritis and rheumatoid arthritis) and viral infections (such as herpes viruses, pox viruses and adenoviruses), inflammation, graft v. host disease, acute graft rejection, and chronic graft rejection.

[0651] In preferred embodiments, polynucleotides, polypeptides, and/or agonists or antagonists of the invention are used to inhibit growth, progression, and/or metastasis of cancers, in particular those listed above.

[0652] Additional diseases or conditions associated with increased cell survival that could be detected, prevented, diagnosed, prognosticated, treated, and/or ameliorated by polynucleotides, polypeptides, and/or agonists or antagonists of the invention, include, but are not limited to, progression, and/or metastases of malignancies and related disorders such as leukemia (including acute leukemias (e.g., acute lymphocytic leukemia, acute myelocytic leukemia (including myeloblastic, promyelocytic, myelomonocytic, monocytic, and erythroleukemia)) and chronic leukemias (e.g., chronic myelocytic (granulocytic) leukemia and chronic lymphocytic leukemia)), polycythemia vera, lymphomas (e.g., Hodgkin's disease and non-Hodgkin's disease), multiple myeloma, Waldenstrom's macroglobulinemia, heavy chain disease, and solid tumors including, but not limited to, sarcomas and carcinomas such as fibrosarcoma, myxosarcoma, liposarcoma, chondrosarcoma, osteogenic sarcoma, chordoma, angiosarcoma, endotheliosarcoma, lymphangiosarcoma, lymphangioendotheliosarcoma, synovioina, mesothelioma, Ewing's tumor, leiomyosarcoma, rhabdomyosarcoma, colon carcinoma, pancreatic cancer, breast cancer, ovarian cancer, prostate cancer, squamous cell carcinoma, basal cell carcinoma, adenocarcinoma, sweat gland carcinoma, sebaceous gland carcinoma, papillary carcinoma, papillary adenocarcinomas, cystadenocarcinoma, medullary carcinoma, bronchogenic carcinoma, renal cell carcinoma, hepatoma, bile duct carcinoma, choriocarcinoma, seminoma, embryonal carcinoma, Wilm's tumor, cervical cancer, testicular tumor, lung carcinoma, small cell lung carcinoma, bladder carcinoma, epithelial carcinoma, glioma, astrocytoma, medulloblastoma, craniopharyngioma, ependymoma, pinealoma, emangioblastoma, acoustic neuroma, oligodendroglioma, menangioma, melanoma, neuroblastoma, and retinoblastoma.

[0653] Diseases associated with increased apoptosis that could be detected, prevented, diagnosed, prognosticated, treated, and/or ameliorated by polynucleotides, polypeptides, and/or agonists or antagonists of the invention, include AIDS; neurodegenerative disorders (such as Alzheimer's disease, Parkinson's disease, amyotrophic lateral sclerosis, retinitis pigmentosa, cerebellar degeneration and brain tumor or prior associated disease); autoimmune disorders (such as, multiple sclerosis, Sjogren's syndrome, Hashimoto's thyroiditis, biliary cirrhosis, Behcet's disease, Crohn's disease, polymyositis, systemic lupus erythematosus and immune-related glomerulonephritis and rheumatoid arthritis) myelodysplastic syndromes (such as aplastic anemia), graft v. host disease, ischemic injury (such as that caused by myocardial infarction, stroke and reperfusion injury), liver injury (e.g., hepatitis related liver injury, ischemia/reperfusion injury, cholestosis (bile duct injury) and liver cancer); toxin-induced liver disease (such as that caused by alcohol), septic shock, cachexia and anorexia.

[0654] Hyperproliferative diseases and/or disorders that could be detected, prevented, diagnosed, prognosticated, treated, and/or ameliorated by polynucleotides, polypeptides, and/or agonists or antagonists of the invention, include, but are not limited to, neoplasms located in the liver, abdomen, bone, breast, digestive system, pancreas, peritoneum, endocrine glands (adrenal, parathyroid, pituitary, testicles, ovary, thymus, thyroid), eye, head and neck, nervous system (central and peripheral), lymphatic system, pelvis, skin, soft tissue, spleen, thorax, and urogenital tract.

[0655] Similarly, other hyperproliferative disorders can also be detected, prevented, diagnosed, prognosticated, treated, and/or ameliorated by polynucleotides, polypeptides, and/or agonists or antagonists of the invention. Examples of such hyperproliferative disorders include, but are not limited to: hypergammaglobulinemia, lymphoproliferative disorders, paraproteinemias, purpura, sarcoidosis, Sezary Syndrome, Waldenstron's macroglobulinemia, Gaucher's Disease, histiocytosis, and any other hyperproliferative disease, besides neoplasia, located in an organ system listed above.

[0656] Another preferred embodiment utilizes polynucleotides of the present invention to inhibit aberrant cellular division, by gene therapy using the present invention, and/or protein fusions or fragments thereof.

[0657] Thus, the present invention provides a method for treating cell proliferative disorders by inserting into an abnormally proliferating cell a polynucleotide of the present invention, wherein said polynucleotide represses said expression.

[0658] Another embodiment of the present invention provides a method of treating cell-proliferative disorders in individuals comprising administration of one or more active gene copies of the present invention to an abnormally proliferating cell or cells. In a preferred embodiment, polynucleotides of the present invention is a DNA construct comprising a recombinant expression vector effective in expressing a DNA sequence encoding said polynucleotides. In another preferred embodiment of the present invention, the DNA construct encoding the poynucleotides of the present invention is inserted into cells to be treated utilizing a retrovirus, or more preferably an adenoviral vector (See G J. Nabel, et. al., PNAS 1999 96: 324-326, which is hereby incorporated by reference). In a most preferred embodiment, the viral vector is defective and will not transform non-proliferating cells, only proliferating cells. Moreover, in a preferred embodiment, the polynucleotides of the present invention inserted into proliferating cells either alone, or in combination with or fused to other polynucleotides, can then be modulated via an external stimulus (i.e. magnetic, specific small molecule, chemical, or drug administration, etc.), which acts upon the promoter upstream of said polynucleotides to induce expression of the encoded protein product. As such the beneficial therapeutic affect of the present invention may be expressly modulated (i.e. to increase, decrease, or inhibit expression of the present invention) based upon said external stimulus.

[0659] Polynucleotides of the present invention may be useful in repressing expression of oncogenic genes or antigens. By “repressing expression of the oncogenic genes” is intended the suppression of the transcription of the gene, the degradation of the gene transcript (pre-message RNA), the inhibition of splicing, the destruction of the messenger RNA, the prevention of the post-translational modifications of the protein, the destruction of the protein, or the inhibition of the normal function of the protein.

[0660] For local administration to abnormally proliferating cells, polynucleotides of the present invention may be administered by any method known to those of skill in the art including, but not limited to transfection, electroporation, microinjection of cells, or in vehicles such as liposomes, lipofectin, or as naked polynucleotides, or any other method described throughout the specification. The polynucleotide of the present invention may be delivered by known gene delivery systems such as, but not limited to, retroviral vectors (Gilboa, J. Virology 44:845 (1982); Hocke, Nature 320:275 (1986); Wilson, et al., Proc. Natl. Acad. Sci. U.S.A. 85:3014), vaccinia virus system (Chakrabarty et al., Mol. Cell Biol. 5:3403 (1985) or other efficient DNA delivery systems (Yates et al., Nature 313:812 (1985)) known to those skilled in the art. These references are exemplary only and are hereby incorporated by reference. In order to specifically deliver or transfect cells which are abnormally proliferating and spare non-dividing cells, it is preferable to utilize a retrovirus, or adenoviral (as described in the art and elsewhere herein) delivery system known to those of skill in the art. Since host DNA replication is required for retroviral DNA to integrate and the retrovirus will be unable to self replicate due to the lack of the retrovirus genes needed for its life cycle. Utilizing such a retroviral delivery system for polynucleotides of the present invention will target said gene and constructs to abnormally proliferating cells and will spare the non-dividing normal cells.

[0661] The polynucleotides of the present invention may be delivered directly to cell proliferative disorder/disease sites in internal organs, body cavities and the like by use of imaging devices used to guide an injecting needle directly to the disease site. The polynucleotides of the present invention may also be administered to disease sites at the time of surgical intervention.

[0662] By “cell proliferative disease” is meant any human or animal disease or disorder, affecting any one or any combination of organs, cavities, or body parts, which is characterized by single or multiple local abnormal proliferations of cells, groups of cells, or tissues, whether benign or malignant.

[0663] Any amount of the polynucleotides of the present invention may be administered as long as it has a biologically inhibiting effect on the proliferation of the treated cells. Moreover, it is possible to administer more than one of the polynucleotide of the present invention simultaneously to the same site. By “biologically inhibiting” is meant partial or total growth inhibition as well as decreases in the rate of proliferation or growth of the cells. The biologically inhibitory dose may be determined by assessing the effects of the polynucleotides of the present invention on target malignant or abnormally proliferating cell growth in tissue culture, tumor growth in animals and cell cultures, or any other method known to one of ordinary skill in the art.

[0664] The present invention is further directed to antibody-based therapies which involve administering of anti-polypeptides and anti-polynucleotide antibodies to a mammalian, preferably human, patient for treating one or more of the described disorders. Methods for producing anti-polypeptides and anti-polynucleotide antibodies polyclonal and monoclonal antibodies are described in detail elsewhere herein. Such antibodies may be provided in pharmaceutically acceptable compositions as known in the art or as described herein.

[0665] A summary of the ways in which the antibodies of the present invention may be used therapeutically includes binding polynucleotides or polypeptides of the present invention locally or systemically in the body or by direct cytotoxicity of the antibody, e.g. as mediated by complement (CDC) or by effector cells (ADCC). Some of these approaches are described in more detail below. Armed with the teachings provided herein, one of ordinary skill in the art will know how to use the antibodies of the present invention for diagnosis, prognosis, monitoring, or therapeutic purposes without undue experimentation.

[0666] In particular, the antibodies, fragments and derivatives of the present invention are useful for treating a subject having or developing cell proliferative and/or differentiation disorders as described herein. Such treatment comprises administering a single or multiple doses of the antibody, or a fragment, derivative, or a conjugate thereof.

[0667] The antibodies of this invention may be advantageously utilized in combination with other monoclonal or chimeric antibodies, or with lymphokines or hematopoietic growth factors, for example., which serve to increase the number or activity of effector cells which interact with the antibodies.

[0668] It is preferred to use high affinity and/or potent in vivo inhibiting and/or neutralizing antibodies against polypeptides or polynucleotides of the present invention, fragments or regions thereof, for both immunoassays directed to and therapy of disorders related to polynucleotides or polypeptides, including fragements thereof, of the present invention. Such antibodies, fragments, or regions, will preferably have an affinity for polynucleotides or polypeptides, including fragements thereof. Preferred binding affinities include those with a dissociation constant or Kd less than 5×10⁻⁶M, 10⁻⁶M, 5×10⁻⁷M, 10⁻⁷M, 5×10⁻⁸M, 10⁻⁸M, 5×10⁻⁹M, 10⁻⁹M, 5×10⁻¹⁰M, 10⁻¹⁰M, 5×10⁻¹¹M, 10⁻¹¹M, 5×10⁻¹²M, 10⁻¹²M, 5×10⁻¹³M, 10⁻¹³M, 5×10⁻¹⁴M, 10⁻¹⁴M, 5×10⁻¹⁵M, and 10⁻¹⁵M.

[0669] Moreover, polypeptides of the present invention are useful in inhibiting the angiogenesis of proliferative cells or tissues, either alone, as a protein fusion, or in combination with other polypeptides directly or indirectly, as described elsewhere herein. In a most preferred embodiment, said anti-angiogenesis effect may be achieved indirectly, for example, through the inhibition of hematopoietic, tumor-specific cells, such as tumor-associated macrophages (See Joseph I B, et al. J Natl Cancer Inst, 90(21):1648-53 (1998), which is hereby incorporated by reference). Antibodies directed to polypeptides or polynucleotides of the present invention may also result in inhibition of angiogenesis directly, or indirectly (See Witte L, et al., Cancer Metastasis Rev. 17(2):155-61 (1998), which is hereby incorporated by reference)).

[0670] Polypeptides, including protein fusions, of the present invention, or fragments thereof may be useful in inhibiting proliferative cells or tissues through the induction of apoptosis. Said polypeptides may act either directly, or indirectly to induce apoptosis of proliferative cells and tissues, for example in the activation of a death-domain receptor, such as tumor necrosis factor (TNF) receptor-1, CD95 (Fas/APO-1), TNF-receptor-related apoptosis-mediated protein (TRAMP) and TNF-related apoptosis-inducing ligand (TRAIL) receptor-1 and -2 (See Schulze-Osthoff K, et. al., Eur J Biochem 254(3):439-59 (1998), which is hereby incorporated by reference). Moreover, in another preferred embodiment of the present invention, said polypeptides may induce apoptosis through other mechanisms, such as in the activation of other proteins which will activate apoptosis, or through stimulating the expression of said proteins, either alone or in combination with small molecule drugs or adjuviants, such as apoptonin, galectins, thioredoxins, anti-inflammatory proteins (See for example, Mutat Res 400(1-2):447-55 (1998), Med Hypotheses. 50(5):423-33 (1998), Chem Biol Interact. April 24; 111-112:23-34 (1998), J Mol Med. 76(6):402-12 (1998), Int J Tissue React; 20(1):3-15 (1998), which are all hereby incorporated by reference).

[0671] Polypeptides, including protein fusions to, or fragments thereof, of the present invention are useful in inhibiting the metastasis of proliferative cells or tissues. Inhibition may occur as a direct result of administering polypeptides, or antibodies directed to said polypeptides as described elsewere herein, or indirectly, such as activating the expression of proteins known to inhibit metastasis, for example alpha 4 integrins, (See, e.g., Curr Top Microbiol Immunol 1998; 231:125-41, which is hereby incorporated by reference). Such thereapeutic affects of the present invention may be achieved either alone, or in combination with small molecule drugs or adjuvants.

[0672] In another embodiment, the invention provides a method of delivering compositions containing the polypeptides of the invention (e.g., compositions containing polypeptides or polypeptide antibodes associated with heterologous polypeptides, heterologous nucleic acids, toxins, or prodrugs) to targeted cells expressing the polypeptide of the present invention. Polypeptides or polypeptide antibodes of the invention may be associated with with heterologous polypeptides, heterologous nucleic acids, toxins, or prodrugs via hydrophobic, hydrophilic, ionic and/or covalent interactions.

[0673] Polypeptides, protein fusions to, or fragments thereof, of the present invention are useful in enhancing the immunogenicity and/or antigenicity of proliferating cells or tissues, either directly, such as would occur if the polypeptides of the present invention ‘vaccinated’ the immune response to respond to proliferative antigens and immunogens, or indirectly, such as in activating the expression of proteins known to enhance the immune response (e.g. chemokines), to said antigens and immunogens.

[0674] Anti-Angiogenesis Activity

[0675] The naturally occurring balance between endogenous stimulators and inhibitors of angiogenesis is one in which inhibitory influences predominate. Rastinejad et al., Cell 56:345-355 (1989). In those rare instances in which neovascularization occurs under normal physiological conditions, such as wound healing, organ regeneration, embryonic development, and female reproductive processes, angiogenesis is stringently regulated and spatially and temporally delimited. Under conditions of pathological angiogenesis such as that characterizing solid tumor growth, these regulatory controls fail. Unregulated angiogenesis becomes pathologic and sustains progression of many neoplastic and non-neoplastic diseases. A number of serious diseases are dominated by abnormal neovascularization including solid tumor growth and metastases, arthritis, some types of eye disorders, and psoriasis. See, e.g., reviews by Moses et al., Biotech 9:630-634 (1991); Folman et al., N. Engl. J. Med., 333:1757-1763 (1995); Auerbach et al., J. Microvasc. Res. 29:401-411 (1985); Folkman, Advances in Cancer Research, eds. Klein and Weinhouse, Academic Press, New York, pp. 175-203 (1985); Patz, Am. J. Opthalmol. 94:715-743 (1982); and Folkman et al., Science 221:719-725 (1983). In a number of pathological conditions, the process of angiogenesis contributes to the disease state. For example, significant data have accumulated which suggest that the growth of solid tumors is dependent on angiogenesis. Folkman and Klagsbrun, Science 235:442-447 (1987).

[0676] The present invention provides for treatment of diseases or disorders associated with neovascularization by administration of the polynucleotides and/or polypeptides of the invention, as well as agonists or antagonists of the present invention. Malignant and metastatic conditions which can be treated with the polynucleotides and polypeptides, or agonists or antagonists of the invention include, but are not limited to, malignancies, solid tumors, and cancers described herein and otherwise known in the art (for a review of such disorders, see Fishman et al., Medicine, 2d Ed., J. B. Lippincott Co., Philadelphia (1985)). Thus, the present invention provides a method of treating an angiogenesis-related disease and/or disorder, comprising administering to an individual in need thereof a therapeutically effective amount of a polynucleotide, polypeptide, antagonist and/or agonist of the invention. For example, polynucleotides, polypeptides, antagonists and/or agonists may be utilized in a variety of additional methods in order to therapeutically treat a cancer or tumor. Cancers which may be treated with polynucleotides, polypeptides, antagonists and/or agonists include, but are not limited to solid tumors, including prostate, lung, breast, ovarian, stomach, pancreas, larynx, esophagus, testes, liver, parotid, biliary tract, colon, rectum, cervix, uterus, endometrium, kidney, bladder, thyroid cancer, primary tumors and metastases; melanomas; glioblastoma; Kaposi's sarcoma; leiomyosarcoma; non-small cell lung cancer, colorectal cancer, advanced malignancies; and blood born tumors such as leukemias. For example, polynucleotides, polypeptides, antagonists and/or agonists may be delivered topically, in order to treat cancers such as skin cancer, head and neck tumors, breast tumors, and Kaposi's sarcoma.

[0677] Within yet other aspects, polynucleotides, polypeptides, antagonists and/or agonists may be utilized to treat superficial forms of bladder cancer by, for example, intravesical administration. Polynucleotides, polypeptides, antagonists and/or agonists may be delivered directly into the tumor, or near the tumor site, via injection or a catheter. Of course, as the artisan of ordinary skill will appreciate, the appropriate mode of administration will vary according to the cancer to be treated. Other modes of delivery are discussed herein.

[0678] Polynucleotides, polypeptides, antagonists and/or agonists may be useful in treating other disorders, besides cancers, which involve angiogenesis. These disorders include, but are not limited to: benign tumors, for example hemangiomas, acoustic neuromas, neurofibromas, trachomas, and pyogenic granulomas; artheroscleric plaques; ocular angiogenic diseases, for example, diabetic retinopathy, retinopathy of prematurity, macular degeneration, corneal graft rejection, neovascular glaucoma, retrolental fibroplasia, rubeosis, retinoblastoma, uvietis and Pterygia (abnormal blood vessel growth) of the eye; rheumatoid arthritis; psoriasis; delayed wound healing; endometriosis; vasculogenesis; granulations; hypertrophic scars (keloids); nonunion fractures; scleroderma; trachoma; vascular adhesions; myocardial angiogenesis; coronary collaterals; cerebral collaterals; arteriovenous malformations; ischemic limb angiogenesis; Osler-Webber Syndrome; plaque neovascularization; telangiectasia; hemophiliac joints; angiofibroma; fibromuscular dysplasia; wound granulation; Crohn's disease; and atherosclerosis.

[0679] For example, within one aspect of the present invention methods are provided for treating hypertrophic scars and keloids, comprising the step of administering a polynucleotide, polypeptide, antagonist and/or agonist of the invention to a hypertrophic scar or keloid.

[0680] Within one embodiment of the present invention polynucleotides, polypeptides, antagonists and/or agonists of the invention are directly injected into a hypertrophic scar or keloid, in order to prevent the progression of these lesions. This therapy is of particular value in the prophylactic treatment of conditions which are known to result in the development of hypertrophic scars and keloids (e.g., burns), and is preferably initiated after the proliferative phase has had time to progress (approximately 14 days after the initial injury), but before hypertrophic scar or keloid development. As noted above, the present invention also provides methods for treating neovascular diseases of the eye, including for example, corneal neovascularization, neovascular glaucoma, proliferative diabetic retinopathy, retrolental fibroplasia and macular degeneration.

[0681] Moreover, Ocular disorders associated with neovascularization which can be treated with the polynucleotides and polypeptides of the present invention (including agonists and/or antagonists) include, but are not limited to: neovascular glaucoma, diabetic retinopathy, retinoblastoma, retrolental fibroplasia, uveitis, retinopathy of prematurity macular degeneration, corneal graft neovascularization, as well as other eye inflammatory diseases, ocular tumors and diseases associated with choroidal or iris neovascularization. See, e.g., reviews by Waltman et al., Am. J. Ophthal. 85:704-710 (1978) and Gartner et al., Surv. Ophthal. 22:291-312 (1978).

[0682] Thus, within one, aspect of the present invention methods are provided for treating neovascular diseases of the eye such as corneal neovascularization (including corneal graft neovascularization), comprising the step of administering to a patient a therapeutically effective amount of a compound (as described above) to the cornea, such that the formation of blood vessels is inhibited. Briefly, the cornea is a tissue which normally lacks blood vessels. In certain pathological conditions however, capillaries may extend into the cornea from the pericorneal vascular plexus of the limbus. When the cornea becomes vascularized, it also becomes clouded, resulting in a decline in the patient's visual acuity. Visual loss may become complete if the cornea completely opacitates. A wide variety of disorders can result in corneal neovascularization, including for example, corneal infections (e.g., trachoma, herpes simplex keratitis, leishmaniasis and onchocerciasis), immunological processes (e.g., graft rejection and Stevens-Johnson's syndrome), alkali burns, trauma, inflammation (of any cause), toxic and nutritional deficiency states, and as a complication of wearing contact lenses.

[0683] Within particularly preferred embodiments of the invention, may be prepared for topical administration in saline (combined with any of the preservatives and antimicrobial agents commonly used in ocular preparations), and administered in eyedrop form. The solution or suspension may be prepared in its pure form and administered several times daily. Alternatively, anti-angiogenic compositions, prepared as described above, may also be administered directly to the cornea. Within preferred embodiments, the anti-angiogenic composition is prepared with a muco-adhesive polymer which binds to cornea. Within further embodiments, the anti-angiogenic factors or anti-angiogenic compositions may be utilized as an adjunct to conventional steroid therapy. Topical therapy may also be useful prophylactically in corneal lesions which are known to have a high probability of inducing an angiogenic response (such as chemical burns). In these instances the treatment, likely in combination with steroids, may be instituted immediately to help prevent subsequent complications.

[0684] Within other embodiments, the compounds described above may be injected directly into the corneal stroma by an ophthalmologist under microscopic guidance. The preferred site of injection may vary with the morphology of the individual lesion, but the goal of the administration would be to place the composition at the advancing front of the vasculature (i.e., interspersed between the blood vessels and the normal cornea). In most cases this would involve perilimbic corneal injection to “protect” the cornea from the advancing blood vessels. This method may also be utilized shortly after a corneal insult in order to prophylactically prevent corneal neovascularization. In this situation the material could be injected in the perilimbic cornea interspersed between the corneal lesion and its undesired potential limbic blood supply. Such methods may also be utilized in a similar fashion to prevent capillary invasion of transplanted corneas. In a sustained-release form injections might only be required 2-3 times per year. A steroid could also be added to the injection solution to reduce inflammation resulting from the injection itself.

[0685] Within another aspect of the present invention, methods are provided for treating neovascular glaucoma, comprising the step of administering to a patient a therapeutically effective amount of a polynucleotide, polypeptide, antagonist and/or agonist to the eye, such that the formation of blood vessels is inhibited. In one embodiment, the compound may be administered topically to the eye in order to treat early forms of neovascular glaucoma. Within other embodiments, the compound may be implanted by injection into the region of the anterior chamber angle. Within other embodiments, the compound may also be placed in any location such that the compound is continuously released into the aqueous humor. Within another aspect of the present invention, methods are provided for treating proliferative diabetic retinopathy, comprising the step of administering to a patient a therapeutically effective amount of a polynucleotide, polypeptide, antagonist and/or agonist to the eyes, such that the formation of blood vessels is inhibited.

[0686] Within particularly preferred embodiments of the invention, proliferative diabetic retinopathy may be treated by injection into the aqueous humor or the vitreous, in order to increase the local concentration of the polynucleotide, polypeptide, antagonist and/or agonist in the retina. Preferably, this treatment should be initiated prior to the acquisition of severe disease requiring photocoagulation.

[0687] Within another aspect of the present invention, methods are provided for treating retrolental fibroplasia, comprising the step of administering to a patient a therapeutically effective amount of a polynucleotide, polypeptide, antagonist and/or agonist to the eye, such that the formation of blood vessels is inhibited. The compound may be administered topically, via intravitreous injection and/or via intraocular implants.

[0688] Additionally, disorders which can be treated with the polynucleotides, polypeptides, agonists and/or agonists include, but are not limited to, hemangioma, arthritis, psoriasis, angiofibroma, atherosclerotic plaques, delayed wound healing, granulations, hemophilic joints, hypertrophic scars, nonunion fractures, Osler-Weber syndrome, pyogenic granuloma, scleroderma, trachoma, and vascular adhesions.

[0689] Moreover, disorders and/or states, which can be detected, prevented, diagnosed, prognosticated, treated, and/or ameliorated with the the polynucleotides, polypeptides, agonists and/or agonists of the invention include, but are not limited to, solid tumors, blood born tumors such as leukemias, tumor metastasis, Kaposi's sarcoma, benign tumors, for example hemangiomas, acoustic neuromas, neurofibromas, trachomas, and pyogenic granulomas, rheumatoid arthritis, psoriasis, ocular angiogenic diseases, for example, diabetic retinopathy, retinopathy of prematurity, macular degeneration, corneal graft rejection, neovascular glaucoma, retrolental fibroplasia, rubeosis, retinoblastoma, and uvietis, delayed wound healing, endometriosis, vascluogenesis, granulations, hypertrophic scars (keloids), nonunion fractures, scleroderma, trachoma, vascular adhesions, myocardial angiogenesis, coronary collaterals, cerebral collaterals, arteriovenous malformations, ischemic limb angiogenesis, Osler-Webber Syndrome, plaque neovascularization, telangiectasia, hemophiliac joints, angiofibroma fibromuscular dysplasia, wound granulation, Crohn's disease, atherosclerosis, birth control agent by preventing vascularization required for embryo implantation controlling menstruation, diseases that have angiogenesis as a pathologic consequence such as cat scratch disease (Rochele minalia quintosa), ulcers (Helicobacter pylori), Bartonellosis and bacillary angiomatosis.

[0690] In one aspect of the birth control method, an amount of the compound sufficient to block embryo implantation is administered before or after intercourse and fertilization have occurred, thus providing an effective method of birth control, possibly a “morning after” method. Polynucleotides, polypeptides, agonists and/or agonists may also be used in controlling menstruation or administered as either a peritoneal lavage fluid or for peritoneal implantation in the treatment of endometriosis.

[0691] Polynucleotides, polypeptides, agonists and/or agonists of the present invention may be incorporated into surgical sutures, in order to prevent stitch granulomas.

[0692] Polynucleotides, polypeptides, agonists and/or agonists may be utilized in a wide variety of surgical procedures. For example, within one aspect of the present invention a compositions (in the form of, for example, a spray or film) may be utilized to coat or spray an area prior to removal of a tumor, in order to isolate normal surrounding tissues from malignant tissue, and/or to prevent the spread of disease to surrounding tissues. Within other aspects of the present invention, compositions (e.g., in the form of a spray) may be delivered via endoscopic procedures in order to coat tumors, or inhibit angiogenesis in a desired locale. Within yet other aspects of the present invention, surgical meshes which have been coated with anti-angiogenic compositions of the present invention may be utilized in any procedure wherein a surgical mesh might be utilized. For example, within one embodiment of the invention a surgical mesh laden with an anti-angiogenic composition may be utilized during abdominal cancer resection surgery (e.g., subsequent to colon resection) in order to provide support to the structure, and to release an amount of the anti-angiogenic factor.

[0693] Within further aspects of the present invention, methods are provided for treating tumor excision sites, comprising administering a polynucleotide, polypeptide, agonist and/or agonist to the resection margins of a tumor subsequent to excision, such that the local recurrence of cancer and the formation of new blood vessels at the site is inhibited. Within one embodiment of the invention, the anti-angiogenic compound is administered directly to the tumor excision site (e.g., applied by swabbing, brushing or otherwise coating the resection margins of the tumor with the anti-angiogenic compound). Alternatively, the anti-angiogenic compounds may be incorporated into known surgical pastes prior to administration. Within particularly preferred embodiments of the invention, the anti-angiogenic compounds are applied after hepatic resections for malignancy, and after neurosurgical operations.

[0694] Within one aspect of the present invention, polynucleotides, polypeptides, agonists and/or agonists may be administered to the resection margin of a wide variety of tumors, including for example, breast, colon, brain and hepatic tumors. For example, within one embodiment of the invention, anti-angiogenic compounds may be administered to the site of a neurological tumor subsequent to excision, such that the formation of new blood vessels at the site are inhibited.

[0695] The polynucleotides, polypeptides, agonists and/or agonists of the present invention may also be administered along with other anti-angiogenic factors. Representative examples of other anti-angiogenic factors include: Anti-Invasive Factor, retinoic acid and derivatives thereof, paclitaxel, Suramin, Tissue Inhibitor of Metalloproteinase-1, Tissue Inhibitor of Metafloproteinase-2, Plasminogen Activator Inbibitor-1, Plasminogen Activator Inhibitor-2, and various forms of the lighter “d group” transition metals.

[0696] Lighter “d group” transition metals include, for example, vanadium, molybdenum, tungsten, titanium, niobium, and tantalum species. Such transition metal species may form transition metal complexes. Suitable complexes of the above-mentioned transition metal species include oxo transition metal complexes.

[0697] Representative examples of vanadium complexes include oxo vanadium complexes such as vanadate and vanadyl complexes. Suitable vanadate complexes include metavanadate and orthovanadate complexes such as, for example, ammonium metavanadate, sodium metavanadate, and sodium orthovanadate. Suitable vanadyl complexes include, for example, vanadyl acetylacetonate and vanadyl sulfate including vanadyl sulfate hydrates such as vanadyl sulfate mono- and trihydrates.

[0698] Representative examples of tungsten and molybdenum complexes also include oxo complexes. Suitable oxo tungsten complexes include tungstate and tungsten oxide complexes. Suitable tungstate complexes include ammonium tungstate, calcium tungstate, sodium tungstate dihydrate, and tungstic acid. Suitable tungsten oxides include tungsten (IV) oxide and tungsten (VI) oxide. Suitable oxo molybdenum complexes include molybdate, molybdenum oxide, and molybdenyl complexes. Suitable molybdate complexes include ammonium molybdate and its hydrates, sodium molybdate and its hydrates, and potassium molybdate and its hydrates. Suitable molybdenum oxides include molybdenum (VI) oxide, molybdenum (VI) oxide, and molybdic acid. Suitable molybdenyl complexes include, for example, molybdenyl acetylacetonate. Other suitable tungsten and molybdenum complexes include hydroxo derivatives derived from, for example, glycerol, tartaric acid, and sugars.

[0699] A wide variety of other anti-angiogenic factors may also be utilized within the context of the present invention. Representative examples include platelet factor 4; protamine sulphate; sulphated chitin derivatives (prepared from queen crab shells), (Murata et al., Cancer Res. 51:22-26, 1991); Sulphated Polysaccharide Peptidoglycan Complex (SP-PG) (the function of this compound may be enhanced by the presence of steroids such as estrogen, and tamoxifen citrate); Staurosporine; modulators of matrix metabolism, including for example, proline analogs, cishydroxyproline, dL-3,4-dehydroproline, Thiaproline, alpha,alpha-dipyridyl, aminopropionitrile fumarate; 4-propyl-5-(4-pyridinyl)-2(3H)-oxazolone; Methotrexate; Mitoxantrone; Heparin; Interferons; 2 Macroglobulin-serum; ChTMP-3 (Pavloff et al., J. Bio. Chem. 267:17321-17326, 1992); Chymostatin (Tomkinson et al., Biochem J. 286:475-480, 1992); Cyclodextrin Tetradecasulfate; Eponemycin; Camptothecin; Pumagillin (Ingber et al., Nature 348:555-557, 1990); Gold Sodium Thiomalate (“GST”; Matsubara and Ziff, J. Clin. Invest. 79:1440-1446, 1987); anticollagenase-serum; alpha2-antiplasmin (Holmes et al., J. Biol. Chem. 262(4):1659-1664, 1987); Bisantrene (National Cancer Institute); Lobenzarit disodium (N-(2)-carboxyphenyl-4-chloroanthronilic acid disodium or “CCA”; Takeuchi et al., Agents Actions 36:312-316, 1992); Thalidomide; Angostatic steroid; AGM-1470; carboxynaminolmidazole; and metalloproteinase inhibitors such as BB94.

[0700] Diseases at the Cellular Level

[0701] Diseases associated with increased cell survival or the inhibition of apoptosis that could be detected, prevented, diagnosed, prognosticated, treated, and/or ameliorated using polynucleotides or polypeptides, as well as antagonists or agonists of the present invention, include cancers (such as follicular lymphomas, carcinomas with p53 mutations, and hormone-dependent tumors, including, but not limited to colon cancer, cardiac tumors, pancreatic cancer, melanoma, retinoblastoma, glioblastoma, lung cancer, intestinal cancer, testicular cancer, stomach cancer, neuroblastoma, myxoma, myoma, lymphoma, endothelioma, osteoblastoma, osteoclastoma, osteosarcoma, chondrosarcoma, adenoma, breast cancer, prostate cancer, Kaposi's sarcoma and ovarian cancer); autoimmune disorders (such as, multiple sclerosis, Sjogren's syndrome, Hashimoto's thyroiditis, biliary cirrhosis, Behcet's disease, Crohn's disease, polymyositis, systemic lupus erythematosus and immune-related glomerulonephritis and rheumatoid arthritis) and viral infections (such as herpes viruses, pox viruses and adenoviruses), inflammation, graft v. host disease, acute graft rejection, and chronic graft rejection.

[0702] In preferred embodiments, polynucleotides, polypeptides, and/or antagonists of the invention are used to inhibit growth, progression, and/or metasis of cancers, in particular those listed above.

[0703] Additional diseases or conditions associated with increased cell survival that could be treated or detected by polynucleotides or polypeptides, or agonists or antagonists of the present invention include, but are not limited to, progression, and/or metastases of malignancies and related disorders such as leukemia (including acute leukemias (e.g., acute lymphocytic leukemia, acute myelocytic leukemia (including myeloblastic, promyelocytic, myelomonocytic, monocytic, and erythroleukemia)) and chronic leukemias (e.g., chronic myelocytic (granulocytic) leukemia and chronic lymphocytic leukemia)), polycythemia vera, lymphomas (e.g., Hodgkin's disease and non-Hodgkin's disease), multiple myeloma, Waldenstrom's macroglobulinemia, heavy chain disease, and solid tumors including, but not limited to, sarcomas and carcinomas such as fibrosarcoma, myxosarcoma, liposarcoma, chondrosarcoma, osteogenic sarcoma, chordoma, angiosarcoma, endotheliosarcoma, lymphangiosarcoma, lymphangioendotheliosarcoma, synovioma, mesothelioma, Ewing's tumor, leiomyosarcoma, rhabdomyosarcoma, colon carcinoma, pancreatic cancer, breast cancer, ovarian cancer, prostate cancer, squamous cell carcinoma, basal cell carcinoma, adenocarcinoma, sweat gland carcinoma, sebaceous gland carcinoma, papillary carcinoma, papillary adenocarcinomas, cystadenocarcinoma, medullary carcinoma, bronchogenic carcinoma, renal cell carcinoma, hepatoma, bile duct carcinoma, choriocarcinoma, seminoma, embryonal carcinoma, Wilm's tumor, cervical cancer, testicular tumor, lung carcinoma, small cell lung carcinoma, bladder carcinoma, epithelial carcinoma, glioma, astrocytoma, medulloblastoma, craniopharyngioma, ependymoma, pinealoma, hemangioblastoma, acoustic neuroma, oligodendroglioma, menangioma, melanoma, neuroblastoma, and retinoblastoma Diseases associated with increased apoptosis that could be detected, prevented, diagnosed, prognosticated, treated, and/or ameliorated using polynucleotides or polypeptides, as well as agonists or antagonists of the present invention, include, but are not limited to, AIDS; neurodegenerative disorders (such as Alzheimer's disease, Parkinson's disease, Amyotrophic lateral sclerosis, Retinitis pigmentosa, Cerebellar degeneration and brain tumor or prior associated disease); autoimmune disorders (such as, multiple sclerosis, Sjogren's syndrome, Hashimoto's thyroiditis, biliary cirrhosis, Behcet's disease, Crohn's disease, polymyositis, systemic lupus erythematosus and immune-related glomerulonephritis and rheumatoid arthritis) myelodysplastic syndromes (such as aplastic anemia), graft v. host disease, ischemic injury (such as that caused by myocardial infarction, stroke and reperfusion injury), liver injury (e.g., hepatitis related liver injury, ischemia/reperfusion injury, cholestosis (bile duct injury) and liver cancer); toxin-induced liver disease (such as that caused by alcohol), septic shock, cachexia and anorexia.

[0704] Wound Healing and Epithelial Cell Proliferation

[0705] In accordance with yet a further aspect of the present invention, there is provided a process for utilizing polynucleotides or polypeptides, as well as agonists or antagonists of the present invention, for therapeutic purposes, for example, to stimulate epithelial cell proliferation and basal keratinocytes for the purpose of wound healing, and to stimulate hair follicle production and healing of dermal wounds. Polynucleotides or polypeptides, as well as agonists or antagonists of the present invention, may be clinically useful in stimulating wound healing including surgical wounds, excisional wounds, deep wounds involving damage of the dermis and epidermis, eye tissue wounds, dental tissue wounds, oral cavity wounds, diabetic ulcers, dermal ulcers, cubitus ulcers, arterial ulcers, venous stasis ulcers, burns resulting from heat exposure or chemicals, and other abnormal wound healing conditions such as uremia, malnutrition, vitamin deficiencies and complications associated with systemic treatment with steroids, radiation therapy and antineoplastic drugs and antimetabolites. Polynucleotides or polypeptides, as well as agonists or antagonists of the present invention, could be used to promote dermal reestablishment subsequent to dermal loss

[0706] Polynucleotides or polypeptides, as well as agonists or antagonists of the present invention, could be used to increase the adherence of skin grafts to a wound bed and to stimulate re-epithelialization from the wound bed. The following are types of grafts that polynucleotides or polypeptides, agonists or antagonists of the present invention, could be used to increase adherence to a wound bed: autografts, artificial skin, allografts, autodermic graft, autoepdermic grafts, avacular grafts, Blair-Brown grafts, bone graft, brephoplastic grafts, cutis graft, delayed graft, dermic graft, epidermic graft, fascia graft, full thickness graft, heterologous graft, xenograft, homologous graft, hyperplastic graft, lamellar graft, mesh graft, mucosal graft, Ollier-Thiersch graft, omenpal graft, patch graft, pedicle graft, penetrating graft, split skin graft, thick split graft Polynucleotides or polypeptides, as well as agonists or antagonists of the present invention, can be used to promote skin strength and to improve the appearance of aged skin.

[0707] It is believed that polynucleotides or polypeptides, as well as agonists or antagonists of the present invention, will also produce changes in hepatocyte proliferation, and epithelial cell proliferation in the lung, breast, pancreas, stomach, small intestine, and large intestine. Polynucleotides or polypeptides, as well as agonists or antagonists of the present invention, could promote proliferation of epithelial cells such as sebocytes, hair follicles, hepatocytes, type II pneumocytes, mucin-producing goblet cells, and other epithelial cells and their progenitors contained within the skin, lung, liver, and gastrointestinal tract. Polynucleotides or polypeptides, agonists or antagonists of the present invention, may promote proliferation of endothelial cells, keratinocytes, and basal keratinocytes.

[0708] Polynucleotides or polypeptides, as well as agonists or antagonists of the present invention, could also be used to reduce the side effects of gut toxicity that result from radiation, chemotherapy treatments or viral infections. Polynucleotides or polypeptides, as well as agonists or antagonists of the present invention, may have a cytoprotective effect on the small intestine mucosa. Polynucleotides or polypeptides, as well as agonists or antagonists of the present invention, may also stimulate healing of mucositis (mouth ulcers) that result from chemotherapy and viral infections.

[0709] Polynucleotides or polypeptides, as well as agonists or antagonists of the present invention, could further be used in full regeneration of skin in full and partial thickness skin defects, including burns, (i.e., repopulation of hair follicles, sweat glands, and sebaceous glands), treatment of other skin defects such as psoriasis. Polynucleotides or polypeptides, as well as agonists or antagonists of the present invention, could be used to treat epidermolysis bullosa, a defect in adherence of the epidermis to the underlying dermis which results in frequent, open and painful blisters by accelerating reepithelialization of these lesions. Polynucleotides or polypeptides, as well as agonists or antagonists of the present invention, could also be used to treat gastric and doudenal ulcers and help heal by scar formation of the mucosal lining and regeneration of glandular mucosa and duodenal mucosal lining more rapidly. Inflammatory bowel diseases, such as Crohn's disease and ulcerative colitis, are diseases which result in destruction of the mucosal surface of the small or large intestine, respectively. Thus, polynucleotides or polypeptides, as well as agonists or antagonists of the present invention, could be used to promote the resurfacing of the mucosal surface to aid more rapid healing and to prevent progression of inflammatory bowel disease. Treatment with polynucleotides or polypeptides, agonists or antagonists of the present invention, is expected to have a significant effect on the production of mucus throughout the gastrointestinal tract and could be used to protect the intestinal mucosa from injurious substances that are ingested or following surgery. Polynucleotides or polypeptides, as well as agonists or antagonists of the present invention, could be used to treat diseases associate with the under expression.

[0710] Moreover, polynucleotides or polypeptides, as well as agonists or antagonists of the present invention, could be used to prevent and heal damage to the lungs due to various pathological states. Polynucleotides or polypeptides, as well as agonists or antagonists of the present invention, which could stimulate proliferation and differentiation and promote the repair of alveoli and brochiolar epithelium to prevent or treat acute or chronic lung damage. For example, emphysema, which results in the progressive loss of aveoli, and inhalation injuries, i.e., resulting from smoke inhalation and burns, that cause necrosis of the bronchiolar epithelium and alveoli could be effectively treated using polynucleotides or polypeptides, agonists or antagonists of the present invention. Also, polynucleotides or polypeptides, as well as agonists or antagonists of the present invention, could be used to stimulate the proliferation of and differentiation of type II pneumocytes, which may help treat or prevent disease such as hyaline membrane diseases, such as infant respiratory distress syndrome and bronchopulmonary displasia, in premature infants.

[0711] Polynucleotides or polypeptides, as well as agonists or antagonists of the present invention, could stimulate the proliferation and differentiation of hepatocytes and, thus, could be used to alleviate or treat liver diseases and pathologies such as fulminant liver failure caused by cirrhosis, liver damage caused by viral hepatitis and toxic substances (i.e., acetaminophen, carbon tetraholoride and other hepatotoxins known in the art).

[0712] In addition, polynucleotides or polypeptides, as well as agonists or antagonists of the present invention, could be used treat or prevent the onset of diabetes mellitus. In patients with newly diagnosed Types I and II diabetes, where some islet cell function remains, polynucleotides or polypeptides, as well as agonists or antagonists of the present invention, could be used to maintain the islet function so as to alleviate, delay or prevent permanent manifestation of the disease. Also, polynucleotides or polypeptides, as well as agonists or antagonists of the present invention, could be used as an auxiliary in islet cell transplantation to improve or promote islet cell function.

[0713] Regeneration

[0714] Polynucleotides or polypeptides, as well as agonists or antagonists of the present invention can be used to differentiate, proliferate, and attract cells, leading to the regeneration of tissues. (See, Science 276:59-87 (1997)). The regeneration of tissues could be used to repair, replace, or protect tissue damaged by congenital defects, trauma (wounds, burns, incisions, or ulcers), age, disease (e.g. osteoporosis, osteocarthritis, periodontal disease, liver failure), surgery, including cosmetic plastic surgery, fibrosis, reperfusion injury, or systemic cytoline damage.

[0715] Tissues that could be regenerated using the present invention include organs (e.g., pancreas, liver, intestine, kidney, skin, endothelium), muscle (smooth, skeletal or cardiac), vasculature (including vascular and lymphatics), nervous, hematopoietic, and skeletal (bone, cartilage, tendon, and ligament) tissue. Preferably, regeneration occurs without or decreased scarring. Regeneration also may include angiogenesis.

[0716] Moreover, polynucleotides or polypeptides, as well as agonists or antagonists of the present invention, may increase regeneration of tissues difficult to heal. For example, increased tendon/ligament regeneration would quicken recovery time after damage. Polynucleotides or polypeptides, as well as agonists or antagonists of the present invention could also be used prophylactically in an effort to avoid damage. Specific diseases that could be treated include of tendinitis, carpal tunnel syndrome, and other tendon or ligament defects. A further example of tissue regeneration of non-healing wounds includes pressure ulcers, ulcers associated with vascular insufficiency, surgical, and traumatic wounds.

[0717] Similarly, nerve and brain tissue could also be regenerated by using polynucleotides or polypeptides, as well as agonists or antagonists of the present invention, to proliferate and differentiate nerve cells. Diseases that could be treated using this method include central and peripheral nervous system diseases, neuropathies, or mechanical and traumatic disorders (e.g., spinal cord disorders, head trauma, cerebrovascular disease, and stoke). Specifically, diseases associated with peripheral nerve injuries, peripheral neuropathy (e.g., resulting from chemotherapy or other medical therapies), localized neuropathies, and central nervous system diseases (e.g., Alzheimer's disease, Parkinson's disease, Huntington's disease, amyotrophic lateral sclerosis, and Shy-Drager syndrome), could all be treated using the polynucleotides or polypeptides, as well as agonists or antagonists of the present invention.

[0718] Chemotaxis

[0719] Polynucleotides or polypeptides, as well as agonists or antagonists of the present invention may have chemotaxis activity. A chemotaxic molecule attracts or mobilizes cells (e.g., monocytes, fibroblasts, neutrophils, T-cells, mast cells, eosinophils, epithelial and/or endothelial cells) to a particular site in the body, such as inflammation, infection, or site of hyperproliferation. The mobilized cells can then fight off and/or heal the particular trauma or abnormality.

[0720] Polynucleotides or polypeptides, as well as agonists or antagonists of the present invention may increase chemotaxic activity of particular cells. These chemotactic molecules can then be used to treat inflammation, infection, hyperproliferative disorders, or any immune system disorder by increasing the number of cells targeted to a particular location in the body. For example, chemotaxic molecules can be used to treat wounds and other trauma to tissues by attracting immune cells to the injured location. Chemotactic molecules of the present invention can also attract fibroblasts, which can be used to treat wounds.

[0721] It is also contemplated that polynucleotides or polypeptides, as well as agonists or antagonists of the present invention may inhibit chemotactic activity. These molecules could also be used to treat disorders. Thus, polynucleotides or polypeptides, as well as agonists or antagonists of the present invention could be used as an inhibitor of chemotaxis.

[0722] Binding Activity

[0723] A polypeptide of the present invention may be used to screen for molecules that bind to the polypeptide or for molecules to which the polypeptide binds. The binding of the polypeptide and the molecule may activate (agonist), increase, inhibit (antagonist), or decrease activity of the polypeptide or the molecule bound. Examples of such molecules include antibodies, oligonucleotides, proteins (e.g., receptors), or small molecules.

[0724] Preferably, the molecule is closely related to the natural ligand of the polypeptide, e.g., a fragment of the ligand, or a natural substrate, a ligand, a structural or functional mimetic. (See, Coligan et al., Current Protocols in Immunology 1(2):Chapter 5 (1991)). Similarly, the molecule can be closely related to the natural receptor to which the polypeptide binds, or at least, a fragment of the receptor capable of being bound by the polypeptide (e.g., active site). In either case, the molecule can be rationally designed using known techniques.

[0725] Preferably, the screening for these molecules involves producing appropriate cells which express the polypeptide. Preferred cells include cells from mammals, yeast, Drosophila, or E. coli. Cells expressing the polypeptide (or cell membrane containing the expressed polypeptide) are then preferably contacted with a test compound potentially containing the molecule to observe binding, stimulation, or inhibition of activity of either the polypeptide or the molecule.

[0726] The assay may simply test binding of a candidate compound to the polypeptide, wherein binding is detected by a label, or in an assay involving competition with a labeled competitor. Further, the assay may test whether the candidate compound results in a signal generated by binding to the polypeptide.

[0727] Alternatively, the assay can be carried out using cell-free preparations, polypeptide/molecule affixed to a solid support, chemical libraries, or natural product mixtures. The assay may also simply comprise the steps of mixing a candidate compound with a solution containing a polypeptide, measuring polypeptide/molecule activity or binding, and comparing the polypeptide/molecule activity or binding to a standard.

[0728] Preferably, an ELISA assay can measure polypeptide level or activity in a sample (e.g., biological sample) using a monoclonal or polyclonal antibody. The antibody can measure polypeptide level or activity by either binding, directly or indirectly, to the polypeptide or by competing with the polypeptide for a substrate.

[0729] Additionally, the receptor to which the polypeptide of the present invention binds can be identified by numerous methods known to those of skill in the art, for example, ligand panning and FACS sorting (Coligan, et al., Current Protocols in Immun., 1(2), Chapter 5, (1991)). For example, expression cloning is employed wherein polyadenylated RNA is prepared from a cell responsive to the polypeptides, for example, NIH3T3 cells which are known to contain multiple receptors for the FGF family proteins, and SC-3 cells, and a cDNA library created from this RNA is divided into pools and used to transfect COS cells or other cells that are not responsive to the polypeptides. Transfected cells which are grown on glass slides are exposed to the polypeptide of the present invention, after they have been labeled. The polypeptides can be labeled by a variety of means including iodination or inclusion of a recognition site for a site-specific protein kinase.

[0730] Following fixation and incubation, the slides are subjected to auto-radiographic analysis. Positive pools are identified and subpools are prepared and re-transfected using an iterative sub-pooling and re-screening process, eventually yielding a single clones that encodes the putative receptor.

[0731] As an alternative approach for receptor identification, the labeled polypeptides can be photoaffinity linked with cell membrane or extract preparations that express the receptor molecule. Cross-linked material is resolved by PAGE analysis and exposed to X-ray film. The labeled complex containing the receptors of the polypeptides can be excised, resolved into peptide fragments, and subjected to protein microsequencing. The amino acid sequence obtained from microsequencing would be used to design a set of degenerate oligonucleotide probes to screen a cDNA library to identify the genes encoding the putative receptors.

[0732] Moreover, the techniques of gene-shuffling, motif-shuffling, exon-shuffling, and/or codon-shuffling (collectively referred to as “DNA shuffling”) may be employed to modulate the activities of the polypeptide of the present invention thereby effectively generating agonists and antagonists of the polypeptide of the present invention. See generally, U.S. Pat. Nos. 5,605,793, 5,811,238, 5,830,721, 5,834,252, and 5,837,458, and Patten, P. A., et al., Curr. Opinion Biotechnol. 8:724-33 (1997); Harayama, S. Trends Biotechnol. 16(2):76-82 (1998); Hansson, L. O., et al., J. Mol. Biol. 287:265-76 (1999); and Lorenzo, M. M. and Blasco, R. Biotechniques 24(2):308-13 (1998); each of these patents and publications are hereby incorporated by reference). In one embodiment, alteration of polynucleotides and corresponding polypeptides may be achieved by DNA shuffling. DNA shuffling involves the assembly of two or more DNA segments into a desired molecule by homologous, or site-specific, recombination. In another embodiment, polynucleotides and corresponding polypeptides may be altered by being subjected to random mutagenesis by error-prone PCR, random nucleotide insertion or other methods prior to recombination. In another embodiment, one or more components, motifs, sections, parts, domains, fragments, etc., of the polypeptide of the present invention may be recombined with one or more components, motifs, sections, parts, domains, fragments, etc. of one or more heterologous molecules. In preferred embodiments, the heterologous molecules are family members. In further preferred embodiments, the heterologous molecule is a growth factor such as, for example, platelet-derived growth factor (PDGF), insulin-like growth factor (IGF-I), transforming growth factor (TGF)-alpha, epidermal growth factor (EGF), fibroblast growth factor (FGF), TGF-beta, bone morphogenetic protein (BMP)-2, BMP-4, BMP-5, BMP-6, BMP-7, activins A and B, decapentaplegic(dpp), 60A, OP-2, dorsalin, growth differentiation factors (GDFs), nodal, MIS, inhibin-alpha, TGF-beta1, TGF-beta2, TGF-beta3, TGF-beta5, and glial-derived neurotrophic factor (GDNF).

[0733] Other preferred fragments are biologically active fragments of the polypeptide of the present invention. Biologically active fragments are those exhibiting activity similar, but not necessarily identical, to an activity of the polypeptide of the present invention. The biological activity of the fragments may include an improved desired activity, or a decreased undesirable activity.

[0734] Additionally, this invention provides a method of screening compounds to identify those which modulate the action of the polypeptide of the present invention. An example of such an assay comprises combining a mammalian fibroblast cell, a the polypeptide of the present invention, the compound to be screened and ³[H] thymidine under cell culture conditions where the fibroblast cell would normally proliferate. A control assay may be performed in the absence of the compound to be screened and compared to the amount of fibroblast proliferation in the presence of the compound to determine if the compound stimulates proliferation by determining the uptake of ³[H] thymidine in each case. The amount of fibroblast cell proliferation is measured by liquid scintillation chromatography which measures the incorporation of ³[H] thymidine. Both agonist and antagonist compounds may be identified by this procedure.

[0735] In another method, a mammalian cell or membrane preparation expressing a receptor for a polypeptide of the present invention is incubated with a labeled polypeptide of the present invention in the presence of the compound. The ability of the compound to enhance or block this interaction could then be measured. Alternatively, the response of a known second messenger system following interaction of a compound to be screened and the receptor is measured and the ability of the compound to bind to the receptor and elicit a second messenger response is measured to determine if the compound is a potential agonist or antagonist. Such second messenger systems include but are not limited to, cAMP guanylate cyclase, ion channels or phosphoinositide hydrolysis.

[0736] All of these above assays can be used as diagnostic or prognostic markers. The molecules discovered using these assays can be used to treat disease or to bring about a particular result in a patient (e.g., blood vessel growth) by activating or inhibiting the polypeptide/molecule. Moreover, the assays can discover agents which may inhibit or enhance the production of the polypeptides of the invention from suitably manipulated cells or tissues.

[0737] Therefore, the invention includes a method of identifying compounds which bind to a polypeptide of the invention comprising the steps of: (a) incubating a candidate binding compound with a polypeptide of the present invention; and (b) determining if binding has occurred. Moreover, the invention includes a method of identifying agonists/antagonists comprising the steps of: (a) incubating a candidate compound with a polypeptide of the present invention, (b) assaying a biological activity, and (b) determining if a biological activity of the polypeptide has been altered.

[0738] Targeted Delivery

[0739] In another embodiment, the invention provides a method of delivering compositions to targeted cells expressing a receptor for a polypeptide of the invention, or cells expressing a cell bound form of a polypeptide of the invention.

[0740] As discussed herein, polypeptides or antibodies of the invention may be associated with heterologous polypeptides, heterologous nucleic acids, toxins, or prodrugs via hydrophobic, hydrophilic, ionic and/or covalent interactions. In one embodiment, the invention provides a method for the specific delivery of compositions of the invention to cells by administering polypeptides of the invention (including antibodies) that are associated with heterologous polypeptides or nucleic acids. In one example, the invention provides a method for delivering a therapeutic protein into the targeted cell. In another example, the invention provides a method for delivering a single stranded nucleic acid (e.g., antisense or ribozymes) or double stranded nucleic acid (e.g., DNA that can integrate into the cell's genome or replicate episomally and that can be transcribed) into the targeted cell.

[0741] In another embodiment, the invention provides a method for the specific destruction of cells (e.g., the destruction of tumor cells) by administering polypeptides of the invention (e.g., polypeptides of the invention or antibodies of the invention) in association with toxins or cytotoxic prodrugs.

[0742] By “toxin” is meant compounds that bind and activate endogenous cytotoxic effector systems, radioisotopes, holotoxins, modified toxins, catalytic subunits of toxins, or any molecules or enzymes not normally present in or on the surface of a cell that under defined conditions cause the cell's death. Toxins that may be used according to the methods of the invention include, but are not limited to, radioisotopes known in the art, compounds such as, for example, antibodies (or complement fixing containing portions thereof) that bind an inherent or induced endogenous cytotoxic effector system, thymidine kinase, endonuclease, RNAse, alpha toxin, ricin, abrin, Pseudomonas exotoxin A, diphtheria toxin, saporin, momordin, gelonin, pokeweed antiviral protein, alpha-sarcin and cholera toxin. By “cytotoxic prodrug” is meant a non-toxic compound that is converted by an enzyme, normally present in the cell, into a cytotoxic compound. Cytotoxic prodrugs that may be used according to the methods of the invention include, but are not limited to, glutamyl derivatives of benzoic acid mustard alkylating agent, phosphate derivatives of etoposide or mitomycin C, cytosine arabinoside, daunorubisin, and phenoxyacetamide derivatives of doxorubicin.

[0743] Drug Screening

[0744] Further contemplated is the use of the polypeptides of the present invention, or the polynucleotides encoding these polypeptides, to screen for molecules which modify the activities of the polypeptides of the present invention. Such a method would include contacting the polypeptide of the present invention with a selected compound(s) suspected of having antagonist or agonist activity, and assaying the activity of these polypeptides following binding.

[0745] This invention is particularly useful for screening therapeutic compounds by using the polypeptides of the present invention, or binding fragments thereof, in any of a variety of drug screening techniques. The polypeptide or fragment employed in such a test may be affixed to a solid support, expressed on a cell surface, free in solution, or located intracellularly. One method of drug screening utilizes eukaryotic or prokaryotic host cells which are stably transformed with recombinant nucleic acids expressing the polypeptide or fragment. Drugs are screened against such transformed cells in competitive binding assays. One may measure, for example, the formulation of complexes between the agent being tested and a polypeptide of the present invention.

[0746] Thus, the present invention provides methods of screening for drugs or any other agents which affect activities mediated by the polypeptides of the present invention. These methods comprise contacting such an agent with a polypeptide of the present invention or a fragment thereof and assaying for the presence of a complex between the agent and the polypeptide or a fragment thereof, by methods well known in the art. In such a competitive binding assay, the agents to screen are typically labeled. Following incubation, free agent is separated from that present in bound form, and the amount of free or uncomplexed label is a measure of the ability of a particular agent to bind to the polypeptides of the present invention.

[0747] Another technique for drug screening provides high throughput screening for compounds having suitable binding affinity to the polypeptides of the present invention, and is described in great detail in European Patent Application 84/03564, published on Sep. 13, 1984, which is incorporated herein by reference herein. Briefly stated, large numbers of different small peptide test compounds are synthesized on a solid substrate, such as plastic pins or some other surface. The peptide test compounds are reacted with polypeptides of the present invention and washed. Bound polypeptides are then detected by methods well known in the art. Purified polypeptides are coated directly onto plates for use in the aforementioned drug screening techniques. In addition, non-neutralizing antibodies may be used to capture the peptide and immobilize it on the solid support.

[0748] This invention also contemplates the use of competitive drug screening assays in which neutralizing antibodies capable of binding polypeptides of the present invention specifically compete with a test compound for binding to the polypeptides or fragments thereof. In this manner, the antibodies are used to detect the presence of any peptide which shares one or more antigenic epitopes with a polypeptide of the invention.

[0749] Antisense And Ribozyme (Antagonists)

[0750] In specific embodiments, antagonists according to the present invention are nucleic acids corresponding to the sequences contained in SEQ ID NO:X, or the complementary strand thereof, and/or to cDNA sequences contained in cDNA ATCC Deposit No:Z identified for example, in Table 1A and/or 1B. In one embodiment, antisense sequence is generated internally, by the organism, in another embodiment, the antisense sequence is separately administered (see, for example, O'Connor, J., Neurochem. 56:560 (1991). Oligodeoxynucleotides as Antisense Inhibitors of Gene Expression, CRC Press, Boca Raton, Fla. (1988). Antisense technology can be used to control gene expression through antisense DNA or RNA, or through triple-helix formation. Antisense techniques are discussed for example, in Okano, J., Neurochem. 56:560 (1991); Oligodeoxynucleotides as Antisense Inhibitors of Gene Expression, CRC Press, Boca Raton, Fla. (1988). Triple helix formation is discussed in, for instance, Lee et al., Nucleic Acids Research 6:3073 (1979); Cooney et al., Science 241:456 (1988); and Dervan et al., Science 251:1300 (1991). The methods are based on binding of a polynucleotide to a complementary DNA or RNA.

[0751] For example, the use of c-myc and c-myb antisense RNA constructs to inhibit the growth of the non-lymphocytic leukemia cell line HL-60 and other cell lines was previously described. (Wickstrom et al. (1988); Anfossi et al. (1989)). These experiments were performed in vitro by incubating cells with the oligoribonucleotide. A similar procedure for in vivo use is described in WO 91/15580. Briefly, a pair of oligonucleotides for a given antisense RNA is produced as follows: A sequence complimentary to the first 15 bases of the open reading frame is flanked by an EcoRI site on the 5 end and a HindIII site on the 3 end. Next, the pair of oligonucleotides is heated at 90° C. for one minute and then annealed in 2× ligation buffer (20 mM TRIS HCl pH 7.5, 10 mM MgCl2, 10 MM dithiothreitol (DTT) and 0.2 mM ATP) and then ligated to the EcoR1/Hind III site of the retroviral vector PMV7 (WO 91/15580).

[0752] For example, the 5′ coding portion of a polynucleotide that encodes the polypeptide of the present invention may be used to design an antisense RNA oligonucleotide of from about 10 to 40 base pairs in length. A DNA oligonucleotide is designed to be complementary to a region of the gene involved in transcription thereby preventing transcription and the production of the receptor. The antisense RNA oligonucleotide hybridizes to the mRNA in vivo and blocks translation of the mRNA molecule into receptor polypeptide.

[0753] In one embodiment, the antisense nucleic acid of the invention is produced intracellularly by transcription from an exogenous sequence. For example, a vector or a portion thereof, is transcribed, producing an antisense nucleic acid (RNA) of the invention. Such a vector would contain a sequence encoding the antisense nucleic acid. Such a vector can remain episomal or become chromosomally integrated, as long as it can be transcribed to produce the desired antisense RNA. Such vectors can be constructed by recombinant DNA technology methods standard in the art. Vectors can be plasmid, viral, or others known in the art, used for replication and expression in vertebrate cells. Expression of the sequence encoding the polypeptide of the present invention or fragments thereof, can be by any promoter known in the art to act in vertebrate, preferably human cells. Such promoters can be inducible or constitutive. Such promoters include, but are not limited to, the SV40 early promoter region (Bernoist and Chambon, Nature 29:304-310 (1981), the promoter contained in the 3′ long terminal repeat of Rous sarcoma virus (Yamamoto et al., Cell 22:787-797 (1980), the herpes thymidine promoter (Wagner et al., Proc. Natl. Acad. Sci. U.S.A. 78:1441-1445 (1981), the regulatory sequences of the metallothionein gene (Brinster, et al., Nature 296:39-42 (1982)), etc.

[0754] The antisense nucleic acids of the invention comprise a sequence complementary to at least a portion of an RNA transcript of a gene of the present invention. However, absolute complementarity, although preferred, is not required. A sequence “complementary to at least a portion of an RNA,” referred to herein, means a sequence having sufficient complementarity to be able to hybridize with the RNA, forming a stable duplex; in the case of double stranded antisense nucleic acids, a single strand of the duplex DNA may thus be tested, or triplex formation may be assayed. The ability to hybridize will depend on both the degree of complementarity and the length of the antisense nucleic acid. Generally, the larger the hybridizing nucleic acid, the more base mismatches with a RNA it may contain and still form a stable duplex (or triplex as the case may be). One skilled in the art can ascertain a tolerable degree of mismatch by use of standard procedures to determine the melting point of the hybridized complex.

[0755] Oligonucleotides that are complementary to the 5′ end of the message, e.g., the 5′ untranslated sequence up to and including the AUG initiation codon, should work most efficiently at inhibiting translation. However, sequences complementary to the 3′ untranslated sequences of mRNAs have been shown to be effective at inhibiting translation of mRNAs as well. See generally, Wagner, R., 1994, Nature 372:333-335. Thus, oligonucleotides complementary to either the 5′- or 3′-non-translated, non-coding regions of polynucleotide sequences described herein could be used in an antisense approach to inhibit translation of endogenous mRNA. Oligonucleotides complementary to the 5′ untranslated region of the mRNA should include the complement of the AUG start codon. Antisense oligonucleotides complementary to mRNA coding regions are less efficient inhibitors of translation but could be used in accordance with the invention. Whether designed to hybridize to the 5′-, 3′- or coding region of mRNA of the present invention, antisense nucleic acids should be at least six nucleotides in length, and are preferably oligonucleotides ranging from 6 to about 50 nucleotides in length. In specific aspects the oligonucleotide is at least 10 nucleotides, at least 17 nucleotides, at least 25 nucleotides or at least 50 nucleotides.

[0756] The polynucleotides of the invention can be DNA or RNA or chimeric mixtures or derivatives or modified versions thereof, single-stranded or double-stranded. The oligonucleotide can be modified at the base moiety, sugar moiety, or phosphate backbone, for example, to improve stability of the molecule, hybridization, etc. The oligonucleotide may include other appended groups such as peptides (e.g., for targeting host cell receptors in vivo), or agents facilitating transport across the cell membrane (see, e.g., Letsinger et al., 1989, Proc. Natl. Acad. Sci. U.S.A. 86:6553-6556; Lemaitre et al., 1987, Proc. Natl. Acad. Sci. 84:648-652; PCT Publication No. WO88/09810, published Dec. 15, 1988) or the blood-brain barrier (see, e.g., PCT Publication No. WO89/10134, published Apr. 25, 1988), hybridization-triggered cleavage agents. (See, e.g., Krol et al., 1988, BioTechniques 6:958-976) or intercalating agents. (See, e.g., Zon, 1988, Pharm. Res. 5:539-549). To this end, the oligonucleotide may be conjugated to another molecule, e.g., a peptide, hybridization triggered cross-linking agent, transport agent, hybridization-triggered cleavage agent, etc.

[0757] The antisense oligonucleotide may comprise at least one modified base moiety which is selected from the group including, but not limited to, 5-fluorouracil, 5-bromouracil, 5-chlorouracil, 5-iodouracil, hypoxanthine, xantine, 4-acetylcytosine, 5-(carboxyhydroxylmethyl)uracil, 5-carboxymethylaminomethyl-2-thiouridine, 5-carboxymethylaminomethyluracil, dihydrouracil, beta-D-galactosylqueosine, inosine, N6-isopentenyladenine, 1-methylguanine, 1-methylinosine, 2,2-dimethylguanine, 2-methyladenine, 2-methylguanine, 3-methylcytosine, 5-methylcytosine, N6-adenine, 7-methylguanine, 5-methylaminomethyluracil, 5-methoxyaminomethyl-2-thiouracil, beta-D-mannosylqueosine, 5′-methoxycarboxymethyluracil, 5-methoxyuracil, 2-methylthio-N-6-isopentenyladenine, uracil-5-oxyacetic acid (v), wybutoxosine, pseudouracil, queosine, 2-thiocytosine, 5-methyl-2-thiouracil, 2-thiouracil, 4-thiouracil, 5-methyluracil, uracil-5-oxyacetic acid methylester, uracil-5-oxyacetic acid (v), 5-methyl-2-thiouracil, 3-(3-amino-3-N-2-carboxypropyl)uracil, (acp3)w, and 2,6-diaminopurine.

[0758] The antisense oligonucleotide may also comprise at least one modified sugar moiety selected from the group including, but not limited to, arabinose, 2-fluoroarabinose, xylulose, and hexose.

[0759] In yet another embodiment, the antisense oligonucleotide comprises at least one modified phosphate backbone selected from the group including, but not limited to, a phosphorothioate, a phosphorodithioate, a phosphoramidothioate, a phosphoramidate, a phosphordiamidate, a methylphosphonate, an alkyl phosphotriester, and a formacetal or analog thereof.

[0760] In yet another embodiment, the antisense oligonucleotide is an a-anomeric oligonucleotide. An a-anomeric oligonucleotide forms specific double-stranded hybrids with complementary RNA in which, contrary to the usual b-units, the strands run parallel to each other (Gautier et al., 1987, Nucl. Acids Res. 15:6625-6641). The oligonucleotide is a 2′-0-methylribonucleotide (Inoue et al., 1987, Nucl. Acids Res. 15:6131-6148), or a chimeric RNA-DNA analogue (Inoue et al., 1987, FEBS Lett. 215:327-330).

[0761] Polynucleotides of the invention may be synthesized by standard methods known in the art, e.g. by use of an automated DNA synthesizer (such as are commercially available from Biosearch, Applied Biosystems, etc.). As examples, phosphorothioate oligonucleotides may be synthesized by the method of Stein et al. (1988, Nucl. Acids Res. 16:3209), methylphosphonate oligonucleotides can be prepared by use of controlled pore glass polymer supports (Sarin et al., 1988, Proc. Natl. Acad. Sci. U.S.A. 85:7448-7451), etc.

[0762] While antisense nucleotides complementary to the coding region sequence could be used, those complementary to the transcribed untranslated region are most preferred.

[0763] Potential antagonists according to the invention also include catalytic RNA, or a ribozyme (See, e.g., PCT International Publication WO 90/11364, published Oct. 4, 1990; Sarver et al, Science 247:1222-1225 (1990). While ribozymes that cleave mRNA at site specific recognition sequences can be used to destroy mRNAs, the use of hammerhead ribozymes is preferred. Hammerhead ribozymes cleave mRNAs at locations dictated by flanking regions that form complementary base pairs with the target mRNA. The sole requirement is that the target mRNA have the following sequence of two bases: 5′-UG-3′. The construction and production of hammerhead ribozymes is well known in the art and is described more fully in Haseloff and Gerlach, Nature 334:585-591 (1988). There are numerous potential hammerhead ribozyme cleavage sites within the nucleotide sequence of SEQ ID NO:X. Preferably, the ribozyme is engineered so that the cleavage recognition site is located near the 5′ end of the mRNA; i.e., to increase efficiency and minimize the intracellular accumulation of non-functional mRNA transcripts.

[0764] As in the antisense approach, the ribozymes of the invention can be composed of modified oligonucleotides (e.g., for improved stability, targeting, etc.) and should be delivered to cells which express in vivo. DNA constructs encoding the ribozyme may be introduced into the cell in the same manner as described above for the introduction of antisense encoding DNA. A preferred method of delivery involves using a DNA construct “encoding” the ribozyme under the control of a strong constitutive promoter, such as, for example, pol III or pol II promoter, so that transfected cells will produce sufficient quantities of the ribozyme to destroy endogenous messages and inhibit translation. Since ribozymes unlike antisense molecules, are catalytic, a lower intracellular concentration is required for efficiency.

[0765] Antagonist/agonist compounds may be employed to inhibit the cell growth and proliferation effects of the polypeptides of the present invention on neoplastic cells and tissues, i.e. stimulation of angiogenesis of tumors, and, therefore, retard or prevent abnormal cellular growth and proliferation, for example, in tumor formation or growth.

[0766] The antagonist/agonist may also be employed to prevent hyper-vascular diseases, and prevent the proliferation of epithelial lens cells after extracapsular cataract surgery. Prevention of the mitogenic activity of the polypeptides of the present invention may also be desirous in cases such as restenosis after balloon angioplasty.

[0767] The antagonist/agonist may also be employed to prevent the growth of scar tissue during wound healing.

[0768] The antagonist/agonist may also be employed to treat the diseases described herein.

[0769] Thus, the invention provides a method of treating disorders or diseases, including but not limited to the disorders or diseases listed throughout this application, associated with overexpression of a polynucleotide of the present invention by administering to a patient (a) an antisense molecule directed to the polynucleotide of the present invention, and/or (b) a ribozyme directed to the polynucleotide of the present invention.

[0770] Binding Peptides and Other Molecules

[0771] The invention also encompasses screening methods for identifying polypeptides and nonpolypeptides that bind polypeptides of the invention, and the binding molecules identified thereby. These binding molecules are useful, for example, as agonists and antagonists of the polypeptides of the invention. Such agonists and antagonists can be used, in accordance with the invention, in the therapeutic embodiments described in detail, below.

[0772] This method comprises the steps of:

[0773] contacting polypeptides of the invention with a plurality of molecules; and

[0774] identifying a molecule that binds the polypeptides of the invention.

[0775] The step of contacting the polypeptides of the invention with the plurality of molecules may be effected in a number of ways. For example, one may contemplate immobilizing the polypeptides on a solid support and bringing a solution of the plurality of molecules in contact with the immobilized polypeptides. Such a procedure would be akin to an affinity chromatographic process, with the affinity matrix being comprised of the immobilized polypeptides of the invention. The molecules having a selective affinity for the polypeptides can then be purified by affinity selection. The nature of the solid support, process for attachment of the polypeptides to the solid support, solvent, and conditions of the affinity isolation or selection are largely conventional and well known to those of ordinary skill in the art.

[0776] Alternatively, one may also separate a plurality of polypeptides into substantially separate fractions comprising a subset of or individual polypeptides. For instance, one can separate the plurality of polypeptides by gel electrophoresis, column chromatography, or like method known to those of ordinary skill for the separation of polypeptides. The individual polypeptides can also be produced by a transformed host cell in such a way as to be expressed on or about its outer surface (e.g., a recombinant phage). Individual isolates can then be “probed” by the polypeptides of the invention, optionally in the presence of an inducer should one be required for expression, to determine if any selective affinity interaction takes place between the polypeptides and the individual clone. Prior to contacting the polypeptides with each fraction comprising individual polypeptides, the polypeptides could first be transferred to a solid support for additional convenience. Such a solid support may simply be a piece of filter membrane, such as one made of nitrocellulose or nylon. In this manner, positive clones could be identified from a collection of transformed host cells of an expression library, which harbor a DNA construct encoding a polypeptide having a selective affinity for polypeptides of the invention. Furthermore, the amino acid sequence of the polypeptide having a selective affinity for the polypeptides of the invention can be determined directly by conventional means or the coding sequence of the DNA encoding the polypeptide can frequently be determined more conveniently. The primary sequence can then be deduced from the corresponding DNA sequence. If the amino acid sequence is to be determined from the polypeptide itself, one may use microsequencing techniques. The sequencing technique may include mass spectroscopy.

[0777] In certain situations, it may be desirable to wash away any unbound polypeptides from a mixture of the polypeptides of the invention and the plurality of polypeptides prior to attempting to determine or to detect the presence of a selective affinity interaction. Such a wash step may be particularly desirable when the polypeptides of the invention or the plurality of polypeptides are bound to a solid support.

[0778] The plurality of molecules provided according to this method may be provided by way of diversity libraries, such as random or combinatorial peptide or nonpeptide libraries which can be screened for molecules that specifically bind polypeptides of the invention. Many libraries are known in the art that can be used, e.g., chemically synthesized libraries, recombinant (e.g., phage display libraries), and in vitro translation-based libraries. Examples of chemically synthesized libraries are described in Podor et al., 1991, Science 251:767-773; Houghten et al., 1991, Nature 354:84-86; Lam et al., 1991, Nature 354:82-84; Medynski, 1994, Bio/Technology 12:709-710; Gallop et al., 1994, J. Medicinal Chemistry 37(9):1233-1251; Ohlmeyer et al., 1993, Proc. Natl. Acad. Sci. USA 90:10922-10926; Erb et al., 1994, Proc. Natl. Acad. Sci. USA 91:11422-11426; Houghten et al., 1992, Biotechniques 13:412; Jayawickreme et al., 1994, Proc. Natl. Acad. Sci. USA 91:1614-1618; Salmon et al., 1993, Proc. Natl. Acad. Sci. USA 90:11708-11712; PCT Publication No. WO 93/20242; and Brenner and Lerner, 1992, Proc. Natl. Acad. Sci. USA 89:5381-5383.

[0779] Examples of phage display libraries are described in Scott and Smith, 1990, Science 249:386-390; Devlin et al., 1990, Science, 249:404-406; Christian, R. B., et al., 1992, J. Mol. Biol. 227:711-718); Lenstra, 1992, J. Immunol. Meth. 152:149-157; Kay et al., 1993, Gene 128:59-65; and PCT Publication No. WO 94/18318 dated Aug. 18, 1994.

[0780] In vitro translation-based libraries include but are not limited to those described in PCT Publication No. WO 91/05058 dated Apr. 18, 1991; and Mattheakis et al., 1994, Proc. Natl. Acad. Sci. USA 91:9022-9026.

[0781] By way of examples of nonpeptide libraries, a benzodiazepine library (see e.g., Bunin et al., 1994, Proc. Natl. Acad. Sci. USA 91:4708-4712) can be adapted for use. Peptoid libraries (Simon et al., 1992, Proc. Natl. Acad. Sci. USA 89:9367-9371) can also be used. Another example of a library that can be used, in which the amide functionalities in peptides have been permethylated to generate a chemically transformed combinatorial library, is described by Ostresh et al. (1994, Proc. Natl. Acad. Sci. USA 91:11138-11142).

[0782] The variety of non-peptide libraries that are useful in the present invention is great. For example, Ecker and Crooke, 1995, Bio/Technology 13:351-360 list benzodiazepines, hydantoins, piperazinediones, biphenyls, sugar analogs, beta-mercaptoketones, arylacetic acids, acylpiperidines, benzopyrans, cubanes, xanthines, aminimides, and oxazolones as among the chemical species that form the basis of various libraries.

[0783] Non-peptide libraries can be classified broadly into two types: decorated monomers and oligomers. Decorated monomer libraries employ a relatively simple scaffold structure upon which a variety functional groups is added. Often the scaffold will be a molecule with a known useful pharmacological activity. For example, the scaffold might be the benzodiazepine structure.

[0784] Non-peptide oligomer libraries utilize a large number of monomers that are assembled together in ways that create new shapes that depend on the order of the monomers. Among the monomer units that have been used are carbamates, pyrrolinones, and morpholinos. Peptoids, peptide-like oligomers in which the side chain is attached to the alpha amino group rather than the alpha carbon, form the basis of another version of non-peptide oligomer libraries. The first non-peptide oligomer libraries utilized a single type of monomer and thus contained a repeating backbone. Recent libraries have utilized more than one monomer, giving the libraries added flexibility.

[0785] Screening the libraries can be accomplished by any of a variety of commonly known methods. See, e.g., the following references, which disclose screening of peptide libraries: Parmley and Smith, 1989, Adv. Exp. Med. Biol. 251:215-218; Scott and Smith, 1990, Science 249:386-390; Fowlkes et al., 1992; BioTechniques 13:422-427; Oldenburg et al., 1992, Proc. Natl. Acad. Sci. USA 89:5393-5397; Yu et al., 1994, Cell 76:933-945; Staudt et al., 1988, Science 241:577-580; Bock et al., 1992, Nature 355:564-566; Tuerk et al., 1992, Proc. Natl. Acad. Sci. USA 89:6988-6992; Ellington et al., 1992, Nature 355:850-852; U.S. Pat. No. 5,096,815, U.S. Pat. No. 5,223,409, and U.S. Pat. No. 5,198,346, all to Ladner et al.; Rebar and Pabo, 1993, Science 263:671-673; and CT Publication No. WO 94/18318.

[0786] In a specific embodiment, screening to identify a molecule that binds polypeptides of the invention can be carried out by contacting the library members with polypeptides of the invention immobilized on a solid phase and harvesting those library members that bind to the polypeptides of the invention. Examples of such screening methods, termed “panning” techniques are described by way of example in Parmley and Smith, 1988, Gene 73:305-318; Fowlkes et al., 1992, BioTechniques 13:422-427; PCT Publication No. WO 94/18318; and in references cited herein.

[0787] In another embodiment, the two-hybrid system for selecting interacting proteins in yeast (Fields and Song, 1989, Nature 340:245-246; Chien et al., 1991, Proc. Natl. Acad. Sci. USA 88:9578-9582) can be used to identify molecules that specifically bind to polypeptides of the invention.

[0788] Where the binding molecule is a polypeptide, the polypeptide can be conveniently selected from any peptide library, including random peptide libraries, combinatorial peptide libraries, or biased peptide libraries. The term “biased” is used herein to mean that the method of generating the library is manipulated so as to restrict one or more parameters that govern the diversity of the resulting collection of molecules, in this case peptides.

[0789] Thus, a truly random peptide library would generate a collection of peptides in which the probability of finding a particular amino acid at a given position of the peptide is the same for all 20 amino acids. A bias can be introduced into the library, however, by specifying, for example, that a lysine occur every fifth amino acid or that positions 4, 8, and 9 of a decapeptide library be fixed to include only arginine. Clearly, many types of biases can be contemplated, and the present invention is not restricted to any particular bias. Furthermore, the present invention contemplates specific types of peptide libraries, such as phage displayed peptide libraries and those that utilize a DNA construct comprising a lambda phage vector with a DNA insert.

[0790] As mentioned above, in the case of a binding molecule that is a polypeptide, the polypeptide may have about 6 to less than about 60 amino acid residues, preferably about 6 to about 10 amino acid residues, and most preferably, about 6 to about 22 amino acids. In another embodiment, a binding polypeptide has in the range of 15-100 amino acids, or 20-50 amino acids.

[0791] The selected binding polypeptide can be obtained by chemical synthesis or recombinant expression.

[0792] Other Activities

[0793] A polypeptide, polynucleotide, agonist, or antagonist of the present invention, as a result of the ability to stimulate vascular endothelial cell growth, may be employed in treatment for stimulating re-vascularization of ischemic tissues due to various disease conditions such as thrombosis, arteriosclerosis, and other cardiovascular conditions. The polypeptide, polynucleotide, agonist, or antagonist of the present invention may also be employed to stimulate angiogenesis and limb regeneration, as discussed above.

[0794] A polypeptide, polynucleotide, agonist, or antagonist of the present invention may also be employed for treating wounds due to injuries, burns, post-operative tissue repair, and ulcers since they are mitogenic to various cells of different origins, such as fibroblast cells and skeletal muscle cells, and therefore, facilitate the repair or replacement of damaged or diseased tissue.

[0795] A polypeptide, polynucleotide, agonist, or antagonist of the present invention may also be employed stimulate neuronal growth and to treat and prevent neuronal damage which occurs in certain neuronal disorders or neuro-degenerative conditions such as Alzheimer's disease, Parkinson's disease, and AIDS-related complex. A polypeptide, polynucleotide, agonist, or antagonist of the present invention may have the ability to stimulate chondrocyte growth, therefore, they may be employed to enhance bone and periodontal regeneration and aid in tissue transplants or bone grafts.

[0796] A polypeptide, polynucleotide, agonist, or antagonist of the present invention may be also be employed to prevent skin aging due to sunburn by stimulating keratinocyte growth.

[0797] A polypeptide, polynucleotide, agonist, or antagonist of the present invention may also be employed for preventing hair loss, since FGF family members activate hair-forming cells and promotes melanocyte growth. Along the same lines, a polypeptide, polynucleotide, agonist, or antagonist of the present invention may be employed to stimulate growth and differentiation of hematopoietic cells and bone marrow cells when used in combination with other cytokines.

[0798] A polypeptide, polynucleotide, agonist, or antagonist of the present invention may also be employed to maintain organs before transplantation or for supporting cell culture of primary tissues. A polypeptide, polynucleotide, agonist, or antagonist of the present invention may also be employed for inducing tissue of mesodermal origin to differentiate in early embryos.

[0799] A polypeptide, polynucleotide, agonist, or antagonist of the present invention may also increase or decrease the differentiation or proliferation of embryonic stem cells, besides, as discussed above, hematopoietic lineage.

[0800] A polypeptide, polynucleotide, agonist, or antagonist of the present invention may also be used to modulate mammalian characteristics, such as body height, weight, hair color, eye color, skin, percentage of adipose tissue, pigmentation, size, and shape (e.g., cosmetic surgery). Similarly, a polypeptide, polynucleotide, agonist, or antagonist of the present invention may be used to modulate mammalian metabolism affecting catabolism, anabolism, processing, utilization, and storage of energy.

[0801] A polypeptide, polynucleotide, agonist, or antagonist of the present invention may be used to change a mammal's mental state or physical state by influencing biorhythms, caricadic rhythms, depression (including depressive disorders), tendency for violence, tolerance for pain, reproductive capabilities (preferably by Activin or Inhibin-like activity), hormonal or endocrine levels, appetite, libido, memory, stress, or other cognitive qualities.

[0802] A polypeptide, polynucleotide, agonist, or antagonist of the present invention may also be used as a food additive or preservative, such as to increase or decrease storage capabilities, fat content, lipid, protein, carbohydrate, vitamins, minerals, cofactors or other nutritional components.

[0803] The above-recited applications have uses in a wide variety of hosts. Such hosts include, but are not limited to, human, murine, rabbit, goat, guinea pig, camel, horse, mouse, rat, hamster, pig, micro-pig, chicken, goat, cow, sheep, dog, cat, non-human primate, and human. In specific embodiments, the host is a mouse, rabbit, goat, guinea pig, chicken, rat, hamster, pig, sheep, dog or cat. In preferred embodiments, the host is a mammal. In most preferred embodiments, the host is a human.

### OTHER PREFERRED EMBODIMENTS

[0804] Other preferred embodiments of the claimed invention include an isolated nucleic acid molecule comprising a nucleotide sequence which is at least 95% identical to a sequence of at least about 50 contiguous nucleotides in the nucleotide sequence of SEQ ID NO:X or the complementary strand thereto, the nucleotide sequence as defined in Table 1B or columns 8 and 9 of Table 2 or the complementary strand thereto, and/or cDNA contained in ATCC Deposit No:Z.

[0805] Also preferred is a nucleic acid molecule wherein said sequence of contiguous nucleotides is included in the nucleotide sequence of the portion of SEQ ID NO:X as defined in column 5, “ORE (From-To)”, in Table 1B.1.

[0806] Also preferred is a nucleic acid molecule wherein said sequence of contiguous nucleotides is included in the nucleotide sequence of the portion of SEQ ID NO:X as defined in columns 8 and 9, “NT From” and “NT To” respectively, in Table 2.

[0807] Also preferred is an isolated nucleic acid molecule comprising a nucleotide sequence which is at least 95% identical to a sequence of at least about 150 contiguous nucleotides in the nucleotide sequence of SEQ ID NO:X or the complementary strand thereto, the nucleotide sequence as defined in Table 1B or columns 8 and 9 of Table 2 or the complementary strand thereto, and/or cDNA contained in ATCC Deposit No:Z.

[0808] Further preferred is an isolated nucleic acid molecule comprising a nucleotide sequence which is at least 95% identical to a sequence of at least about 500 contiguous nucleotides in the nucleotide sequence of SEQ ID NO:X or the complementary strand thereto, the nucleotide sequence as defined in Table 1B or columns 8 and 9 of Table 2 or the complementary strand thereto, and/or cDNA contained in ATCC Deposit No:Z.

[0809] A further preferred embodiment is a nucleic acid molecule comprising a nucleotide sequence which is at least 95% identical to the nucleotide sequence of the portion of SEQ ID NO:X defined in column 5, “ORF (From-To)”, in Table 1B.1.

[0810] A further preferred embodiment is a nucleic acid molecule comprising a nucleotide sequence which is at least 95% identical to the nucleotide sequence of the portion of SEQ ID NO:X defined in columns 8 and 9, “NT From” and “NT To”, respectively, in Table 2.

[0811] A further preferred embodiment is an isolated nucleic acid molecule comprising a nucleotide sequence which is at least 95% identical to the complete nucleotide sequence of SEQ ID NO:X or the complementary strand thereto, the nucleotide sequence as defined in column 5 of Table 1B.1 or columns 8 and 9 of Table 2 or the complementary strand thereto, and/or cDNA contained in ATCC Deposit No:Z.

[0812] Also preferred is an isolated nucleic acid molecule which hybridizes under stringent hybridization conditions to a nucleic acid molecule comprising a nucleotide sequence of SEQ ID NO:X or the complementary strand thereto, the nucleotide sequence as defined in column 5 of Table 1B.1 or columns 8 and 9 of Table 2 or the complementary strand thereto, and/or cDNA contained in ATCC Deposit No:Z, wherein said nucleic acid molecule which hybridizes does not hybridize under stringent hybridization conditions to a nucleic acid molecule having a nucleotide sequence consisting of only A residues or of only T residues.

[0813] Also preferred is a composition of matter comprising a DNA molecule which comprises the cDNA contained in ATCC Deposit No:Z.

[0814] Also preferred is an isolated nucleic acid molecule comprising a nucleotide sequence which is at least 95% identical to a sequence of at least 50 contiguous nucleotides of the cDNA sequence contained in ATCC Deposit No:Z.

[0815] Also preferred is an isolated nucleic acid molecule, wherein said sequence of at least 50 contiguous nucleotides is included in the nucleotide sequence of an open reading frame sequence encoded by cDNA contained in ATCC Deposit No:Z.

[0816] Also preferred is an isolated nucleic acid molecule comprising a nucleotide sequence which is at least 95% identical to sequence of at least 150 contiguous nucleotides in the nucleotide sequence encoded by cDNA contained in ATCC Deposit No:Z.

[0817] A further preferred embodiment is an isolated nucleic acid molecule comprising a nucleotide sequence which is at least 95% identical to sequence of at least 500 contiguous nucleotides in the nucleotide sequence encoded by cDNA contained in ATCC Deposit No:Z.

[0818] A further preferred embodiment is an isolated nucleic acid molecule comprising a nucleotide sequence which is at least 95% identical to the complete nucleotide sequence encoded by cDNA contained in ATCC Deposit No:Z.

[0819] A further preferred embodiment is a method for detecting in a biological sample a nucleic acid molecule comprising a nucleotide sequence which is at least 95% identical to a sequence of at least 50 contiguous nucleotides in a sequence selected from the group consisting of: a nucleotide sequence of SEQ ID NO:X or the complementary strand thereto; the nucleotide sequence as defined in column 5 of Table 1B.1 or columns 8 and 9 of Table 2 or the complementary strand thereto; and a nucleotide sequence encoded by cDNA contained in ATCC Deposit No:Z; which method comprises a step of comparing a nucleotide sequence of at least one nucleic acid molecule in said sample with a sequence selected from said group and determining whether the sequence of said nucleic acid molecule in said sample is at least 95% identical to said selected sequence.

[0820] Also preferred is the above method wherein said step of comparing sequences comprises determining the extent of nucleic acid hybridization between nucleic acid molecules in said sample and a nucleic acid molecule comprising said sequence selected from said group. Similarly, also preferred is the above method wherein said step of comparing sequences is performed by comparing the nucleotide sequence determined from a nucleic acid molecule in said sample with said sequence selected from said group. The nucleic acid molecules can comprise DNA molecules or RNA molecules.

[0821] A further preferred embodiment is a method for identifying the species, tissue or cell type of a biological sample which method comprises a step of detecting nucleic acid molecules in said sample, if any, comprising a nucleotide sequence that is at least 95% identical to a sequence of at least 50 contiguous nucleotides in a sequence selected from the group consisting of: a nucleotide sequence of SEQ ID NO:X or the complementary strand thereto; the nucleotide sequence as defined in column 5 of Table 1B.1 or columns 8 and 9 of Table 2 or the complementary strand thereto; and a nucleotide sequence of the cDNA contained in ATCC Deposit No:Z.

[0822] The method for identifying the species, tissue or cell type of a biological sample can comprise a step of detecting nucleic acid molecules comprising a nucleotide sequence in a panel of at least two nucleotide sequences, wherein at least one sequence in said panel is at least 95% identical to a sequence of at least 50 contiguous nucleotides in a sequence selected from said group.

[0823] Also preferred is a method for diagnosing in a subject a pathological condition associated with abnormal structure or expression of a nucleotide sequence of SEQ ID NO:X or the complementary strand thereto; the nucleotide sequence as defined in column 5 of Table 1B.1 or columns 8 and 9 of Table 2 or the complementary strand thereto; or the cDNA contained in ATCC Deposit No:Z which encodes a protein, wherein the method comprises a step of detecting in a biological sample obtained from said subject nucleic acid molecules, if any, comprising a nucleotide sequence that is at least 95% identical to a sequence of at least 50 contiguous nucleotides in a sequence selected from the group consisting of: a nucleotide sequence of SEQ ID NO:X or the complementary strand thereto; the nucleotide sequence as defined in column 5 of Table 1B.1 or columns 8 and 9 of Table 2 or the complementary strand thereto; and a nucleotide sequence of cDNA contained in ATCC Deposit No:Z.

[0824] The method for diagnosing a pathological condition can comprise a step of detecting nucleic acid molecules comprising a nucleotide sequence in a panel of at least two nucleotide sequences, wherein at least one sequence in said panel is at least 95% identical to a sequence of at least 50 contiguous nucleotides in a sequence selected from said group.

[0825] Also preferred is a composition of matter comprising isolated nucleic acid molecules wherein the nucleotide sequences of said nucleic acid molecules comprise a panel of at least two nucleotide sequences, wherein at least one sequence in said panel is at least 95% identical to a sequence of at least 50 contiguous nucleotides in a sequence selected from the group consisting of: a nucleotide sequence of SEQ ID NO:X or the complementary strand thereto; the nucleotide sequence as defined in column 5 of Table 1B.1 or columns 8 and 9 of Table 2 or the complementary strand thereto; and a nucleotide sequence encoded by cDNA contained in ATCC Deposit No:Z. The nucleic acid molecules can comprise DNA molecules or RNA molecules.

[0826] Also preferred is a composition of matter comprising isolated nucleic acid molecules wherein the nucleotide sequences of said nucleic acid molecules comprise a DNA microarray or “chip” of at least 1, 2, 3, 4, 5, 6, 7, 8, 9, 10, 15, 20, 25, 30, 40, 50, 100, 150, 200, 250, 300, 500, 1000, 2000, 3000, or 4000 nucleotide sequences, wherein at least one sequence in said DNA microarray or “chip” is at least 95% identical to a sequence of at least 50 contiguous nucleotides in a sequence selected from the group consisting of: a nucleotide sequence of SEQ ID NO:X wherein X is any integer as defined in Table 1A and/or 1B; and a nucleotide sequence encoded by a human cDNA clone identified by a cDNA “Clone ID” in Table 1A and/or 1B.

[0827] Also preferred is an isolated polypeptide comprising an amino acid sequence at least 90% identical to a sequence of at least about 10 contiguous amino acids in the polypeptide sequence of SEQ ID NO:Y; a polypeptide encoded by SEQ ID NO:X or the complementary strand thereto; the polypeptide encoded by the nucleotide sequence as defined in columns 8 and 9 of Table 2; and/or a polypeptide encoded by cDNA contained in ATCC Deposit No:Z.

[0828] Also preferred is an isolated polypeptide comprising an amino acid sequence at least 95% identical to a sequence of at least about 30 contiguous amino acids in the amino acid sequence of SEQ ID NO:Y; a polypeptide encoded by SEQ ID NO:X or the complementary strand thereto; the polypeptide encoded by the nucleotide sequence as defined in columns 8 and 9 of Table 2; and/or a polypeptide encoded by cDNA contained in ATCC Deposit No:Z.

[0829] Further preferred is an isolated polypeptide comprising an amino acid sequence at least 95% identical to a sequence of at least about 100 contiguous amino acids in the amino acid sequence of SEQ ID NO:Y; a polypeptide encoded by SEQ ID NO:X or the complementary strand thereto; the polypeptide encoded by the nucleotide sequence as defined in columns 8 and 9 of Table 2; and/or a polypeptide encoded by cDNA contained in ATCC Deposit No:Z.

[0830] Further preferred is an isolated polypeptide comprising an amino acid sequence at least 95% identical to the complete amino acid sequence of SEQ ID NO:Y; a polypeptide encoded by SEQ ID NO:X or the complementary strand thereto; the polypeptide encoded by the nucleotide sequence as defined in columns 8 and 9 of Table 2; and/or a polypeptide encoded by cDNA contained in ATCC Deposit No:Z.

[0831] Further preferred is an isolated polypeptide comprising an amino acid sequence at least 90% identical to a sequence of at least about 10 contiguous amino acids in the complete amino acid sequence of a polypeptide encoded by contained in ATCC Deposit No:Z.

[0832] Also preferred is a polypeptide wherein said sequence of contiguous amino acids is included in the amino acid sequence of a portion of said polypeptide encoded by cDNA contained in ATCC Deposit No:Z; a polypeptide encoded by SEQ ID NO:X or the complementary strand thereto; the polypeptide encoded by the nucleotide sequence as defined in columns 8 and 9 of Table 2; and/or the polypeptide sequence of SEQ ID NO:Y.

[0833] Also preferred is an isolated polypeptide comprising an amino acid sequence at least 95% identical to a sequence of at least about 30 contiguous amino acids in the amino acid sequence of a polypeptide encoded by the cDNA contained in ATCC Deposit No:Z Also preferred is an isolated polypeptide comprising an amino acid sequence at least 95% identical to a sequence of at least about 100 contiguous amino acids in the amino acid sequence of a polypeptide encoded by cDNA contained in ATCC Deposit No:Z.

[0834] Also preferred is an isolated polypeptide comprising an amino acid sequence at least 95% identical to the amino acid sequence of a polypeptide encoded by the cDNA contained in ATCC Deposit No:Z.

[0835] Further preferred is an isolated antibody which binds specifically to a polypeptide comprising an amino acid sequence that is at least 90% identical to a sequence of at least 10 contiguous amino acids in a sequence selected from the group consisting of: a polypeptide sequence of SEQ ID NO:Y; a polypeptide encoded by SEQ ID NO:X or the complementary strand thereto; the polypeptide encoded by the nucleotide sequence as defined in columns 8 and 9 of Table 2; and a polypeptide encoded by the cDNA contained in ATCC Deposit No:Z.

[0836] Further preferred is a method for detecting in a biological sample a polypeptide comprising an amino acid sequence which is at least 90% identical to a sequence of at least 10 contiguous amino acids in a sequence selected from the group consisting of: a polypeptide sequence of SEQ ID NO:Y; a polypeptide encoded by SEQ ID NO:X or the complementary strand thereto; the polypeptide encoded by the nucleotide sequence as defined in columns 8 and 9 of Table 2; and a polypeptide encoded by the cDNA contained in ATCC Deposit No:Z; which method comprises a step of comparing an amino acid sequence of at least one polypeptide molecule in said sample with a sequence selected from said group and determining whether the sequence of said polypeptide molecule in said sample is at least 90% identical to said sequence of at least 10 contiguous amino acids.

[0837] Also preferred is the above method wherein said step of comparing an amino acid sequence of at least one polypeptide molecule in said sample with a sequence selected from said group comprises determining the extent of specific binding of polypeptides in said sample to an antibody which binds specifically to a polypeptide comprising an amino acid sequence that is at least 90% identical to a sequence of at least 10 contiguous amino acids in a sequence selected from the group consisting of: a polypeptide sequence of SEQ ID NO:Y; a polypeptide encoded by SEQ ID NO:X or the complementary strand thereto; the polypeptide encoded by the nucleotide sequence as defined in columns 8 and 9 of Table 2; and a polypeptide encoded by the cDNA contained in ATCC Deposit No:Z.

[0838] Also preferred is the above method wherein said step of comparing sequences is performed by comparing the amino acid sequence determined from a polypeptide molecule in said sample with said sequence selected from said group.

[0839] Also preferred is a method for identifying the species, tissue or cell type of a biological sample which method comprises a step of detecting polypeptide molecules in said sample, if any, comprising an amino acid sequence that is at least 90% identical to a sequence of at least 10 contiguous amino acids in a sequence selected from the group consisting of: polypeptide sequence of SEQ ID NO:Y; a polypeptide encoded by SEQ ID NO:X or the complementary strand thereto; the polypeptide encoded by the nucleotide sequence as defined in columns 8 and 9 of Table 2; and a polypeptide encoded by the cDNA contained in ATCC Deposit No:Z.

[0840] Also preferred is the above method for identifying the species, tissue or cell type of a biological sample, which method comprises a step of detecting polypeptide molecules comprising an amino acid sequence in a panel of at least two amino acid sequences, wherein at least one sequence in said panel is at least 90% identical to a sequence of at least 10 contiguous amino acids in a sequence selected from the above group.

[0841] Also preferred is a method for diagnosing in a subject a pathological condition associated with abnormal structure or expression of a nucleic acid sequence identified in Table 1A, 1B or Table 2 encoding a polypeptide, which method comprises a step of detecting in a biological sample obtained from said subject polypeptide molecules comprising an amino acid sequence in a panel of at least two amino acid sequences, wherein at least one sequence in said panel is at least 90% identical to a sequence of at least 10 contiguous amino acids in a sequence selected from the group consisting of: polypeptide sequence of SEQ ID NO:Y; a polypeptide encoded by SEQ ID NO:X or the complementary strand thereto; the polypeptide encoded by the nucleotide sequence as defined in columns 8 and 9 of Table 2; and a polypeptide encoded by the cDNA contained in ATCC Deposit No:Z.

[0842] In any of these methods, the step of detecting said polypeptide molecules includes using an antibody.

[0843] Also preferred is an isolated nucleic acid molecule comprising a nucleotide sequence which is at least 95% identical to a nucleotide sequence encoding a polypeptide wherein said polypeptide comprises an amino acid sequence that is at least 90% identical to a sequence of at least 10 contiguous amino acids in a sequence selected from the group consisting of: polypeptide sequence of SEQ ID NO:Y; a polypeptide encoded by SEQ ID NO:X or the complementary strand thereto; the polypeptide encoded by the nucleotide sequence as defined in columns 8 and 9 of Table 2; and a polypeptide encoded by the cDNA contained in ATCC Deposit No:Z.

[0844] Also preferred is an isolated nucleic acid molecule, wherein said nucleotide sequence encoding a polypeptide has been optimized for expression of said polypeptide in a prokaryotic host.

[0845] Also preferred is a polypeptide molecule, wherein said polypeptide comprises an amino acid sequence selected from the group consisting of: polypeptide sequence of SEQ ID NO:Y; a polypeptide encoded by SEQ ID NO:X or the complementary strand thereto; the polypeptide encoded by the nucleotide sequence as defined in columns 8 and 9 of Table 2; and a polypeptide encoded by the cDNA contained in ATCC Deposit No:Z.

[0846] Further preferred is a method of making a recombinant vector comprising inserting any of the above isolated nucleic acid molecule into a vector. Also preferred is the recombinant vector produced by this method. Also preferred is a method of making a recombinant host cell comprising introducing the vector into a host cell, as well as the recombinant host cell produced by this method.

[0847] Also preferred is a method of making an isolated polypeptide comprising culturing this recombinant host cell under conditions such that said polypeptide is expressed and recovering said polypeptide. Also preferred is this method of making an isolated polypeptide, wherein said recombinant host cell is a eukaryotic cell and said polypeptide is a human protein comprising an amino acid sequence selected from the group consisting of: polypeptide sequence of SEQ ID NO:Y; a polypeptide encoded by SEQ ID NO:X or the complementary strand thereto; the polypeptide encoded by the nucleotide sequence as defined in columns 8 and 9 of Table 2; and a polypeptide encoded by the cDNA contained in ATCC Deposit No:Z. The isolated polypeptide produced by this method is also preferred.

[0848] Also preferred is a method of treatment of an individual in need of an increased level of a protein activity, which method comprises administering to such an individual a Therapeutic comprising an amount of an isolated polypeptide, polynucleotide, immunogenic fragment or analogue thereof, binding agent, antibody, or antigen binding fragment of the claimed invention effective to increase the level of said protein activity in said individual.

[0849] Also preferred is a method of treatment of an individual in need of a decreased level of a protein activity, which method comprised administering to such an individual a Therapeutic comprising an amount of an isolated polypeptide, polynucleotide, immunogenic fragment or analogue thereof, binding agent, antibody, or antigen binding fragment of the claimed invention effective to decrease the level of said protein activity in said individual.

[0850] Also preferred is a method of treatment of an individual in need of a specific delivery of toxic compositions to diseased cells (e.g., tumors, leukemias or lymphomas), which method comprises administering to such an individual a Therapeutic comprising an amount of an isolated polypeptide of the invention, including, but not limited to a binding agent, or antibody of the claimed invention that are associated with toxin or cytotoxic prodrugs.

[0851] Having generally described the invention, the same will be more readily understood by reference to the following examples, which are provided by way of illustration and are not intended as limiting.

[0852] Description of Table 6

[0853] Table 6 summarizes some of the ATCC Deposits, Deposit dates, and ATCC designation numbers of deposits made with the ATCC in connection with the present application. These deposits were made in addition to those described in the Table 1A.

TABLE 6

| ATCC Deposits | Deposit Date | ATCC Designation Number |
|---|---|---|
| LP01, LP02, LP03, LP04, | May-20-97 | 209059, 209060, 209061, |
| LP05, LP06, LP07, LP08, | | 209062, 209063, 209064, |
| LP09, LP10, LP11, | | 209065, 209066, 209067, |
| | | 209068, 209069 |
| LP12 | Jan-12-98 | 209579 |
| LP13 | Jan-12-98 | 209578 |
| LP14 | Jul-16-98 | 203067 |
| LP15 | Jul-16-98 | 203068 |
| LP16 | Feb-1-99 | 203609 |
| LP17 | Feb-1-99 | 203610 |
| LP20 | Nov-17-98 | 203485 |
| LP21 | Jun-18-99 | PTA-252 |
| LP22 | Jun-18-99 | PTA-253 |
| LP23 | Dec-22-99 | PTA-1081 |

### EXAMPLES

### Example 1

### Isolation of a Selected cDNA Clone from the Deposited Sample

[0854] Each ATCC Deposit No:Z is contained in a plasmid vector. Table 7 identifies the vectors used to construct the cDNA library from which each clone was isolated. In many cases, the vector used to construct the library is a phage vector from which a plasmid has been excised. The following correlates the related plasmid for each phage vector used in constructing the cDNA library. For example, where a particular clone is identified in Table 7 as being isolated in the vector “Lambda Zap,” the corresponding deposited clone is in “pBluescript.”

| Vector Used to | Corresponding |
|---|---|
| Construct Library | Deposited Plasmid |
| Lambda Zap | pBluescript (pBS) |
| Uni-Zap XR | pBluescript (pBS) |
| Zap Express | pBK |
| lafmid BA | plafmid BA |
| pSport1 | pSport1 |
| pCMVSport 2.0 | pCMVSport 2.0 |
| pCMVSport 3.0 | pCMVSport 3.0 |
| pCR ® 2.1 | pCR ® 2.1 |

[0855] Vectors Lambda Zap (U.S. Pat. Nos. 5,128,256 and 5,286,636), Uni-Zap XR (U.S. Pat. Nos. 5,128,256 and 5,286,636), Zap Express (U.S. Pat. Nos. 5,128,256 and 5,286,636), pBluescript (pBS) (Short, J. M. et al., Nucleic Acids Res. 16:7583-7600 (1988); Alting-Mees, M. A. and Short, J. M., Nucleic Acids Res. 17:9494 (1989)) and pBK (Alting-Mees, M. A. et al., Strategies 5:58-61 (1992)) are commercially available from Stratagene Cloning Systems, Inc., 11011 N. Torrey Pines Road, La Jolla, Calif., 92037. pBS contains an ampicillin resistance gene and pBK contains a neomycin resistance gene. Both can be transformed into E. coli strain XL-1 Blue, also available from Stratagene. pBS comes in 4 forms SK+, SK−, KS+ and KS. The S and K refers to the orientation of the polylinker to the T7 and T3 primer sequences which flank the polylinker region (“S” is for SacI and “K” is for KpnI which are the first sites on each respective end of the linker). “+” or “−” refer to the orientation of the f1 origin of replication (“ori”), such that in one orientation, single stranded rescue initiated from the f1 ori generates sense strand DNA and in the other, antisense.

[0856] Vectors pSport1, pCMVSport 2.0 and pCMVSport 3.0, were obtained from Life Technologies, Inc., P.O. Box 6009, Gaithersburg, Md. 20897. All Sport vectors contain an ampicillin resistance gene and may be transformed into E. coli strain DH10B, also available from Life Technologies. (See, for instance, Gruber, C. E., et al., Focus 15:59 (1993)). Vector lafmid BA (Bento Soares, Columbia University, NY) contains an ampicillin resistance gene and can be transformed into E. coli strain XL-1 Blue. Vector pCR®2.1, which is available from Invitrogen, 1600 Faraday Avenue, Carlsbad, Calif. 92008, contains an ampicillin resistance gene and may be transformed into E. coli strain DH10B, available from Life Technologies. (See, for instance, Clark, J. M., Nuc. Acids Res. 16:9677-9686 (1988) and Mead, D. et al., Bio/Technology 9: (1991)). Preferably, a polynucleotide of the present invention does not comprise the phage vector sequences identified for the particular clone in Table 7, as well as the corresponding plasmid vector sequences designated above.

[0857] The deposited material in the sample assigned the ATCC Deposit Number cited by reference to Table 1A, Table 2, Table 6 and Table 7 for any given cDNA clone also may contain one or more additional plasmids, each comprising a cDNA clone different from that given clone. Thus, deposits sharing the same ATCC Deposit Number contain at least a plasmid for each ATCC Deposit No:Z.

TABLE 7

| | | | ATCC |
|---|---|---|---|
| Libraries owned by Catalog | Catalog Description | Vector | Deposit |
| HUKA HUKB HUKC HUKD | Human Uterine Cancer | Lambda ZAP II | LP01 |
| HUKE HUKF HUKG | | | |
| HCNA HCNB | Human Colon | Lambda Zap II | LP01 |
| HFFA | Human Fetal Brain, random | Lambda Zap II | LP01 |
| | primed | | |
| HTWA | Resting T-Cell | Lambda ZAP II | LP01 |
| HBQA | Early Stage Human Brain, | Lambda ZAP II | LP01 |
| | random primed | | |
| HLMB HLMF HLMG HLMH | breast lymph node CDNA | Lambda ZAP II | LP01 |
| HLMI HLMJ HLMM HLMN | library | | |
| HCQA HCQB | human colon cancer | Lamda ZAP II | LP01 |
| HMEA HMEC HMED HMEE | Human Microvascular | Lambda ZAP II | LP01 |
| HMEF HMEG HMEI HMEJ | Endothelial Cells, fract. A | | |
| HMEK HMEL | | | |
| HUSA HUSC | Human Umbilical Vein | Lambda ZAP II | LP01 |
| | Endothelial Cells, fract. A | | |
| HLQA HLQB | Hepatocellular Tumor | Lambda ZAP II | LP01 |
| HHGA HHGB HHGC HHGD | Hemangiopericytoma | Lambda ZAP II | LP01 |
| HSDM | Human Striatum Depression, re- | Lambda ZAP II | LP01 |
| | rescue | | |
| HUSH | H Umbilical Vein Endothelial | Lambda ZAP II | LP01 |
| | Cells, frac A, re-excision | | |
| HSGS | Salivary gland, subtracted | Lambda ZAP II | LP01 |
| HFXA HFXB HFXC HFXD | Brain frontal cortex | Lambda ZAP II | LP01 |
| HFXE HFXF HFXG HFXH | | | |
| HPQA HPQB HPQC | PERM TF274 | Lambda ZAP II | LP01 |
| HFXJ HFXK | Brain Frontal Cortex, re- | Lambda ZAP II | LP01 |
| | excision | | |
| HCWA HCWB HCWC | CD34 positive cells (Cord | ZAP Express | LP02 |
| HCWD HCWE HCWF | Blood) | | |
| HCWG HCWH HCWI HCWJ | | | |
| HCWK | | | |
| HCUA HCUB HCUC | CD34 depleted Buffy Coat | ZAP Express | LP02 |
| | (Cord Blood) | | |
| HRSM | A-14 cell line | ZAP Express | LP02 |
| HRSA | A1-CELL LINE | ZAP Express | LP02 |
| HCUD HCUE HCUF HCUG | CD34 depleted Buffy Coat | ZAP Express | LP02 |
| HCUH HCUI | (Cord Blood), re-excision | | |
| HBXE HBXF HBXG | H. Whole Brain #2, re-excision | ZAP Express | LP02 |
| HRLM | L8 cell line | ZAP Express | LP02 |
| HBXA HBXB HBXC HBXD | Human Whole Brain #2 - Oligo | ZAP Express | LP02 |
| | dT >1.5 Kb | | |
| HUDA HUDB HUDC | Testes | ZAP Express | LP02 |
| HHTM HHTN HHTO | H. hypothalamus, frac A; re- | ZAP Express | LP02 |
| | excision | | |
| HHTL | H. hypothalamus, frac A | ZAP Express | LP02 |
| HASA HASD | Human Adult Spleen | Uni-ZAP XR | LP03 |
| HFKC HFKD HFKE HFKF | Human Fetal Kidney | Uni-ZAP XR | LP03 |
| HFKG | | | |
| HE8A HE8B HE8C HE8D | Human 8 Week Whole Embryo | Uni-ZAP XR | LP03 |
| HE8E HE8F HE8M HE8N | | | |
| HGBA HGBD HGBE HGBF | Human Gall Bladder | Uni-ZAP XR | LP03 |
| HGBG HGBH HGBI | | | |
| HLHA HLHB HLHC HLHD | Human Fetal Lung III | Uni-ZAP XR | LP03 |
| HLHE HLHF HLHG HLHH | | | |
| HLHQ | | | |
| HPMA HPMB HPMC HPMD | Human Placenta | Uni-ZAP XR | LP03 |
| HPME HPMF HPMG HPMH | | | |
| HPRA HPRB HPRC HPRD | Human Prostate | Uni-ZAP XR | LP03 |
| HSIA HSIC HSID HSIE | Human Adult Small Intestine | Uni-ZAP XR | LP03 |
| HTEA HTEB HTEC HTED | Human Testes | Uni-ZAP XR | LP03 |
| HTEE HTEF HTEG HTEH | | | |
| HTEI HTEJ HTEK | | | |
| HTPA HTPB HTPC HTPD | Human Pancreas Tumor | Uni-ZAP XR | LP03 |
| HTPE | | | |
| HTTA HTTB HTTC HTTD | Human Testes Tumor | Uni-ZAP XR | LP03 |
| HTTE HTTF | | | |
| HAPA HAPB HAPC HAPM | Human Adult Pulmonary | Uni-ZAP XR | LP03 |
| HETA HETB HETC HETD | Human Endometrial Tumor | Uni-ZAP XR | LP03 |
| HETE HETF HETG HETH | | | |
| HETI | | | |
| HHFB HHFC HHFD HHFE | Human Fetal Heart | Uni-ZAP XR | LP03 |
| HHFF HHFG HHFH HHFI | | | |
| HHPB HHPC HHPD HHPE | Human Hippocampus | Uni-ZAP XR | LP03 |
| HHPF HHPG HHPH | | | |
| HCE1 HCE2 HCE3 HCE4 | Human Cerebellum | Uni-ZAP XR | LP03 |
| HCE5 HCEB HCEC HCED | | | |
| HCEE HCEF HCEG | | | |
| HUVB HUVC HUVD HUVE | Human Umbilical Vein, Endo. | Uni-ZAP XR | LP03 |
| | remake | | |
| HSTA HSTB HSTC HSTD | Human Skin Tumor | Uni-ZAP XR | LP03 |
| HTAA HTAB HTAC HTAD | Human Activated T-Cells | Uni-ZAP XR | LP03 |
| HTAE | | | |
| HFEA HFEB HFEC | Human Fetal Epithelium (Skin) | Uni-ZAP XR | LP03 |
| HJPA HJPB HJPC HJPD | HUMAN JURKAT | Uni-ZAP XR | LP03 |
| | MEMBRANE BOUND | | |
| | POLYSOMES | | |
| HESA | Human epithelioid sarcoma | Uni-Zap XR | LP03 |
| HLTA HLTB HLTC HLTD | Human T-Cell Lymphoma | Uni-ZAP XR | LP03 |
| HLTE HLTF | | | |
| HFTA HFTB HFTC HFTD | Human Fetal Dura Mater | Uni-ZAP XR | LP03 |
| HRDA HRDB HRDC HRDD | Human Rhabdomyosarcoma | Uni-ZAP XR | LP03 |
| HRDE HRDF | | | |
| HCAA HCAB HCAC | Cem cells cyclohexamide | Uni-ZAP XR | LP03 |
| | treated | | |
| HRGA HRGB HRGC HRGD | Raji Cells, cyclohexamide | Uni-ZAP XR | LP03 |
| | treated | | |
| HSUA HSUB HSUC HSUM | Supt Cells, cyclohexamide | Uni-ZAP XR | LP03 |
| | treated | | |
| HT4A HT4C HT4D | Activated T-Cells, 12 hrs. | Uni-ZAP XR | LP03 |
| HE9A HE9B HE9C HE9D | Nine Week Old Early Stage | Uni-ZAP XR | LP03 |
| HE9E HE9F HE9G HE9H | Human | | |
| HE9M HE9N | | | |
| HATA HATB HATC HATD | Human Adrenal Gland Tumor | Uni-ZAP XR | LP03 |
| HATE | | | |
| HT5A | Activated T-Cells, 24 hrs. | Uni-ZAP XR | LP03 |
| HFGA HFGM | Human Fetal Brain | Uni-ZAP XR | LP03 |
| HNEA HNEB HNEC HNED | Human Neutrophil | Uni-ZAP XR | LP03 |
| HNEE | | | |
| HBGB HBGD | Human Primary Breast Cancer | Uni-ZAP XR | LP03 |
| HBNA HBNB | Human Normal Breast | Uni-ZAP XR | LP03 |
| HCAS | Cem Cells, cyclohexamide | Uni-ZAP XR | LP03 |
| | treated, subtra | | |
| HHPS | Human Hippocampus, | pBS | LP03 |
| | subtracted | | |
| HKCS HKCU | Human Colon Cancer, | pBS | LP03 |
| | subtracted | | |
| HRGS | Raji cells, cyclohexamide | pBS | LP03 |
| | treated, subtracted | | |
| HSUT | Supt cells, cyclohexamide | pBS | LP03 |
| | treated, differentially expressed | | |
| HT4S | Activated T-Cells, 12 hrs, | Uni-ZAP XR | LP03 |
| | subtracted | | |
| HCDA HCDB HCDC HCDD | Human Chondrosarcoma | Uni-ZAP XR | LP03 |
| HCDE | | | |
| HOAA HOAB HOAC | Human Osteosarcoma | Uni-ZAP XR | LP03 |
| HTLA HTLB HTLC HTLD | Human adult testis, large inserts | Uni-ZAP XR | LP03 |
| HTLE HTLF | | | |
| HLMA HLMC HLMD | Breast Lymph node cDNA | Uni-ZAP XR | LP03 |
| | library | | |
| H6EA H6EB H6EC | HL-60, PMA 4 H | Uni-ZAP XR | LP03 |
| HTXA HTXB HTXC HTXD | Activated T-Cell | Uni-ZAP XR | LP03 |
| HTXE HTXF HTXG HTXH | (12 hs)/Thiouridine labelledEco | | |
| HNFA HNFB HNFC HNFD | Human Neutrophil, Activated | Uni-ZAP XR | LP03 |
| HNFE HNFF HNFG HNFH | | | |
| HNFJ | | | |
| HTOB HTOC | HUMAN TONSILS, | Uni-ZAP XR | LP03 |
| | FRACTION 2 | | |
| HMGB | Human OB MG63 control | Uni-ZAP XR | LP03 |
| | fraction I | | |
| HOPB | Human OB HOS control | Uni-ZAP XR | LP03 |
| | fraction I | | |
| HORB | Human OB HOS treated (10 nM | Uni-ZAP XR | LP03 |
| | E2) fraction I | | |
| HSVA HSVB HSVC | Human Chronic Synovitis | Uni-ZAP XR | LP03 |
| HROA | HUMAN STOMACH | Uni-ZAP XR | LP03 |
| HBJA HBJB HBJC HBJD | HUMAN B CELL | Uni-ZAP XR | LP03 |
| HBJE HBJF HBJG HBJH | LYMPHOMA | | |
| HBJI HBJJ HBJK | | | |
| HCRA HCRB HCRC | human corpus colosum | Uni-ZAP XR | LP03 |
| HODA HODB HODC HODD | human ovarian cancer | Uni-ZAP XR | LP03 |
| HDSA | Dermatofibrosarcoma | Uni-ZAP XR | LP03 |
| | Protuberance | | |
| HMWA HMWB HMWC | Bone Marrow Cell Line | Uni-ZAP XR | LP03 |
| HMWD HMWE HMWF | (R54; 11) | | |
| HMWG HMWH HMWI | | | |
| HMWJ | | | |
| HSOA | stomach cancer (human) | Uni-ZAP XR | LP03 |
| HERA | SKIN | Uni-ZAP XR | LP03 |
| HMDA | Brain-medulloblastoma | Uni-ZAP XR | LP03 |
| HGLA HGLB HGLD | Glioblastoma | Uni-ZAP XR | LP03 |
| HEAA | H. Atrophic Endometrium | Uni-ZAP XR | LP03 |
| HBCA HBCB | H. Lymph node breast Cancer | Uni-ZAP XR | LP03 |
| HPWT | Human Prostate BPH, re- | Uni-ZAP XR | LP03 |
| | excision | | |
| HFVG HFVH HFVI | Fetal Liver, subtraction II | pBS | LP03 |
| HNFI | Human Neutrophils, Activated, | pBS | LP03 |
| | re-excision | | |
| HBMB HBMC HBMD | Human Bone Marrow, re- | pBS | LP03 |
| | excision | | |
| HKML HKMM HKMN | H. Kidney Medulla, re-excision | pBS | LP03 |
| HKIX HKIY | H. Kidney Cortex, subtracted | pBS | LP03 |
| HADT | H. Amygdala Depression, | pBS | LP03 |
| | subtracted | | |
| H6AS | Hl-60, untreated, subtracted | Uni-ZAP XR | LP03 |
| H6ES | HL-60, PMA 4 H, subtracted | Uni-ZAP XR | LP03 |
| H6BS | HL-60, RA 4 h, Subtracted | Uni-ZAP XR | LP03 |
| H6CS | HL-60, PMA 1 d, subtracted | Uni-ZAP XR | LP03 |
| HTXJ HTXK | Activated T- | Uni-ZAP XR | LP03 |
| | cell(12 h)/Thiouridine-re- | | |
| | excision | | |
| HMSA HMSB HMSC HMSD | Monocyte activated | Uni-ZAP XR | LP03 |
| HMSE HMSF HMSG HMSH | | | |
| HMSI HMSJ HMSK | | | |
| HAGA HAGB HAGC HAGD | Human Amygdala | Uni-ZAP XR | LP03 |
| HAGE HAGF | | | |
| HSRA HSRB HSRE | STROMAL - | Uni-ZAP XR | LP03 |
| | OSTEOCLASTOMA | | |
| HSRD HSRF HSRG HSRH | Human Osteoclastoma Stromal | Uni-ZAP XR | LP03 |
| | Cells - unamplified | | |
| HSQA HSQB HSQC HSQD | Stromal cell TF274 | Uni-ZAP XR | LP03 |
| HSQE HSQF HSQG | | | |
| HSKA HSKB HSKC HSKD | Smooth muscle, serum treated | Uni-ZAP XR | LP03 |
| HSKE HSKF HSKZ | | | |
| HSLA HSLB HSLC HSLD | Smooth muscle, control | Uni-ZAP XR | LP03 |
| HSLE HSLF HSLG | | | |
| HSDA HSDD HSDE HSDF | Spinal cord | Uni-ZAP XR | LP03 |
| HSDG HSDH | | | |
| HPWS | Prostate-BPH subtracted II | pBS | LP03 |
| HSKW HSKX HSKY | Smooth Muscle-HASTE | pBS | LP03 |
| | normalized | | |
| HFPB HFPC HFPD | H. Frontal cortex, epileptic; re- | Uni-ZAP XR | LP03 |
| | excision | | |
| HSDI HSDJ HSDK | Spinal Cord, re-excision | Uni-ZAP XR | LP03 |
| HSKN HSKO | Smooth Muscle Serum Treated, | pBS | LP03 |
| | Norm | | |
| HSKG HSKH HSKI | Smooth muscle, serum | pBS | LP03 |
| | induced, re-exc | | |
| HFCA HFCB HFCC HFCD | Human Fetal Brain | Uni-ZAP XR | LP04 |
| HFCE HFCF | | | |
| HPTA HPTB HPTD | Human Pituitary | Uni-ZAP XR | LP04 |
| HTHB HTHC HTHD | Human Thymus | Uni-ZAP XR | LP04 |
| HE6B HE6C HE6D HE6E | Human Whole Six Week Old | Uni-ZAP XR | LP04 |
| HE6F HE6G HE6S | Embryo | | |
| HSSA HSSB HSSC HSSD | Human Synovial Sarcoma | Uni-ZAP XR | LP04 |
| HSSE HSSF HSSG HSSH | | | |
| HSSI HSSJ HSSK | | | |
| HE7T | 7 Week Old Early Stage Human, | Uni-ZAP XR | LP04 |
| | subtracted | | |
| HEPA HEPB HEPC | Human Epididymus | Uni-ZAP XR | LP04 |
| HSNA HSNB HSNC HSNM | Human Synovium | Uni-ZAP XR | LP04 |
| HSNN | | | |
| HPFB HPFC HPFD HPFE | Human Prostate Cancer, Stage C | Uni-ZAP XR | LP04 |
| | fraction | | |
| HE2A HE2D HE2E HE2H | 12 Week Old Early Stage | Uni-ZAP XR | LP04 |
| HE2I HE2M HE2N HE2O | Human | | |
| HE2B HE2C HE2F HE2G | 12 Week Old Early Stage | Uni-ZAP XR | LP04 |
| HE2P HE2Q | Human, II | | |
| HPTS HPTT HPTU | Human Pituitary, subtracted | Uni-ZAP XR | LP04 |
| HAUA HAUB HAUC | Amniotic Cells - TNF induced | Uni-ZAP XR | LP04 |
| HAQA HAQB HAQC HAQD | Amniotic Cells - Primary | Uni-ZAP XR | LP04 |
| | Culture | | |
| HWTA HWTB HWTC | wilm's tumor | Uni-ZAP XR | LP04 |
| HBSD | Bone Cancer, re-excision | Uni-ZAP XR | LP04 |
| HSGB | Salivary gland, re-excision | Uni-ZAP XR | LP04 |
| HSJA HSJB HSJC | Smooth muscle-ILb induced | Uni-ZAP XR | LP04 |
| HSXA HSXB HSXC HSXD | Human Substantia Nigra | Uni-ZAP XR | LP04 |
| HSHA HSHB HSHC | Smooth muscle, IL1b induced | Uni-ZAP XR | LP04 |
| HOUA HOUB HOUC HOUD | Adipocytes | Uni-ZAP XR | LP04 |
| HOUE | | | |
| HPWA HPWB HPWC HPWD | Prostate BPH | Uni-ZAP XR | LP04 |
| HPWE | | | |
| HELA HELB HELC HELD | Endothelial cells-control | Uni-ZAP XR | LP04 |
| HELE HELF HELG HELH | | | |
| HEMA HEMB HEMC HEMD | Endothelial-induced | Uni-ZAP XR | LP04 |
| HEME HEMF HEMG HEMH | | | |
| HBIA HBIB HBIC | Human Brain, Striatum | Uni-ZAP XR | LP04 |
| HHSA HHSB HHSC HHSD | Human | Uni-ZAP XR | LP04 |
| HHSE | Hypothalmus, Schizophrenia | | |
| HNGA HNGB HNGC HNGD | neutrophils control | Uni-ZAP XR | LP04 |
| HNGE HNGF HNGG HNGH | | | |
| HNGI HNGJ | | | |
| HNHA HNHB HNHC HNHD | Neutrophils IL-1 and LPS | Uni-ZAP XR | LP04 |
| HNHE HNHF HNHG HNHH | induced | | |
| HNHI HNHJ | | | |
| HSDB HSDC | STRIATUM DEPRESSION | Uni-ZAP XR | LP04 |
| HHPT | Hypothalamus | Uni-ZAP XR | LP04 |
| HSAT HSAU HSAV HSAW | Anergic T-cell | Uni-ZAP XR | LP04 |
| HSAX HSAY HSAZ | | | |
| HBMS HBMT HBMU HBMV | Bone marrow | Uni-ZAP XR | LP04 |
| HBMW HBMX | | | |
| HOEA HOEB HOEC HOED | Osteoblasts | Uni-ZAP XR | LP04 |
| HOEE HOEF HOEJ | | | |
| HAIA HAIB HAIC HAID | Epithelial-TNFa and INF | Uni-ZAP XR | LP04 |
| HAIE HAIF | induced | | |
| HTGA HTGB HTGC HTGD | Apoptotic T-cell | Uni-ZAP XR | LP04 |
| HMCA HMCB HMCC | Macrophage-oxLDL | Uni-ZAP XR | LP04 |
| HMCD HMCE | | | |
| HMAA HMAB HMAC | Macrophage (GM-CSF treated) | Uni-ZAP XR | LP04 |
| HMAD HMAE HMAF | | | |
| HMAG | | | |
| HPHA | Normal Prostate | Uni-ZAP XR | LP04 |
| HPIA HPIB HPIC | LNCAP prostate cell line | Uni-ZAP XR | LP04 |
| HPJA HPJB HPJC | PC3 Prostate cell line | Uni-ZAP XR | LP04 |
| HOSE HOSF HOSG | Human Osteoclastoma, re- | Uni-ZAP XR | LP04 |
| | excision | | |
| HTGE HTGF | Apoptotic T-cell, re-excision | Uni-ZAP XR | LP04 |
| HMAJ HMAK | H Macrophage (GM-CSF | Uni-ZAP XR | LP04 |
| | treated), re-excision | | |
| HACB HACC HACD | Human Adipose Tissue, re- | Uni-ZAP XR | LP04 |
| | excision | | |
| HFPA | H. Frontal Cortex, Epileptic | Uni-ZAP XR | LP04 |
| HFAA HFAB HFAC HFAD | Alzheimer's, spongy change | Uni-ZAP XR | LP04 |
| HFAE | | | |
| HFAM | Frontal Lobe, Dementia | Uni-ZAP XR | LP04 |
| HMIA HMIB HMIC | Human Manic Depression | Uni-ZAP XR | LP04 |
| | Tissue | | |
| HTSA HTSE HTSF HTSG | Human Thymus | pBS | LP05 |
| HTSH | | | |
| HPBA HPBB HPBC HPBD | Human Pineal Gland | pBS | LP05 |
| HPBE | | | |
| HSAA HSAB HSAC | HSA 172 Cells | pBS | LP05 |
| HSBA HSBB HSBC HSBM | HSC172 cells | pBS | LP05 |
| HJAA HJAB HJAC HJAD | Jurkat T-cell G1 phase | pBS | LP05 |
| HJBA HJBB HJBC HJBD | Jurkat T-Cell, S phase | pBS | LP05 |
| HAFA HAFB | Aorta endothelial cells + TNF-a | pBS | LP05 |
| HAWA HAWB HAWC | Human White Adipose | pBS | LP05 |
| HTNA HTNB | Human Thyroid | pBS | LP05 |
| HONA | Normal Ovary, Premenopausal | pBS | LP05 |
| HARA HARB | Human Adult Retina | pBS | LP05 |
| HLJA HLJB | Human Lung | pCMVSport 1 | LP06 |
| HOFM HOFN HOFO | H. Ovarian Tumor, II, OV5232 | pCMVSport 2.0 | LP07 |
| HOGA HOGB HOGC | OV 10-3-95 | pCMVSport 2.0 | LP07 |
| HCGL | CD34+cells, II | pCMVSport 2.0 | LP07 |
| HDLA | Hodgkin's Lymphoma I | pCMVSport 2.0 | LP07 |
| HDTA HDTB HDTC HDTD | Hodgkin's Lymphoma II | pCMVSport 2.0 | LP07 |
| HDTE | | | |
| HKAA HKAB HKAC HKAD | Keratinocyte | pCMVSport2.0 | LP07 |
| HKAE HKAF HKAG HKAH | | | |
| HCIM | CAPFINDER, Crohn's Disease, | pCMVSport 2.0 | LP07 |
| | lib 2 | | |
| HKAL | Keratinocyte, lib 2 | pCMVSport2.0 | LP07 |
| HKAT | Keratinocyte, lib 3 | pCMVSport2.0 | LP07 |
| HNDA | Nasal polyps | pCMVSport2.0 | LP07 |
| HDRA | H. Primary Dendritic Cells, lib 3 | pCMVSport2.0 | LP07 |
| HOHA HOHB HOHC | Human Osteoblasts II | pCMVSport2.0 | LP07 |
| HLDA HLDB HLDC | Liver, Hepatoma | pCMVSport3.0 | LP08 |
| HLDN HLDO HLDP | Human Liver, normal | pCMVSport3.0 | LP08 |
| HMTA | pBMC stimulated w/poly I/C | pCMVSport3.0 | LP08 |
| HNTA | NTERA2, control | pCMVSport3.0 | LP08 |
| HDPA HDPB HDPC HDPD | Primary Dendritic Cells, lib 1 | pCMVSport3.0 | LP08 |
| HDPF HDPG HDPH HDPI | | | |
| HDPJ HDPK | | | |
| HDPM HDPN HDPO HDPP | Primary Dendritic cells, frac 2 | pCMVSport3.0 | LP08 |
| HMUA HMUB HMUC | Myoloid Progenitor Cell Line | pCMVSport3.0 | LP08 |
| HHEA HHEB HHEC HHED | T Cell helper I | pCMVSport3.0 | LP08 |
| HHEM HHEN HHEO HHEP | T cell helper II | pCMVSport3.0 | LP08 |
| HEQA HEQB HEQC | Human endometrial stromal | pCMVSport3.0 | LP08 |
| | cells | | |
| HJMA HJMB | Human endometrial stromal | pCMVSport3.0 | LP08 |
| | cells-treated with progesterone | | |
| HSWA HSWB HSWC | Human endometrial stromal | pCMVSport3.0 | LP08 |
| | cells-treated with estradiol | | |
| HSYA HSYB HSYC | Human Thymus Stromal Cells | pCMVSport3.0 | LP08 |
| HLWA HLWB HLWC | Human Placenta | pCMVSport3.0 | LP08 |
| HRAA HRAB HRAC | Rejected Kidney, lib 4 | pCMVSport3.0 | LP08 |
| HMTM | PCR, pBMC I/C treated | PCRII | LP09 |
| HMJA | H. Meniingima, M6 | pSport 1 | LP10 |
| HMKA HMKB HMKC | H. Meningima, M1 | pSport 1 | LP10 |
| HMKD HMKE | | | |
| HUSG HUSI | Human umbilical vein | pSport 1 | LP10 |
| | endothelial cells, IL-4 induced | | |
| HUSX HUSY | Human Umbilical Vein | pSport 1 | LP10 |
| | Endothelial Cells, uninduced | | |
| HOFA | Ovarian Tumor I, OV5232 | pSport 1 | LP10 |
| HCFA HCFB HCFC HCFD | T-Cell PHA 16 hrs | pSport 1 | LP10 |
| HCFL HCFM HCFN HCFO | T-Cell PHA 24 hrs | pSport 1 | LP10 |
| HADA HADC HADD HADE | Human Adipose | pSport 1 | LP10 |
| HADF HADG | | | |
| HOVA HOVB HOVC | Human Ovary | pSport 1 | LP10 |
| HTWB HTWC HTWD HTWE | Resting T-Cell Library, II | pSport 1 | LP10 |
| HTWF | | | |
| HMMA | Spleen metastic melanoma | pSport 1 | LP10 |
| HLYA HLYB HLYC HLYD | Spleen, Chronic lymphocytic | pSport 1 | LP10 |
| HLYE | leukemia | | |
| HCGA | CD34+ cell, I | pSport 1 | LP10 |
| HEOM HEON | Human Eosinophils | pSport 1 | LP10 |
| HTDA | Human Tonsil, Lib 3 | pSport 1 | LP10 |
| HSPA | Salivary Gland, Lib 2 | pSport 1 | LP10 |
| HCHA HCHB HCHC | Breast Cancer cell line, MDA 36 | pSport 1 | LP10 |
| HCHM HCHN | Breast Cancer Cell line, | pSport 1 | LP10 |
| | angiogenic | | |
| HCIA | Crohn's Disease | pSport 1 | LP10 |
| HDAA HDAB HDAC | HEL cell line | pSport 1 | LP10 |
| HABA | Human Astrocyte | pSport 1 | LP10 |
| HUFA HUFB HUFC | Ulcerative Colitis | pSport 1 | LP10 |
| HNTM | NTERA2 + retinoic acid, 14 | pSport 1 | LP10 |
| | days | | |
| HDQA | Primary Dendritic | pSport 1 | LP10 |
| | cells, CapFinder2, frac 1 | | |
| HDQM | Primary Dendritic Cells, | pSport 1 | LP10 |
| | CapFinder, frac 2 | | |
| HLDX | Human Liver, normal, CapFinder | pSport 1 | LP10 |
| HULA HULB HULC | Human Dermal Endothelial | pSport1 | LP10 |
| | Cells, untreated | | |
| HUMA | Human Dermal Endothelial | pSport1 | LP10 |
| | cells, treated | | |
| HCJA | Human Stromal Endometrial | pSport1 | LP10 |
| | fibroblasts, untreated | | |
| HCJM | Human Stromal endometrial | pSport1 | LP10 |
| | fibroblasts, treated w/estradiol | | |
| HEDA | Human Stromal endometrial | pSport1 | LP10 |
| | fibroblasts, treated with | | |
| | progesterone | | |
| HFNA | Human ovary tumor cell | pSport1 | LP10 |
| | OV350721 | | |
| HKGA HKGB HKGC HKGD | Merkel Cells | pSport1 | LP10 |
| HISA HISB HISC | Pancreas Islet Cell Tumor | pSport1 | LP10 |
| HLSA | Skin, burned | pSport1 | LP10 |
| HBZA | Prostate, BPH, Lib 2 | pSport 1 | LP10 |
| HBZS | Prostate BPH, Lib 2, subtracted | pSport 1 | LP10 |
| HFIA HFIB HFIC | Synovial Fibroblasts (control) | pSport 1 | LP10 |
| HFIH HFII HFIJ | Synovial hypoxia | pSport 1 | LP10 |
| HFIT HFIU HFIV | Synovial IL-1/TNF stimulated | pSport 1 | LP10 |
| HGCA | Messangial cell, frac 1 | pSport1 | LP10 |
| HMVA HMVB HMVC | Bone Marrow Stromal Cell, | pSport1 | LP10 |
| | untreated | | |
| HFIX HFIY HFIZ | Synovial Fibroblasts (Il1/TNF), | pSport1 | LP10 |
| | subt | | |
| HFOX HFOY HFOZ | Synovial hypoxia-RSF | pSport1 | LP10 |
| | subtracted | | |
| HMQA HMQB HMQC | Human Activated Monocytes | Uni-ZAP XR | LP11 |
| HMQD | | | |
| HLIA HLIB HLIC | Human Liver | pCMVSport 1 | LP012 |
| HHBA HHBB HHBC HHBD | Human Heart | pCMVSport 1 | LP012 |
| HHBE | | | |
| HBBA HBBB | Human Brain | pCMVSport 1 | LP012 |
| HLJA HLJB HLJC HLJD | Human Lung | pCMVSport 1 | LP012 |
| HLJE | | | |
| HOGA HOGB HOGC | Ovarian Tumor | pCMVSport 2.0 | LP012 |
| HTJM | Human Tonsils, Lib 2 | pCMVSport 2.0 | LP012 |
| HAMF HAMG | KMH2 | pCMVSport 3.0 | LP012 |
| HAJA HAJB HAJC | L428 | pCMVSport 3.0 | LP012 |
| HWBA HWBB HWBC | Dendritic cells, pooled | pCMVSport 3.0 | LP012 |
| HWBD HWBE | | | |
| HWAA HWAB HWAC | Human Bone Marrow, treated | pCMVSport 3.0 | LP012 |
| HWAD HWAE | | | |
| HYAA HYAB HYAC | B Cell lymphoma | pCMVSport 3.0 | LP012 |
| HWHG HWHH HWHI | Healing groin wound, 6.5 hours | pCMVSport 3.0 | LP012 |
| | post incision | | |
| HWHP HWHQ HWHR | Healing groin wound; 7.5 hours | pCMVSport 3.0 | LP012 |
| | post incision | | |
| HARM | Healing groin wound - zero hr | pCMVSport 3.0 | LP012 |
| | post-incision (control) | | |
| HBIM | Olfactory epithelium; | pCMVSport 3.0 | LP012 |
| | nasalcavity | | |
| HWDA | Healing Abdomen wound; | pCMVSport 3.0 | LP012 |
| | 70&90 min post incision | | |
| HWEA | Healing Abdomen Wound; 15 | pCMVSport 3.0 | LP012 |
| | days post incision | | |
| HWJA | Healing Abdomen | pCMVSport 3.0 | LP012 |
| | Wound; 21&29 days | | |
| HNAL | Human Tongue, frac 2 | pSport1 | LP012 |
| HMJA | H. Meniingima, M6 | pSport1 | LP012 |
| HMKA HMKB HMKC | H. Meningima, M1 | pSport1 | LP012 |
| HMKD HMKE | | | |
| HOFA | Ovarian Tumor I, OV5232 | pSport1 | LP012 |
| HCFA HCFB HCFC HCFD | T-Cell PHA 16 hrs | pSport1 | LP012 |
| HCFL HCFM HCFN HCFO | T-Cell PHA 24 hrs | pSport1 | LP012 |
| HMMA HMMB HMMC | Spleen metastic melanoma | pSport1 | LP012 |
| HTDA | Human Tonsil, Lib 3 | pSport1 | LP012 |
| HDBA | Human Fetal Thymus | pSport1 | LP012 |
| HDUA | Pericardium | pSport1 | LP012 |
| HBZA | Prostate, BPH, Lib 2 | pSport1 | LP012 |
| HWCA | Larynx tumor | pSport1 | LP012 |
| HWKA | Normal lung | pSport1 | LP012 |
| HSMB | Bone marrow stroma, treated | pSport1 | LP012 |
| HBHM | Normal trachea | pSport1 | LP012 |
| HLFC | Human Larynx | pSport1 | LP012 |
| HLRB | Siebben Polyposis | pSport1 | LP012 |
| HNIA | Mammary Gland | pSport1 | LP012 |
| HNJB | Palate carcinoma | pSport1 | LP012 |
| HNKA | Palate normal | pSport1 | LP012 |
| HMZA | Pharynx carcinoma | pSport1 | LP012 |
| HABG | Cheek Carcinoma | pSport1 | LP012 |
| HMZM | Pharynx Carcinoma | pSport1 | LP012 |
| HDRM | Larynx Carcinoma | pSport1 | LP012 |
| HVAA | Pancreas normal PCA4 No | pSport1 | LP012 |
| HICA | Tongue carcinoma | pSport1 | LP012 |
| HUKA HUKB HUKC HUKD | Human Uterine Cancer | Lambda ZAP II | LP013 |
| HUKE | | | |
| HFFA | Human Fetal Brain, random | Lambda ZAP II | LP013 |
| | primed | | |
| HTUA | Activated T-cell labeled with 4- | Lambda ZAP II | LP013 |
| | thioluri | | |
| HBQA | Early Stage Human Brain, | Lambda ZAP II | LP013 |
| | random primed | | |
| HMEB | Human microvascular | Lambda ZAP II | LP013 |
| | Endothelial cells, fract. B | | |
| HUSH | Human Umbilical Vein | Lambda ZAP II | LP013 |
| | Endothelial cells, fract. A, re- | | |
| | excision | | |
| HLQC HLQD | Hepatocellular tumor, re- | Lambda ZAP II | LP013 |
| | excision | | |
| HTWJ HTWK HTWL | Resting T-cell, re-excision | Lambda ZAP II | LP013 |
| HF6S | Human Whole 6 week Old | pBluescript | LP013 |
| | Embryo (II), subt | | |
| HHPS | Human Hippocampus, | pBluescript | LP013 |
| | subtracted | | |
| HL1S | LNCAP, differential expression | pBluescript | LP013 |
| HLHS HLHT | Early Stage Human Lung, | pBluescript | LP013 |
| | Subtracted | | |
| HSUS | Supt cells, cyclohexamide | pBluescript | LP013 |
| | treated, subtracted | | |
| HSUT | Supt cells, cyclohexamide | pBluescript | LP013 |
| | treated, differentially expressed | | |
| HSDS | H. Striatum Depression, | pBluescript | LP013 |
| | subtracted | | |
| HPTZ | Human Pituitary, Subtracted VII | pBluescript | LP013 |
| HSDX | H. Striatum Depression, subt II | pBluescript | LP013 |
| HSDZ | H. Striatum Depression, subt | pBluescript | LP013 |
| HPBA HPBB HPBC HPBD | Human Pineal Gland | pBluescript SK− | LP013 |
| HPBE | | | |
| HRTA | Colorectal Tumor | pBluescript SK− | LP013 |
| HSBA HSBB HSBC HSBM | HSC172 cells | pBluescript SK− | LP013 |
| HJAA HJAB HJAC HJAD | Jurkat T-cell G1 phase | pBluescript SK− | LP013 |
| HJBA HJBB HJBC HJBD | Jurkat T-cell, S1 phase | pBluescript SK− | LP013 |
| HTNA HTNB | Human Thyroid | pBluescript SK− | LP013 |
| HAHA HAHB | Human Adult Heart | Uni-ZAP XR | LP013 |
| HE6A | Whole 6 week Old Embryo | Uni-ZAP XR | LP013 |
| HFCA HFCB HFCC HFCD | Human Fetal Brain | Uni-ZAP XR | LP013 |
| HFCE | | | |
| HFKC HFKD HFKE HFKF | Human Fetal Kidney | Uni-ZAP XR | LP013 |
| HFKG | | | |
| HGBA HGBD HGBE HGBF | Human Gall Bladder | Uni-ZAP XR | LP013 |
| HGBG | | | |
| HPRA HPRB HPRC HPRD | Human Prostate | Uni-ZAP XR | LP013 |
| HTEA HTEB HTEC HTED | Human Testes | Uni-ZAP XR | LP013 |
| HTEE | | | |
| HTTA HTTB HTTC HTTD | Human Testes Tumor | Uni-ZAP XR | LP013 |
| HTTE | | | |
| HYBA HYBB | Human Fetal Bone | Uni-ZAP XR | LP013 |
| HFLA | Human Fetal Liver | Uni-ZAP XR | LP013 |
| HHFB HHFC HHFD HHFE | Human Fetal Heart | Uni-ZAP XR | LP013 |
| HHFF | | | |
| HUVB HUVC HUVD HUVE | Human Umbilical Vein, End. | Uni-ZAP XR | LP013 |
| | remake | | |
| HTHB HTHC HTHD | Human Thymus | Uni-ZAP XR | LP013 |
| HSTA HSTB HSTC HSTD | Human Skin Tumor | Uni-ZAP XR | LP013 |
| HTAA HTAB HTAC HTAD | Human Activated T-cells | Uni-ZAP XR | LP013 |
| HTAE | | | |
| HFEA HFEB HFEC | Human Fetal Epithelium (skin) | Uni-ZAP XR | LP013 |
| HJPA HJPB HJPC HJPD | Human Jurkat Membrane Bound | Uni-ZAP XR | LP013 |
| | Polysomes | | |
| HESA | Human Epithelioid Sarcoma | Uni-ZAP XR | LP013 |
| HALS | Human Adult Liver, Subtracted | Uni-ZAP XR | LP013 |
| HFTA HFTB HFTC HFTD | Human Fetal Dura Mater | Uni-ZAP XR | LP013 |
| HCAA HCAB HCAC | Cem cells, cyclohexamide | Uni-ZAP XR | LP013 |
| | treated | | |
| HRGA HRGB HRGC HRGD | Raji Cells, cyclohexamide | Uni-ZAP XR | LP013 |
| | treated | | |
| HE9A HE9B HE9C HE9D | Nine Week Old Early Stage | Uni-ZAP XR | LP013 |
| HE9E | Human | | |
| HSFA | Human Fibrosarcoma | Uni-ZAP XR | LP013 |
| HATA HATB HATC HATD | Human Adrenal Gland Tumor | Uni-ZAP XR | LP013 |
| HATE | | | |
| HTRA | Human Trachea Tumor | Uni-ZAP XR | LP013 |
| HE2A HE2D HE2E HE2H | 12 Week Old Early Stage | Uni-ZAP XR | LP013 |
| HE2I | Human | | |
| HE2B HE2C HE2F HE2G | 12 Week Old Early Stage | Uni-ZAP XR | LP013 |
| HE2P | Human, II | | |
| HNEA HNEB HNEC HNED | Human Neutrophil | Uni-ZAP XR | LP013 |
| HNEE | | | |
| HBGA | Human Primary Breast Cancer | Uni-ZAP XR | LP013 |
| HPTS HPTT HPTU | Human Pituitary, subtracted | Uni-ZAP XR | LP013 |
| HMQA HMQB HMQC | Human Activated Monocytes | Uni-ZAP XR | LP013 |
| HMQD | | | |
| HOAA HOAB HOAC | Human Osteosarcoma | Uni-ZAP XR | LP013 |
| HTOA HTOD HTOE HTOF | human tonsils | Uni-ZAP XR | LP013 |
| HTOG | | | |
| HMGB | Human OB MG63 control | Uni-ZAP XR | LP013 |
| | fraction I | | |
| HOPB | Human OB HOS control | Uni-ZAP XR | LP013 |
| | fraction I | | |
| HOQB | Human OB HOS treated (1 nM | Uni-ZAP XR | LP013 |
| | E2) fraction I | | |
| HAUA HAUB HAUC | Amniotic Cells - TNF induced | Uni-ZAP XR | LP013 |
| HAQA HAQB HAQC HAQD | Amniotic Cells - Primary | Uni-ZAP XR | LP013 |
| | Culture | | |
| HROA HROC | HUMAN STOMACH | Uni-ZAP XR | LP013 |
| HBJA HBJB HBJC HBJD | HUMAN B CELL | Uni-ZAP XR | LP013 |
| HBJE | LYMPHOMA | | |
| HODA HODB HODC HODD | human ovarian cancer | Uni-ZAP XR | LP013 |
| HCPA | Corpus Callosum | Uni-ZAP XR | LP013 |
| HSOA | stomach cancer (human) | Uni-ZAP XR | LP013 |
| HERA | SKIN | Uni-ZAP XR | LP013 |
| HMDA | Brain-medulloblastoma | Uni-ZAP XR | LP013 |
| HGLA HGLB HGLD | Glioblastoma | Uni-ZAP XR | LP013 |
| HWTA HWTB HWTC | wilm's tumor | Uni-ZAP XR | LP013 |
| HEAA | H. Atrophic Endometrium | Uni-ZAP XR | LP013 |
| HAPN HAPO HAPP HAPQ | Human Adult Pulmonary; re- | Uni-ZAP XR | LP013 |
| HAPR | excision | | |
| HLTG HLTH | Human T-cell lymphoma; re- | Uni-ZAP XR | LP013 |
| | excision | | |
| HAHC HAHD HAHE | Human Adult Heart; re-excision | Uni-ZAP XR | LP013 |
| HAGA HAGB HAGC HAGD | Human Amygdala | Uni-ZAP XR | LP013 |
| HAGE | | | |
| HSJA HSJB HSJC | Smooth muscle-ILb induced | Uni-ZAP XR | LP013 |
| HSHA HSHB HSHC | Smooth muscle, IL1b induced | Uni-ZAP XR | LP013 |
| HPWA HPWB HPWC HPWD | Prostate BPH | Uni-ZAP XR | LP013 |
| HPWE | | | |
| HPIA HPIB HPIC | LNCAP prostate cell line | Uni-ZAP XR | LP013 |
| HPJA HPJB HPJC | PC3 Prostate cell line | Uni-ZAP XR | LP013 |
| HBTA | Bone Marrow Stroma, | Uni-ZAP XR | LP013 |
| | TNF&LPS ind | | |
| HMCF HMCG HMCH HMCI | Macrophage-oxLDL; re- | Uni-ZAP XR | LP013 |
| HMCJ | excision | | |
| HAGG HAGH HAGI | Human Amygdala; re-excision | Uni-ZAP XR | LP013 |
| HACA | H. Adipose Tissue | Uni-ZAP XR | LP013 |
| HKFB | K562 + PMA (36 hrs), re- | ZAP Express | LP013 |
| | excision | | |
| HCWT HCWU HCWV | CD34 positive cells (cord | ZAP Express | LP013 |
| | blood), re-ex | | |
| HBWA | Whole brain | ZAP Express | LP013 |
| HBXA HBXB HBXC HBXD | Human Whole Brain #2 - Oligo | ZAP Express | LP013 |
| | dT >1.5 Kb | | |
| HAVM | Temporal cortex-Alzheizmer | pT-Adv | LP014 |
| HAVT | Hippocampus, Alzheimer | pT-Adv | LP014 |
| | Subtracted | | |
| HHAS | CHME Cell Line | Uni-ZAP XR | LP014 |
| HAJR | Larynx normal | pSport 1 | LP014 |
| HWLE HWLF HWLG HWLH | Colon Normal | pSport 1 | LP014 |
| HCRM HCRN HCRO | Colon Carcinoma | pSport 1 | LP014 |
| HWLI HWLJ HWLK | Colon Normal | pSport 1 | LP014 |
| HWLQ HWLR HWLS HWLT | Colon Tumor | pSport 1 | LP014 |
| HBFM | Gastrocnemius Muscle | pSport 1 | LP014 |
| HBOD HBOE | Quadriceps Muscle | pSport 1 | LP014 |
| HBKD HBKE | Soleus Muscle | pSport 1 | LP014 |
| HCCM | Pancreatic Langerhans | pSport 1 | LP014 |
| HWGA | Larynx carcinoma | pSport 1 | LP014 |
| HWGM HWGN | Larynx carcinoma | pSport 1 | LP014 |
| HWLA HWLB HWLC | Normal colon | pSport 1 | LP014 |
| HWLM HWLN | Colon Tumor | pSport 1 | LP014 |
| HVAM HVAN HVAO | Pancreas Tumor | pSport 1 | LP014 |
| HWGQ | Larynx carcinoma | pSport 1 | LP014 |
| HAQM HAQN | Salivary Gland | pSport 1 | LP014 |
| HASM | Stomach; normal | pSport 1 | LP014 |
| HBCM | Uterus; normal | pSport 1 | LP014 |
| HCDM | Testis; normal | pSport 1 | LP014 |
| HDJM | Brain; normal | pSport 1 | LP014 |
| HEFM | Adrenal Gland, normal | pSport 1 | LP014 |
| HBAA | Rectum normal | pSport 1 | LP014 |
| HFDM | Rectum tumour | pSport 1 | LP014 |
| HGAM | Colon, normal | pSport 1 | LP014 |
| HHMM | Colon, tumour | pSport 1 | LP014 |
| HCLB HCLC | Human Lung Cancer | Lambda Zap II | LP015 |
| HRLA | L1 Cell line | ZAP Express | LP015 |
| HHAM | Hypothalamus, Alzheimer's | pCMVSport 3.0 | LP015 |
| HKBA | Ku 812F Basophils Line | pSport 1 | LP015 |
| HS2S | Saos2, Dexamethosome Treated | pSport 1 | LP016 |
| HA5A | Lung Carcinoma A549 | pSport 1 | LP016 |
| | TNFalpha activated | | |
| HTFM | TF-1 Cell Line GM-CSF | pSport 1 | LP016 |
| | Treated | | |
| HYAS | Thyroid Tumour | pSport 1 | LP016 |
| HUTS | Larynx Normal | pSport 1 | LP016 |
| HXOA | Larynx Tumor | pSport 1 | LP016 |
| HEAH | Ea.hy.926 cell line | pSport 1 | LP016 |
| HINA | Adenocarcinoma Human | pSport 1 | LP016 |
| HRMA | Lung Mesothelium | pSport 1 | LP016 |
| HLCL | Human Pre-Differentiated | Uni-Zap XR | LP017 |
| | Adipocytes | | |
| HS2A | Saos2 Cells | pSport 1 | LP020 |
| HS2I | Saos2 Cells; Vitamin D3 | pSport 1 | LP020 |
| | Treated | | |
| HUCM | CHME Cell Line, untreated | pSport 1 | LP020 |
| HEPN | Aryepiglottis Normal | pSport 1 | LP020 |
| HPSN | Sinus Piniformis Tumour | pSport 1 | LP020 |
| HNSA | Stomach Normal | pSport 1 | LP020 |
| HNSM | Stomach Tumour | pSport 1 | LP020 |
| HNLA | Liver Normal Met5No | pSport 1 | LP020 |
| HUTA | Liver Tumour Met 5 Tu | pSport 1 | LP020 |
| HOCN | Colon Normal | pSport 1 | LP020 |
| HOCT | Colon Tumor | pSport 1 | LP020 |
| HTNT | Tongue Tumour | pSport 1 | LP020 |
| HLXN | Larynx Normal | pSport 1 | LP020 |
| HLXT | Larynx Tumour | pSport 1 | LP020 |
| HTYN | Thymus | pSport 1 | LP020 |
| HPLN | Placenta | pSport 1 | LP020 |
| HTNG | Tongue Normal | pSport 1 | LP020 |
| HZAA | Thyroid Normal (SDCA2 No) | pSport 1 | LP020 |
| HWES | Thyroid Thyroiditis | pSport 1 | LP020 |
| HFHD | Ficolled Human Stromal Cells, | pTrip1Ex2 | LP021 |
| | 5Fu treated | | |
| HFHM, HFHN | Ficolled Human Stromal Cells, | pTrip1Ex2 | LP021 |
| | Untreated | | |
| HPCI | Hep G2 Cells, lambda library | lambda Zap-CMV | LP021 |
| | | XR | |
| HBCA, HBCB, HBCC | H. Lymph node breast Cancer | Uni-ZAP XR | LP021 |
| HCOK | Chondrocytes | pSPORT1 | LP022 |
| HDCA, HDCB, HDCC | Dendritic Cells From CD34 | pSPORT1 | LP022 |
| | Cells | | |
| HDMA, HDMB | CD40 activated monocyte | pSPORT1 | LP022 |
| | dendritic cells | | |
| HDDM, HDDN, HDDO | LPS activated derived dendritic | pSPORT1 | LP022 |
| | cells | | |
| HPCR | Hep G2 Cells, PCR library | lambda Zap-CMV | LP022 |
| | | XR | |
| HAAA, HAAB, HAAC | Lung, Cancer (4005313A3): | pSPORT1 | LP022 |
| | Invasive Poorly Differentiated | | |
| | Lung Adenocarcinoma | | |
| HIPA, HIPB, HIPC | Lung, Cancer (4005163 B7): | pSPORT1 | LP022 |
| | Invasive, Poorly Diff. | | |
| | Adenocarcinoma, Metastatic | | |
| HOOH, HOOI | Ovary, Cancer: (4004562 B6) | pSPORT1 | LP022 |
| | Papillary Serous Cystic | | |
| | Neoplasm, Low Malignant Pot | | |
| HIDA | Lung, Normal: (4005313 B1) | pSPORT1 | LP022 |
| HUJA, HUJB, HUJC, HUJD, HUJE | B-Cells | pCMVSport 3.0 | LP022 |
| HNOA, HNOB, HNOC, HNOD | Ovary, Normal: (9805C040R) | pSPORT1 | LP022 |
| HNLM | Lung, Normal: (4005313 B1) | pSPORT1 | LP022 |
| HSCL | Stromal Cells | pSPORT1 | LP022 |
| HAAX | Lung, Cancer: (4005313 A3) | pSPORT1 | LP022 |
| | Invasive Poorly-differentiated | | |
| | Metastatic lung adenocarcinoma | | |
| HUUA, HUUB, HUUC, HUUD | B-cells (unstimulated) | pTrip1Ex2 | LP022 |
| HWWA, HWWB, HWWC, HWWD, | B-cells (stimulated) | pSPORT1 | LP022 |
| HWWE, HWWF, HWWG | | | |
| HCCC | Colon, Cancer: (9808C064R) | pCMVSport 3.0 | LP023 |
| HPDO HPDP HPDQ HPDR | Ovary, Cancer (9809C332): | pSport 1 | LP023 |
| HPD | Poorly differentiated | | |
| | adenocarcinoma | | |
| HPCO HPCP HPCQ HPCT | Ovary, Cancer (15395A1F): | pSport 1 | LP023 |
| | Grade II Papillary Carcinoma | | |
| HOCM HOCO HOCP HOCQ | Ovary, Cancer: (15799A1F) | pSport 1 | LP023 |
| | Poorly differentiated carcinoma | | |
| HCBM HCBN HCBO | Breast, Cancer: (4004943 A5) | pSport 1 | LP023 |
| HNBT HNBU HNBV | Breast, Normal: (4005522B2) | pSport 1 | LP023 |
| HBCP HBCQ | Breast, Cancer: (4005522 A2) | pSport 1 | LP023 |
| HBCJ | Breast, Cancer: (9806C012R) | pSport 1 | LP023 |
| HSAM HSAN | Stromal cells 3.88 | pSport 1 | LP023 |
| HVCA HVCB HVCC HVCD | Ovary, Cancer: (4004332 A2) | pSport 1 | LP023 |
| HSCK HSEN HSEO | Stromal cells (HBM3.18) | pSport 1 | LP023 |
| HSCP HSCQ | stromal cell clone 2.5 | pSport 1 | LP023 |
| HUXA | Breast Cancer: (4005385 A2) | pSport 1 | LP023 |
| HCOM HCON HCOO HCOP | Ovary, Cancer (4004650 A3): | pSport 1 | LP023 |
| HCOQ | Well-Differentiated | | |
| | Micropapillary Serous | | |
| | Carcinoma | | |
| HBNM | Breast, Cancer: (9802C020E) | pSport 1 | LP023 |
| HVVA HVVB HVVC HVVD | Human Bone Marrow, treated | pSport 1 | LP023 |
| HVVE | | | |

[0858] Two nonlimiting examples are provided below for isolating a particular clone from the deposited sample of plasmid cDNAs cited for that clone in Table 7. First, a plasmid is directly isolated by screening the clones using a polynucleotide probe corresponding to the nucleotide sequence of SEQ ID NO:X.

[0859] Particularly, a specific polynucleotide with 3040 nucleotides is synthesized using an Applied Biosystems DNA synthesizer according to the sequence reported. The oligonucleotide is labeled, for instance, with ³²P-γ-ATP using T4 polynucleotide kinase and purified according to routine methods. (E.g., Maniatis et al., Molecular Cloning: A Laboratory Manual, Cold Spring Harbor Press, Cold Spring, N.Y. (1982)). The plasmid mixture is transformed into a suitable host, as indicated above (such as XL-1 Blue (Stratagene)) using techniques known to those of skill in the art, such as those provided by the vector supplier or in related publications or patents cited above. The transformants are plated on 1.5% agar plates (containing the appropriate selection agent, e.g., ampicillin) to a density of about 150 transformants (colonies) per plate. These plates are screened using Nylon membranes according to routine methods for bacterial colony screening (e.g., Sambrook et al., Molecular Cloning: A Laboratory Manual, 2nd Edit., (1989), Cold Spring Harbor Laboratory Press, pages 1.93 to 1.104), or other techniques known to those of skill in the art.

[0860] Alternatively, two primers of 17-20 nucleotides derived from both ends of the nucleotide sequence of SEQ ID NO:X are synthesized and used to amplify the desired cDNA using the deposited cDNA plasmid as a template. The polymerase chain reaction is carried out under routine conditions, for instance, in 25 μl of reaction mixture with 0.5 ug of the above cDNA template. A convenient reaction mixture is 1.5-5 mM MgCl₂, 0.01% (w/v) gelatin, 20 μM each of dATP, dCTP, dGTP, dTTP, 25 μmol of each primer and 0.25 Unit of Taq polymerase. Thirty five cycles of PCR (denaturation at 94° C. for 1 min; annealing at 55° C. for 1 min; elongation at 72° C. for 1 min) are performed with a Perkin-Elmer Cetus automated thermal cycler. The amplified product is analyzed by agarose gel electrophoresis and the DNA band with expected molecular weight is excised and purified. The PCR product is verified to be the selected sequence by subcloning and sequencing the DNA product.

[0861] Several methods are available for the identification of the 5′ or 3′ non-coding portions of a gene which may not be present in the deposited clone. These methods include but are not limited to, filter probing, clone enrichment using specific probes, and protocols similar or identical to 5′ and 3′ “RACE” protocols which are well known in the art. For instance, a method similar to 5′ RACE is available for generating the missing 5′ end of a desired full-length transcript. (Promont-Racine et al., Nucleic Acids Res. 21(7):1683-1684 (1993)).

[0862] Briefly, a specific RNA oligonucleotide is ligated to the 5′ ends of a population of RNA presumably containing full-length gene RNA transcripts. A primer set containing a primer specific to the ligated RNA oligonucleotide and a primer specific to a known sequence of the gene of interest is used to PCR amplify the 5′ portion of the desired full-length gene. This amplified product may then be sequenced and used to generate the full length gene.

[0863] This above method starts with total RNA isolated from the desired source, although poly-A+ RNA can be used. The RNA preparation can then be treated with phosphatase if necessary to eliminate 5′ phosphate groups on degraded or damaged RNA which may interfere with the later RNA ligase step. The phosphatase should then be inactivated and the RNA treated with tobacco acid pyrophosphatase in order to remove the cap structure present at the 5′ ends of messenger RNAs. This reaction leaves a 5′ phosphate group at the 5′ end of the cap cleaved RNA which can then be ligated to an RNA oligonucleotide using T4 RNA ligase.

[0864] This modified RNA preparation is used as a template for first strand cDNA synthesis using a gene specific oligonucleotide. The first strand synthesis reaction is used as a template for PCR amplification of the desired 5′ end using a primer specific to the ligated RNA oligonucleotide and a primer specific to the known sequence of the gene of interest. The resultant product is then sequenced and analyzed to confirm that the 5′ end sequence belongs to the desired gene.

### Example 2

### Isolation of Genomic Clones Corresponding to a Polynucleotide

[0865] A human genomic P1 library (Genomic Systems, Inc.) is screened by PCR using primers selected for the sequence corresponding to SEQ ID NO:X according to the method described in Example 1. (See also, Sambrook.)

### Example 3

### Tissue Specific Expression Analysis

[0866] The Human Genome Sciences, Inc. (HGS) database is derived from sequencing tissue and/or disease specific cDNA libraries. Libraries generated from a particular tissue are selected and the specific tissue expression pattern of EST groups or assembled contigs within these libraries is determined by comparison of the expression patterns of those groups or contigs within the entire database. ESTs and assembled contigs which show tissue specific expression are selected.

[0867] The original clone from which the specific EST sequence was generated, or in the case of an assembled contig, the clone from which the 5′ most EST sequence was generated, is obtained from the catalogued library of clones and the insert amplified by PCR using methods known in the art. The PCR product is denatured and then transferred in 96 or 384 well format to a nylon membrane (Schleicher and Scheull) generating an array filter of tissue specific clones. Housekeeping genes, maize genes, and known tissue specific genes are included on the filters. These targets can be used in signal normalization and to validate assay sensitivity. Additional targets are included to monitor probe length and specificity of hybridization.

[0868] Radioactively labeled hybridization probes are generated by first strand cDNA synthesis per the manufacturer's instructions (Life Technologies) from mRNA/RNA samples prepared from the specific tissue being analyzed (e.g., prostate, prostate cancer, ovarian, ovarian cancer, etc.). The hybridization probes are purified by gel exclusion chromatography, quantitated, and hybridized with the array filters in hybridization bottles at 65° C. overnight The filters are washed under stringent conditions and signals are captured using a Fuji phosphoimager.

[0869] Data is extracted using AIS software and following background subtraction, signal normalization is performed. This includes a normalization of filter-wide expression levels between different experimental runs. Genes that are differentially expressed in the tissue of interest are identified.

### Example 4

### Chromosomal Mapping of the Polynucleotides

[0870] An oligonucleotide primer set is designed according to the sequence at the 5′ end of SEQ ID NO:X. This primer preferably spans about 100 nucleotides. This primer set is then used in a polymerase chain reaction under the following set of conditions: 30 seconds, 95° C.; 1 minute, 56° C.; 1 minute, 70° C. This cycle is repeated 32 times followed by one 5 minute cycle at 70° C. Human, mouse, and hamster DNA is used as template in addition to a somatic cell hybrid panel containing individual chromosomes or chromosome fragments (Bios, Inc). The reactions are analyzed on either 8% polyacrylamide gels or 3.5% agarose gels. Chromosome mapping is determined by the presence of an approximately 100 bp PCR fragment in the particular somatic cell hybrid.

### Example 5

### Bacterial Expression of a Polypeptide

[0871] A polynucleotide encoding a polypeptide of the present invention is amplified using PCR oligonucleotide primers corresponding to the 5′ and 3′ ends of the DNA sequence, as outlined in Example 1, to synthesize insertion fragments. The primers used to amplify the cDNA insert should preferably contain restriction sites, such as BamHI and XbaI, at the 5′ end of the primers in order to clone the amplified product into the expression vector. For example, BamHI and XbaI correspond to the restriction enzyme sites on the bacterial expression vector pQE-9. (Qiagen, Inc., Chatsworth, Calif.). This plasmid vector encodes antibiotic resistance (Amp^{r}), a bacterial origin of replication (ori), an IPTG-regulatable promoter/operator (P/O), a ribosome binding site (RBS), a 6-histidine tag (6-His), and restriction enzyme cloning sites.

[0872] The pQE-9 vector is digested with BamHI and XbaI and the amplified fragment is ligated into the pQE-9 vector maintaining the reading frame initiated at the bacterial RBS. The ligation mixture is then used to transform the E. coli strain M15/rep4 (Qiagen, Inc.) which contains multiple copies of the plasmid pREP4, which expresses the lacI repressor and also confers kanamycin resistance (Kan^{r}). Transformants are identified by their ability to grow on LB plates and ampicillin/kanamycin resistant colonies are selected. Plasmid DNA is isolated and confirmed by restriction analysis.

[0873] Clones containing the desired constructs are grown overnight (O/N) in liquid culture in LB media supplemented with both Amp (100 ug/ml) and Kan (25 ug/ml). The O/N culture is used to inoculate a large culture at a ratio of 1:100 to 1:250. The cells are grown to an optical density 600 (O.D.⁶⁰⁰) of between 0.4 and 0.6. IPTG (Isopropyl-B-D-thiogalacto pyranoside) is then added to a final concentration of 1 mM. IPTG induces by inactivating the lacI repressor, clearing the P/O leading to increased gene expression.

[0874] Cells are grown for an extra 3 to 4 hours. Cells are then harvested by centrifugation (20 mins at 6000×g). The cell pellet is solubilized in the chaotropic agent 6 Molar Guanidine HCl by stirring for 3-4 hours at 4° C. The cell debris is removed by centrifugation, and the supernatant containing the polypeptide is loaded onto a nickel-nitrilo-tri-acetic acid (“Ni-NTA”) affinity resin column (available from QIAGEN, Inc., supra). Proteins with a 6×His tag bind to the Ni-NTA resin with high affinity and can be purified in a simple one-step procedure (for details see: The QIAexpressionist (1995) QIAGEN, Inc., supra).

[0875] Briefly, the supernatant is loaded onto the column in 6 M guanidine-HCl, pH 8. The column is first washed with 10 volumes of 6 M guanidine-HCl, pH 8, then washed with 10 volumes of 6 M guanidine-HCl pH 6, and finally the polypeptide is eluted with 6 M guanidine-HCl, pH 5.

[0876] The purified protein is then renatured by dialyzing it against phosphate-buffered saline (PBS) or 50 mM Na-acetate, pH 6 buffer plus 200 mM NaCl. Alternatively, the protein can be successfully refolded while immobilized on the Ni-NTA column. The recommended conditions are as follows: renature using a linear 6M-1M urea gradient in 500 mM NaCl, 20% glycerol, 20 mM Tris/HCl pH 7.4, containing protease inhibitors. The renaturation should be performed over a period of 1.5 hours or more. After renaturation the proteins are eluted by the addition of 250 mM immidazole. Immidazole is removed by a final dialyzing step against PBS or 50 mM sodium acetate pH 6 buffer plus 200 mM NaCl. The purified protein is stored at 4° C. or frozen at −80° C.

[0877] In addition to the above expression vector, the present invention further includes an expression vector, called pHE4a (ATCC Accession Number 209645, deposited on Feb. 25, 1998) which contains phage operator and promoter elements operatively linked to a polynucleotide of the present invention, called pH3B4a (ATCC Accession Number 209645, deposited on Feb. 25, 1998.) This vector contains: 1) a neomycinphosphotransferase gene as a selection marker, 2) an E. coli origin of replication, 3) a T5 phage promoter sequence, 4) two lac operator sequences, 5) a Shine-Delgarno sequence, and 6) the lactose operon repressor gene (lacIq). The origin of replication (oriC) is derived from pUC19 (LTI, Gaithersburg, Md.). The promoter and operator sequences are made synthetically.

[0878] DNA can be inserted into the pHE4a by restricting the vector with NdeI and XbaI, BamHI, XhoI, or Asp718, running the restricted product on a gel, and isolating the larger fragment (the stuffer fragment should be about 310 base pairs). The DNA insert is generated according to the PCR protocol described in Example 1, using PCR primers having restriction sites for NdeI (5′ primer) and XbaI, BamHI, XhoI, or Asp718 (3′ primer). The PCR insert is gel purified and restricted with compatible enzymes. The insert and vector are ligated according to standard protocols.

[0879] The engineered vector could easily be substituted in the above protocol to express protein in a bacterial system.

### Example 6

### Purification of a Polypeptide from an Inclusion Body

[0880] The following alternative method can be used to purify a polypeptide expressed in E coli when it is present in the form of inclusion bodies. Unless otherwise specified, all of the following steps are conducted at 4-10° C.

[0881] Upon completion of the production phase of the E. coli fermentation, the cell culture is cooled to 4-10° C. and the cells harvested by continuous centrifugation at 15,000 rpm (Heraeus Sepatech). On the basis of the expected yield of protein per unit weight of cell paste and the amount of purified protein required, an appropriate amount of cell paste, by weight, is suspended in a buffer solution containing 100 mM Tris, 50 mM EDTA, pH 7.4. The cells are dispersed to a homogeneous suspension using a high shear mixer.

[0882] The cells are then lysed by passing the solution through a microfluidizer (Microfuidics, Corp. or APV Gaulin, Inc.) twice at 4000-6000 psi. The homogenate is then mixed with NaCl solution to a final concentration of 0.5 M NaCl, followed by centrifugation at 7000×g for 15 min. The resultant pellet is washed again using 0.5 M NaCl, 100 mM Tris, 50 mM EDTA, pH 7.4.

[0883] The resulting washed inclusion bodies are solubilized with 1.5 M guanidine hydrochloride (GuHCl) for 2-4 hours. After 7000×g centrifugation for 15 min., the pellet is discarded and the polypeptide containing supernatant is incubated at 4° C. overnight to allow further GuHCl extraction.

[0884] Following high speed centrifugation (30,000×g) to remove insoluble particles, the GuHCl solubilized protein is refolded by quickly mixing the GuHCl extract with 20 volumes of buffer containing 50 mM sodium, pH 4.5, 150 mM NaCl, 2 mM EDTA by vigorous stirring. The refolded diluted protein solution is kept at 4° C. without mixing for 12 hours prior to further purification steps.

[0885] To clarify the refolded polypeptide solution, a previously prepared tangential filtration unit equipped with 0.16 μm membrane filter with appropriate surface area (e.g., Filtron), equilibrated with 40 mM sodium acetate, pH 6.0 is employed. The filtered sample is loaded onto a cation exchange resin (e.g., Poros HS-50, Perseptive Biosystems). The column is washed with 40 mM sodium acetate, pH 6.0 and eluted with 250 mM, 500 mM, 1000 mM, and 1500 mM NaCl in the same buffer, in a stepwise manner. The absorbance at 280 nm of the effluent is continuously monitored. Fractions are collected and further analyzed by SDS-PAGE.

[0886] Fractions containing the polypeptide are then pooled and mixed with 4 volumes of water. The diluted sample is then loaded onto a previously prepared set of tandem columns of strong anion (Poros HQ-50, Perseptive Biosystems) and weak anion (Poros CM-20, Perseptive Biosystems) exchange resins. The columns are equilibrated with 40 mM sodium acetate, pH 6.0. Both columns are washed with 40 mM sodium acetate, pH 6.0, 200 mM NaCl. The CM-20 column is then eluted using a 10 column volume linear gradient ranging from 0.2 M NaCl, 50 mM sodium acetate, pH 6.0 to 1.0 M NaCl, 50 mM sodium acetate, pH 6.5. Fractions are collected under constant A₂₈₀ monitoring of the effluent. Fractions containing the polypeptide (determined, for instance, by 16% SDS-PAGE) are then pooled.

[0887] The resultant polypeptide should exhibit greater than 95% purity after the above refolding and purification steps. No major contaminant bands should be observed from Commassie blue stained 16% SDS-PAGE gel when 5 μg of purified protein is loaded. The purified protein can also be tested for endotoxin/LPS contamination, and typically the LPS content is less than 0.1 ng/ml according to LAL assays.

### Example 7

### Cloning and Expression of a Polypeptide in a Baculovirus Expression System

[0888] In this example, the plasmid shuttle vector pA2 is used to insert a polynucleotide into a baculovirus to express a polypeptide. This expression vector contains the strong polyhedrin promoter of the Autographa californica nuclear polyhedrosis virus (AcMNPV) followed by convenient restriction sites such as BamHI, Xba I and Asp718. The polyadenylation site of the simian virus 40 (“SV40”) is used for efficient polyadenylation. For easy selection of recombinant virus, the plasmid contains the beta-galactosidase gene from E. coli under control of a weak Drosophila promoter in the same orientation, followed by the polyadenylation signal of the polyhedrin gene. The inserted genes are flanked on both sides by viral sequences for cell-mediated homologous recombination with wild-type viral DNA to generate a viable virus that express the cloned polynucleotide.

[0889] Many other baculovirus vectors can be used in place of the vector above, such as pAc373, pVL941, and pAcIM1, as one skilled in the art would readily appreciate, as long as the construct provides appropriately located signals for transcription, translation, secretion and the like, including a signal peptide and an in-frame AUG as required. Such vectors are described, for instance, in Luckow et al., Virology 170:31-39 (1989).

[0890] Specifically, the cDNA sequence contained in the deposited clone, including the AUG initiation codon, is amplified using the PCR protocol described in Example 1. If a naturally occurring signal sequence is used to produce the polypeptide of the present invention, the pA2 vector does not need a second signal peptide. Alternatively, the vector can be modified (pA2 GP) to include a baculovirus leader sequence, using the standard methods described in Summers et al., “A Manual of Methods for Baculovirus Vectors and Insect Cell Culture Procedures,” Texas Agricultural Experimental Station Bulletin No. 1555 (1987).

[0891] The amplified fragment is isolated from a 1% agarose gel using a commercially available kit (“Geneclean,” BIO 101 Inc., La Jolla, Calif.). The fragment then is digested with appropriate restriction enzymes and again purified on a 1% agarose gel.

[0892] The plasmid is digested with the corresponding restriction enzymes and optionally, can be dephosphorylated using calf intestinal phosphatase, using routine procedures known in the art. The DNA is then isolated from a 1% agarose gel using a commercially available kit (“Geneclean” BIO 101 Inc., La Jolla, Calif.).

[0893] The fragment and the dephosphorylated plasmid are ligated together with T4 DNA ligase. E. coli BB101 or other suitable E. coli hosts such as XL-1 Blue (Stratagene Cloning Systems, La Jolla, Calif.) cells are transformed with the ligation mixture and spread on culture plates. Bacteria containing the plasmid are identified by digesting DNA from individual colonies and analyzing the digestion product by gel electrophoresis. The sequence of the cloned fragment is confirmed by DNA sequencing.

[0894] Five μg of a plasmid containing the polynucleotide is co-transfected with 1.0 μg of a commercially available linearized baculovirus DNA (“BaculoGold™ baculovirus DNA, Pharmingen, San Diego, Calif.), using the lipofection method described by Felgner et al., Proc. Natl. Acad. Sci. USA 84:7413-7417 (1987). One μg of BaculoGold™ virus DNA and 5 μg of the plasmid are mixed in a sterile well of a microtiter plate containing 50 μl of serum-free Grace's medium (Life Technologies Inc., Gaithersburg, Md.). Afterwards, 10 μl Lipofectin plus 90 μl Grace's medium are added, mixed and incubated for 15 minutes at room temperature. Then the transfection mixture is added drop-wise to Sf9 insect cells (ATCC CRL 1711) seeded in a 35 mm tissue culture plate with 1 ml Grace's medium without serum. The plate is then incubated for 5 hours at 27° C. The transfection solution is then removed from the plate and 1 ml of Grace's insect medium supplemented with 10% fetal calf serum is added. Cultivation is then continued at 27° C. for four days.

[0895] After four days the supernatant is collected and a plaque assay is performed, as described by Summers and Smith, supra. An agarose gel with “Blue Gal” (Life Technologies Inc., Gaithersburg) is used to allow easy identification and isolation of gal-expressing clones, which produce blue-stained plaques. (A detailed description of a “plaque assay” of this type can also be found in the user's guide for insect cell culture and baculovirology distributed by Life Technologies Inc., Gaithersburg, page 9-10.) After appropriate incubation, blue stained plaques are picked with the tip of a micropipettor (e.g., Eppendorf). The agar containing the recombinant viruses is then resuspended in a microcentrifuge tube containing 200 μl of Grace's medium and the suspension containing the recombinant baculovirus is used to infect Sf9 cells seeded in 35 mm dishes. Four days later the supernatants of these culture dishes are harvested and then they are stored at 4° C.

[0896] To verify the expression of the polypeptide, Sf9 cells are grown in Grace's medium supplemented with 10% heat-inactivated FBS. The cells are infected with the recombinant baculovirus containing the polynucleotide at a multiplicity of infection (“MOI”) of about 2. If radiolabeled proteins are desired, 6 hours later the medium is removed and is replaced with SF900 II medium minus methionine and cysteine (available from Life Technologies Inc., Rockville, Md.). After 42 hours: 5 μCi of ³⁵S-methionine and 5 μCi ³⁵S-cysteine (available from Amersham) are added. The cells are further incubated for 16 hours and then are harvested by centrifugation. The proteins in the supernatant as well as the intracellular proteins are analyzed by SDS-PAGE followed by autoradiography (if radiolabeled).

[0897] Microsequencing of the amino acid sequence of the amino terminus of purified protein may be used to determine the amino terminal sequence of the produced protein.

### Example 8

### Expression of a Polypeptide in Mammalian Cells

[0898] The polypeptide of the present invention can be expressed in a mammalian cell. A typical mammalian expression vector contains a promoter element, which mediates the initiation of transcription of mRNA, a protein coding sequence, and signals required for the termination of transcription and polyadenylation of the transcript. Additional elements include enhancers, Kozak sequences and intervening sequences flanked by donor and acceptor sites for RNA splicing. Highly efficient transcription is achieved with the early and late promoters from SV40, the long terminal repeats (LTRs) from Retroviruses, e.g., RSV, HTLVI, HIVI and the early promoter of the cytomegalovirus (CMV). However, cellular elements can also be used (e.g., the human actin promoter).

[0899] Suitable expression vectors for use in practicing the present invention include, for example, vectors such as pSVL and pMSG (Pharmacia, Uppsala, Sweden), pRSVcat (ATCC 37152), pSV2dhfr (ATCC 37146), pBC12MI (ATCC 67109), pCMVSport 2.0, and pCMVSport 3.0. Mammalian host cells that could be used include, human Hela, 293, H9 and Jurkat cells, mouse NIH3T3 and C127 cells, Cos 1, Cos 7 and CV1, quail QC1-3 cells, mouse L cells and Chinese hamster ovary (CHO) cells.

[0900] Alternatively, the polypeptide can be expressed in stable cell lines containing the polynucleotide integrated into a chromosome. The co-transfection with a selectable marker such as DHFR, gpt, neomycin, or hygromycin allows the identification and isolation of the transfected cells.

[0901] The transfected gene can also be amplified to express large amounts of the encoded protein. The DHFR (dihydrofolate reductase) marker is useful in developing cell lines that carry several hundred or even several thousand copies of the gene of interest. (See, e.g., Alt, F. W., et al., J. Biol. Chem. 253:1357-1370 (1978); Hamlin, J. L. and Ma, C., Biochem. et Biophys. Acta, 1097:107-143 (1990); Page, M. J. and Sydenham, M. A., Biotechnology 9:64-68 (1991)). Another useful selection marker is the enzyme glutamine synthase (GS) (Murphy et al., Biochem J. 227:277-279 (1991); Bebbington et al., Bio/Technology 10:169-175 (1992). Using these markers, the mammalian cells are grown in selective medium and the cells with the highest resistance are selected. These cell lines contain the amplified gene(s) integrated into a chromosome. Chinese hamster ovary (CHO) and NSO cells are often used for the production of proteins.

[0902] Derivatives of the plasmid pSV2-dhfr (ATCC Accession No. 37146), the expression vectors pC4 (ATCC Accession No. 209646) and pC6 (ATCC Accession No. 209647) contain the strong promoter (LTR) of the Rous Sarcoma Virus (Cullen et al., Molecular and Cellular Biology, 438-447 (March, 1985)) plus a fragment of the CMV-enhancer (Boshart et al., Cell 41:521-530 (1985)). Multiple cloning sites, e.g., with the restriction enzyme cleavage sites BamII, XbaI and Asp718, facilitate the cloning of the gene of interest. The vectors also contain the 3′ intron, the polyadenylation and termination signal of the rat preproinsulin gene, and the mouse DHFR gene under control of the SV40 early promoter.

[0903] Specifically, the plasmid pC6, for example, is digested with appropriate restriction enzymes and then dephosphorylated using calf intestinal phosphates by procedures known in the art. The vector is then isolated from a 1% agarose gel.

[0904] A polynucleotide of the present invention is amplified according to the protocol outlined in Example 1. If a naturally occurring signal sequence is used to produce the polypeptide of the present invention, the vector does not need a second signal peptide. Alternatively, if a naturally occurring signal sequence is not used, the vector can be modified to include a heterologous signal sequence. (See, e.g., International Publication No. WO 96/34891.)

[0905] The amplified fragment is isolated from a 1% agarose gel using a commercially available kit (“Geneclean,” BIO 101 Inc., La Jolla, Calif.). The fragment then is digested with appropriate restriction enzymes and again purified on a 1% agarose gel.

[0906] The amplified fragment is then digested with the same restriction enzyme and purified on a 1% agarose gel. The isolated fragment and the dephosphorylated vector are then ligated with T4 DNA ligase. E. coli HB101 or XL-1 Blue cells are then transformed and bacteria are identified that contain the fragment inserted into plasmid pC6 using, for instance, restriction enzyme analysis.

[0907] Chinese hamster ovary cells lacking an active DHFR gene is used for transfection. Five μg of the expression plasmid pC6 or pC4 is cotransfected with 0.5 μg of the plasmid pSVneo using lipofectin (Felgner et al., supra). The plasmid pSV2-neo contains a dominant selectable marker, the neo gene from Tn5 encoding an enzyme that confers resistance to a group of antibiotics including G418. The cells are seeded in alpha minus MEM supplemented with 1 mg/ml G418. After 2 days, the cells are trypsinized and seeded in hybridoma cloning plates (Greiner, Germany) in alpha minus MEM supplemented with 10, 25, or 50 ng/ml of methotrexate plus 1 mg/ml G418. After about 10-14 days single clones are trypsinized and then seeded in 6-well petri dishes or 10 ml flasks using different concentrations of methotrexate (50 nM, 100 nM, 200 nM, 400 nM, 800 nM). Clones growing at the highest concentrations of methotrexate are then transferred to new 6-well plates containing even higher concentrations of methotrexate (1 μM, 2 μM, 5 μM, 10 mM, 20 mM). The same procedure is repeated until clones are obtained which grow at a concentration of 100-200 μM. Expression of the desired gene product is analyzed, for instance, by SDS-PAGE and Western blot or by reversed phase HPLC analysis.

### Example 9

### Protein Fusions

[0908] The polypeptides of the present invention are preferably fused to other proteins. These fusion proteins can be used for a variety of applications. For example, fusion of the present polypeptides to His-tag, HA-tag, protein A, IgG domains, and maltose binding protein facilitates purification. (See Example 5; see also EP A 394,827; Traunecker, et al., Nature 331:84-86 (1988)). Similarly, fusion to IgG-1, IgG-3, and albumin increases the halflife time in vivo. Nuclear localization signals fused to the polypeptides of the present invention can target the protein to a specific subcellular localization, while covalent heterodimer or homodimers can increase or decrease the activity of a fusion protein. Fusion proteins can also create chimeric molecules having more than one function. Finally, fusion proteins can increase solubility and/or stability of the fused protein compared to the non-fused protein. All of the types of fusion proteins described above can be made by modifying the following protocol, which outlines the fusion of a polypeptide to an IgG molecule, or the protocol described in Example 5.

[0909] Briefly, the human Fc portion of the IgG molecule can be PCR amplified, using primers that span the 5′ and 3′ ends of the sequence described below. These primers also should have convenient restriction enzyme sites that will facilitate cloning into an expression vector, preferably a mammalian expression vector.

[0910] For example, if pC4 (ATCC Accession No. 209646) is used, the human Fc portion can be ligated into the BamHI cloning site. Note that the 3′ BamHI site should be destroyed. Next, the vector containing the human Fc portion is re-restricted with BamHI, linearizing the vector, and a polynucleotide of the present invention, isolated by the PCR protocol described in Example 1, is ligated into this BamHI site. Note that the polynucleotide is cloned without a stop codon, otherwise a fusion protein will not be produced.

[0911] If the naturally occurring signal sequence is used to produce the polypeptide of the present invention, pC4 does not need a second signal peptide. Alternatively, if the naturally occurring signal sequence is not used, the vector can be modified to include a heterologous signal sequence. (See, e.g., International Publication No. WO 96/34891.)

### Example 10

### Production of an Antibody from a Polypeptide

[0912] a) Hybridoma Technology

[0913] The antibodies of the present invention can be prepared by a variety of methods. (See, Current Protocols, Chapter 2.) As one example of such methods, cells expressing a polypeptide of the present invention are administered to an animal to induce the production of sera containing polyclonal antibodies. In a preferred method, a preparation of a polypeptide of the present invention is prepared and purified to render it substantially free of natural contaminants. Such a preparation is then introduced into an animal in order to produce polyclonal antisera of greater specific activity.

[0914] Monoclonal antibodies specific for a polypeptide of the present invention are prepared using hybridoma technology (Kohler et al., Nature 256:495 (1975); Kohler et al., Eur. J. Immunol. 6:511 (1976); Kohler et al., Eur. J. Immunol. 6:292 (1976); Hammerling et al., in: Monoclonal Antibodies and T-Cell Hybridomas, Elsevier, N.Y., pp. 563-681 (1981)). In general, an animal (preferably a mouse) is immunized with a polypeptide of the present invention or, more preferably, with a secreted polypeptide-expressing cell. Such polypeptide-expressing cells are cultured in any suitable tissue culture medium, preferably in Earle's modified Eagle's medium supplemented with 10% fetal bovine serum (inactivated at about 56° C.), and supplemented with about 10 g/l of nonessential amino acids, about 1,000 U/ml of penicillin, and about 100 μg/ml of streptomycin.

[0915] The splenocytes of such mice are extracted and fused with a suitable myeloma cell line. Any suitable myeloma cell line may be employed in accordance with the present invention; however, it is preferable to employ the parent myeloma cell line (SP2O), available from the ATCC. After fusion, the resulting hybridoma cells are selectively maintained in HAT medium, and then cloned by limiting dilution as described by Wands et al. (Gastroenterology 80:225-232 (1981)). The hybridoma cells obtained through such a selection are then assayed to identify clones which secrete antibodies capable of binding the polypeptide of the present invention.

[0916] Alternatively, additional antibodies capable of binding to a polypeptide of the present invention can be produced in a two-step procedure using anti-idiotypic antibodies. Such a method makes use of the fact that antibodies are themselves antigens, and therefore, it is possible to obtain an antibody which binds to a second antibody. In accordance with this method, protein specific antibodies are used to immunize an animal, preferably a mouse. The splenocytes of such an animal are then used to produce hybridoma cells, and the hybridoma cells are screened to identify clones which produce an antibody whose ability to bind to the polypeptide-specific antibody can be blocked by said polypeptide. Such antibodies comprise anti-idiotypic antibodies to the polypeptide-specific antibody and are used to immunize an animal to induce formation of further polypeptide-specific antibodies.

[0917] For in vivo use of antibodies in humans, an antibody is “humanized”. Such antibodies can be produced using genetic constructs derived from hybridoma cells producing the monoclonal antibodies described above. Methods for producing chimeric and humanized antibodies are known in the art and are discussed herein. (See, for review, Morrison, Science 229:1202 (1985); Oi et al., BioTechniques 4:214 (1986); Cabilly et al., U.S. Pat. No. 4,816,567; Taniguchi et al., EP 171496; Morrison et al., EP 173494; Neuberger et al., WO 8601533; Robinson et al., International Publication No. WO 8702671; Boulianne et al., Nature 312:643 (1984); Neuberger et al., Nature 314:268 (1985)).

[0918] b) Isolation of Antibody Fragments Directed Against a Polypeptide of the Present Invention from a Library of scFvs

[0919] Naturally occurring V-genes isolated from human PBLs are constructed into a library of antibody fragments which contain reactivities against a polypeptide of the present invention to which the donor may or may not have been exposed (see e.g., U.S. Pat. No. 5,885,793 incorporated herein by reference in its entirety).

[0920] Rescue of the Library. A library of scFvs is constructed from the RNA of human PBLs as described in International Publication No. WO 92/01047. To rescue phage displaying antibody fragments, approximately 10⁹ E. coli harboring the phagemid are used to inoculate 50 ml of 2×TY containing 1% glucose and 100 μg/ml of ampicillin (2×TY-AMP-GLU) and grown to an O.D. of 0.8 with shaking. Five ml of this culture is used to inoculate 50 ml of 2×TY-AMP-GLU, 2×108 TU of delta gene 3 helper (M13 delta gene III, see International Publication No. WO 92/01047) are added and the culture incubated at 37° C. for 45 minutes without shaking and then at 37° C. for 45 minutes with shaking. The culture is centrifuged at 4000 r.p.m. for 10 min. and the pellet resuspended in 2 liters of 2×TY containing 100 μg/ml ampicillin and 50 ug/ml kanamycin and grown overnight. Phage are prepared as described in International Publication No. WO 92/01047.

[0921] M13 delta gene III is prepared as follows: M13 delta gene III helper phage does not encode gene III protein, hence the phage(mid) displaying antibody fragments have a greater avidity of binding to antigen. Infectious M13 delta gene III particles are made by growing the helper phage in cells harboring a pUC19 derivative supplying the wild type gene III protein during phage morphogenesis. The culture is incubated for 1 hour at 37° C. without shaking and then for a further hour at 37° C. with shaking. Cells are spun down (IEC-Centra 8,400 r.p.m. for 10 min), resuspended in 300 ml 2×TY broth containing 100 μg ampicillin/ml and 25 μg kanamycin/ml (2×TY-AMP-KAN) and grown overnight, shaking at 37° C. Phage particles are purified and concentrated from the culture medium by two PEG-precipitations (Sambrook et al., 1990), resuspended in 2 ml PBS and passed through a 0.45 μm filter (Minisart NML; Sartorius) to give a final concentration of approximately 1013 transducing units/ml (ampicillin-resistant clones).

[0922] Panning of the Library. Immunotubes (Nunc) are coated overnight in PBS with 4 ml of either 100 μg/ml or 10 μg/ml of a polypeptide of the present invention. Tubes are blocked with 2% Marvel-PBS for 2 hours at 37° C. and then washed 3 times in PBS. Approximately 10¹³ TU of phage is applied to the tube and incubated for 30 minutes at room temperature tumbling on an over and under turntable and then left to stand for another 1.5 hours. Tubes are washed 10 times with PBS 0.1% Tween-20 and 10 times with PBS. Phage are eluted by adding 1 ml of 100 mM triethylamine and rotating 15 minutes on an under and over turntable after which the solution is immediately neutralized with 0.5 ml of 1.0M Tris-HCl, pH 7.4. Phage are then used to infect 10 ml of mid-log E. coli TG1 by incubating eluted phage with bacteria for 30 minutes at 37° C. The E. coli are then plated on TYE plates containing 1% glucose and 100 μg/ml ampicillin. The resulting bacterial library is then rescued with delta gene 3 helper phage as described above to prepare phage for a subsequent round of selection. This process is then repeated for a total of 4 rounds of affinity purification with tube-washing increased to 20 times with PBS, 0.1% Tween-20 and 20 times with PBS for rounds 3 and 4.

[0923] Characterization of Binders. Eluted phage from the 3rd and 4th rounds of selection are used to infect E. coli BB 2151 and soluble scFv is produced Marks, et al., 1991) from single colonies for assay. ELISAs are performed with microtitre plates coated with either 10 pg/ml of the polypeptide of the present invention in 50 mM bicarbonate pH 9.6. Clones positive in ELISA are further characterized by PCR fingerprinting (see, e.g., International Publication No. WO 92/01047) and then by sequencing. These ELISA positive clones may also be further characterized by techniques known in the art, such as, for example, epitope mapping, binding affinity, receptor signal transduction, ability to block or competitively inhibit antibody/antigen binding, and competitive agonistic or antagonistic activity.

### Example 11

### Method of Determining Alterations in a Gene Corresponding to a Polynucleotide

[0924] RNA isolated from entire families or individual patients presenting with cancer or a hyperproliferative disease or disorder is isolated. cDNA is then generated from these RNA samples using protocols known in the art. (See, Sambrook.) The cDNA is then used as a template for PCR, employing primers surrounding regions of interest in SEQ ID NO:X; and/or the nucleotide sequence of the cDNA contained in ATCC Deposit No:Z. Suggested PCR conditions consist of 35 cycles at 95 degrees C. for 30 seconds; 60-120 seconds at 52-58 degrees C.; and 60-120 seconds at 70 degrees C., using buffer solutions described in Sidransky et al., Science 252:706 (1991).

[0925] PCR products are then sequenced using primers labeled at their 5′ end with T4 polynucleotide kinase, employing SequiTherm Polymerase (Epicentre Technologies). The intron-exon boundaries of selected exons is also determined and genomic PCR products analyzed to confirm the results. PCR products harboring suspected mutations are then cloned and sequenced to validate the results of the direct sequencing.

[0926] PCR products are cloned into T-tailed vectors as described in Holton et al., Nucleic Acids Research, 19:1156 (1991) and sequenced with T7 polymerase (United States Biochemical). Affected individuals are identified by mutations not present in unaffected individuals.

[0927] Genomic rearrangements are also observed as a method of determining alterations in a gene corresponding to a polynucleotide. Genomic clones isolated according to Example 2 are nick-translated with digoxigenindeoxy-uridine 5′-triphosphate (Boehringer Manheim), and FISH performed as described in Johnson et al., Methods Cell Biol. 35:73-99 (1991). Hybridization with the labeled probe is carried out using a vast excess of human cot-1 DNA for specific hybridization to the corresponding genomic locus.

[0928] Chromosomes are counterstained with 4,6-diamino-2-phenylidole and propidium iodide, producing a combination of C- and R-bands. Aligned images for precise mapping are obtained using a triple-band filter set (Chroma Technology, Brattleboro, Vt.) in combination with a cooled charge-coupled device camera (Photometrics, Tucson, Ariz.) and variable excitation wavelength filters. (Johnson et al., Genet. Anal. Tech. Appl., 8:75 (1991)). Image collection, analysis and chromosomal fractional length measurements are performed using the ISee Graphical Program System. (Inovision Corporation, Durham, N.C.) Chromosome alterations of the genomic region hybridized by the probe are identified as insertions, deletions, and translocations. These alterations are used as a diagnostic marker for an associated disease.

### Example 12

### Method of Detecting Abnormal Levels of a Polypeptide in a Biological Sample

[0929] A polypeptide of the present invention can be detected in a biological sample, and if an increased or decreased level of the polypeptide is detected, this polypeptide is a marker for a particular phenotype. Methods of detection are numerous, and thus, it is understood that one skilled in the art can modify the following assay to fit their particular needs.

[0930] For example, antibody-sandwich ELISAs are used to detect polypeptides in a sample, preferably a biological sample. Wells of a microtiter plate are coated with specific antibodies, at a final concentration of 0.2 to 10 ug/ml. The antibodies are either monoclonal or polyclonal and are produced by the method described in Example 10. The wells are blocked so that non-specific binding of the polypeptide to the well is reduced.

[0931] The coated wells are then incubated for >2 hours at RT with a sample containing the polypeptide. Preferably, serial dilutions of the sample should be used to validate results. The plates are then washed three times with deionized or distilled water to remove unbound polypeptide.

[0932] Next, 50 ul of specific antibody-alkaline phosphatase conjugate, at a concentration of 25-400 ng, is added and incubated for 2 hours at room temperature. The plates are again washed three times with deionized or distilled water to remove unbound conjugate.

[0933] Add 75 ul of 4-methylumbelliferyl phosphate (MUP) or p-nitrophenyl phosphate (NPP) substrate solution to each well and incubate 1 hour at room temperature. Measure the reaction by a microtiter plate reader. Prepare a standard curve, using serial dilutions of a control sample, and plot polypeptide concentration on the X-axis (log scale) and fluorescence or absorbance of the Y-axis (linear scale). Interpolate the concentration of the polypeptide in the sample using the standard curve.

### Example 13

### Formulation

[0934] The invention also provides methods of preventing, treating and/or ameliorating cancer or other hyperproliferative disorders by administration to a subject of an effective amount of a Therapeutic. By therapeutic is meant polynucleotides or polypeptides of the invention (including fragments and variants), agonists or antagonists thereof, and/or antibodies thereto, in combination with a pharmaceutically acceptable carrier type (e.g., a sterile carrier).

[0935] The Therapeutic will be formulated and dosed in a fashion consistent with good medical practice, taking into account the clinical condition of the individual patient (especially the side effects of treatment with the Therapeutic alone), the site of delivery, the method of administration, the scheduling of administration, and other factors known to practitioners. The “effective amount” for purposes herein is thus determined by such considerations.

[0936] As a general proposition, the total pharmaceutically effective amount of the Therapeutic administered parenterally per dose will be in the range of about 1 ug/kg/day to 10 mg/kg/day of patient body weight, although, as noted above, this will be subject to therapeutic discretion. More preferably, this dose is at least 0.01 mg/kg/day, and most preferably for humans between about 0.01 and 1 mg/kg/day for the hormone. If given continuously, the Therapeutic is typically administered at a dose rate of about 1 ug/kg/hour to about 50 ug/kg/hour, either by 14 injections per day or by continuous subcutaneous infusions, for example, using a mini-pump. An intravenous bag solution may also be employed. The length of treatment needed to observe changes and the interval following treatment for responses to occur appears to vary depending on the desired effect.

[0937] Therapeutics can be are administered orally, rectally, parenterally, intracistemally, intravaginally, intraperitoneally, topically (as by powders, ointments, gels, drops or transdermal patch), bucally, or as an oral or nasal spray. “Pharmaceutically acceptable carrier” refers to a non-toxic solid, semisolid or liquid filler, diluent, encapsulating material or formulation auxiliary of any. The term “parenteral” as used herein refers to modes of administration which include intravenous, intramuscular, intraperitoneal, intrasternal, subcutaneous and intraarticular injection and infusion.

[0938] Therapeutics of the invention are also suitably administered by sustained-release systems. Suitable examples of sustained-release Therapeutics are administered orally, rectally, parenterally, intracistemally, intravaginally, intraperitoneally, topically (as by powders, ointments, gels, drops or transdermal patch), bucally, or as an oral or nasal spray. “Pharmaceutically acceptable carrier” refers to a non-toxic solid, semisolid or liquid filler, diluent, encapsulating material or formulation auxiliary of any type. The term “parenteral” as used herein refers to modes of administration which include intravenous, intramuscular, intraperitoneal, intrasternal, subcutaneous and intraarticular injection and infusion.

[0939] Therapeutics of the invention are also suitably administered by sustained-release systems. Suitable examples of sustained-release Therapeutics include suitable polymeric materials (such as, for example, semi-permeable polymer matrices in the form of shaped articles, e.g., films, or mirocapsules), suitable hydrophobic materials (for example as an emulsion in an acceptable oil) or ion exchange resins, and sparingly soluble derivatives (such as, for example, a sparingly soluble salt).

[0940] Sustained-release matrices include polylactides (U.S. Pat. No. 3,773,919, EP 58,481), copolymers of L-glutamic acid and gamma-ethyl-L-glutamate (Sidman et al., Biopolymers 22:547-556 (1983)), poly(2-hydroxyethyl methacrylate) (Langer et al., J. Biomed. Mater. Res. 15:167-277 (1981), and Langer, Chem. Tech. 12:98-105 (1982)), ethylene vinyl acetate (Langer et al., Id.) or poly-D-(−)-3-hydroxybutyric acid (EP 133,988).

[0941] In a preferred embodiment, polypeptide, polynucleotide, and antibody compositions of the invention are formulated in a biodegradable, polymeric drug delivery system, for example as described in U.S. Pat. Nos. 4,938,763; 5,278,201; 5,278,202; 5,324,519; 5,340,849; and 5,487,897 and in International Publication Numbers WO01/35929, WO00/24374, and WO00/06117 which are hereby incorporated by reference in their entirety. In specific preferred embodiments the polypeptide, polynucleotide, and antibody compositions of the invention are formulated using the ATRIGEL® Biodegradable System of Atrix Laboratories, Inc. (Fort Collins, Colo.).

[0942] Examples of biodegradable polymers which can be used in the formulation of polypeptide, polynucleotide, and antibody compositions, include but are not limited to, polylactides, polyglycolides, polycaprolactones, polyanhydrides, polyamides, polyurethanes, polyesteramides, polyorthoesters, polydioxanones, polyacetals, polyketals, polycarbonates, polyorthocarbonates, polyphosphazenes, polyhydroxybutyrates, polyhydroxyvalerates, polyalkylene oxalates, polyalkylene succinates, poly(malic acid), poly(amino acids), poly(methyl vinyl ether), poly(maleic anhydride), polyvinylpyrrolidone, polyethylene glycol, polyhydroxycellulose, chitin, chitosan, and copolymers, terpolymers, or combinations or mixtures of the above materials. The preferred polymers are those that have a lower degree of crystallization and are more hydrophobic. These polymers and copolymers are more soluble in the biocompatible solvents than the highly crystalline polymers such as polyglycolide and chitin which also have a high degree of hydrogen-bonding. Preferred materials with the desired solubility parameters are the polylactides, polycaprolactones, and copolymers of these with glycolide in which there are more amorphous regions to enhance solubility. In specific preferred embodiments, the biodegradable polymers which can be used in the formulation of polypeptide, polynucleotide, and antibody compositions are poly(lactide-co-glycolides). Polymer properties such as molecular weight, hydrophobicity, and lactide/glycolide ratio may be modified to obtain the desired polypeptide, polynucleotide, or antibody release profile (See, e.g., Ravivarapu et al., Journal of Pharmaceutical Sciences 89:732-741 (2000), which is hereby incorporated by reference in its entirety).

[0943] It is also preferred that the solvent for the biodegradable polymer be non-toxic, water miscible, and otherwise biocompatible. Examples of such solvents include, but are not limited to, N-methyl-2-pyrrolidone, 2-pyrrolidone, C2 to C6 alkanols, C1 to C15 alchohols, dils, triols, and tetraols such as ethanol, glycerine propylene glycol, butanol; C3 to C15 alkyl ketones such as acetone, diethyl ketone and methyl ethyl ketone; C3 to C15 esters such as methyl acetate, ethyl acetate, ethyl lactate; alkyl ketones such as methyl ethyl ketone, C1 to C15 amides such as dimethylformamide, dimethylacetamide and caprolactam; C3 to C20 ethers such as tetrahydrofuran, or solketal; tweens, triacetin, propylene carbonate, decylmethylsulfoxide, dimethyl sulfoxide, oleic acid, 1-dodecylazacycloheptan-2-one, Other preferred solvents are benzyl alchohol, benzyl benzoate, dipropylene glycol, tributyrin, ethyl oleate, glycerin, glycofural, isopropyl myristate, isopropyl palmitate, oleic acid, polyethylene glycol, propylene carbonate, and triethyl citrate. The most preferred solvents are N-methyl-2-pyrrolidone, 2-pyrrolidone, dimethyl sulfoxide, triacetin, and propylene carbonate because of the solvating ability and their compatibility.

[0944] Additionally, formulations comprising polypeptide, polynucleotide, and antibody compositions and a biodegradable polymer may also include release-rate modification agents and/or pore-forming agents. Examples of release-rate modification agents include, but are not limited to, fatty acids, triglycerides, other like hydrophobic compounds, organic solvents, plasticizing compounds and hydrophilic compounds. Suitable release rate modification agents include, for example, esters of mono-, di-, and tricarboxylic acids, such as 2-ethoxyethyl acetate, methyl acetate, ethyl acetate, diethyl phthalate, dimethyl phthalate, dibutyl phthalate, dimethyl adipate, dimethyl succinate, dimethyl oxalate, dimethyl citrate, triethyl citrate, acetyl tributyl citrate, acetyl triethyl citrate, glycerol triacetate, di(n-butyl)sebecate, and the like; polyhydroxy alcohols, such as propylene glycol, polyethylene glycol, glycerin, sorbitol, and the like; fatty acids; triesters of glycerol, such as triglycerides, epoxidized soybean oil, and other epoxidized vegetable oils; sterols, such as cholesterol; alcohols, such as C.sub.6-C.sub.12 alkanols, 2-ethoxyethanol. The release rate modification agent may be used singly or in combination with other such agents. Suitable combinations of release rate modification agents include, but are not limited to, glycerin/propylene glycol, sorbitol/glycerine, ethylene oxide/propylene oxide, butylene glycol/adipic acid, and the like. Preferred release rate modification agents include, but are not limited to, dimethyl citrate, triethyl citrate, ethyl heptanoate, glycerin, and hexanediol. Suitable pore-forming agents that may be used in the polymer composition include, but are not limited to, sugars such as sucrose and dextrose, salts such as sodium chloride and sodium carbonate, polymers such as hydroxylpropylcellulose, carboxymethylcellulose, polyethylene glycol, and polyvinylpyrrolidone. Solid crystals that will provide a defined pore size, such as salt or sugar, are preferred.

[0945] In specific preferred embodiments the polypeptide, polynucleotide, and antibody compositions of the invention are formulated using the BEMA™ BioErodible Mucoadhesive System, MCA™ MucoCutaneous Absorption System, SMP™ Solvent MicroParticle System, or BCP™ BioCompatible Polymer System of Atrix Laboratories, Inc. (Fort Collins, Colo.).

[0946] Sustained-release Therapeutics also include liposomally entrapped Therapeutics of the invention (see generally, Langer, Science 249:1527-1533 (1990); Treat et al., in Liposomes in the Therapy of Infectious Disease and Cancer, Lopez-Berestein and Fidler (eds.), Liss, New York, pp. 317-327 and 353-365 (1989)). Liposomes containing the Therapeutic are prepared by methods known per se: DE 3,218,121; Epstein et al., Proc. Natl. Acad. Sci. (USA) 82:3688-3692 (1985); Hwang et al., Proc. Natl. Acad. Sci. (USA) 77:4030-4034 (1980); EP 52,322; EP 36,676; EP 88,046; EP 143,949; EP 142,641; Japanese Pat. Appl. 83-118008; U.S. Pat. Nos. 4,485,045 and 4,544,545; and EP 102,324. Ordinarily, the liposomes are of the small (about 200-800 Angstroms) unilamellar type in which the lipid content is greater than about 30 mol. percent cholesterol, the selected proportion being adjusted for the optimal Therapeutic.

[0947] In yet an additional embodiment, the Therapeutics of the invention are delivered by way of a pump (see Langer, supra; Sefton, CRC Crit. Ref. Biomed. Eng. 14:201 (1987); Buchwald et al., Surgery 88:507 (1980); Saudek et al., N. Engl. J. Med. 321:574 (1989)).

[0948] Other controlled release systems are discussed in the review by Langer (Science 249:1527-1533 (1990)).

[0949] For parenteral administration, in one embodiment, the Therapeutic is formulated generally by mixing it at the desired degree of purity, in a unit dosage injectable form (solution, suspension, or emulsion), with a pharmaceutically acceptable carrier, i.e., one that is non-toxic to recipients at the dosages and concentrations employed and is compatible with other ingredients of the formulation. For example, the formulation preferably does not include oxidizing agents and other compounds that are known to be deleterious to the Therapeutic.

[0950] Generally, the formulations are prepared by contacting the Therapeutic uniformly and intimately with liquid carriers or finely divided solid carriers or both. Then, if necessary, the product is shaped into the desired formulation. Preferably the carrier is a parenteral carrier, more preferably a solution that is isotonic with the blood of the recipient. Examples of such carrier vehicles include water, saline, Ringer's solution, and dextrose solution. Non-aqueous vehicles such as fixed oils and ethyl oleate are also useful herein, as well as liposomes.

[0951] The carrier suitably contains minor amounts of additives such as substances that enhance isotonicity and chemical stability. Such materials are non-toxic to recipients at the dosages and concentrations employed, and include buffers such as phosphate, citrate, succinate, acetic acid, and other organic acids or their salts; antioxidants such as ascorbic acid; low molecular weight (less than about ten residues) polypeptides, e.g., polyarginine or tripeptides; proteins, such as serum albumin, gelatin, or immunoglobulins; hydrophilic polymers such as polyvinylpyrrolidone; amino acids, such as glycine, glutamic acid, aspartic acid, or arginine; monosaccharides, disaccharides, and other carbohydrates including cellulose or its derivatives, glucose, manose, or dextrins; chelating agents such as EDTA; sugar alcohols such as mannitol or sorbitol; counterions such as sodium; and/or nonionic surfactants such as polysorbates, poloxamers, or PEG.

[0952] The Therapeutic is typically formulated in such vehicles at a concentration of about 0.1 mg/ml to 100 mg/ml, preferably 1-10 mg/ml, at a pH of about 3 to 8. It will be understood that the use of certain of the foregoing excipients, carriers, or stabilizers will result in the formation of polypeptide salts.

[0953] Any pharmaceutical used for therapeutic administration can be sterile. Sterility is readily accomplished by filtration through sterile filtration membranes (e.g., 0.2 micron membranes). Therapeutics generally are placed into a container having a sterile access port, for example, an intravenous solution bag or vial having a stopper pierceable by a hypodermic injection needle.

[0954] Therapeutics ordinarily will be stored in unit or multi-dose containers, for example, sealed ampoules or vials, as an aqueous solution or as a lyophilized formulation for reconstitution. As an example of a lyophilized formulation, 10-ml vials are filled with 5 ml of sterile-filtered 1% (w/v) aqueous Therapeutic solution, and the resulting mixture is lyophilized. The infusion solution is prepared by reconstituting the lyophilized Therapeutic using bacteriostatic Water-for-Injection.

[0955] The invention also provides a pharmaceutical pack or kit comprising one or more containers filled with one or more of the ingredients of the Therapeutics of the invention. Associated with such container(s) can be a notice in the form prescribed by a governmental agency regulating the manufacture, use or sale of pharmaceuticals or biological products, which notice reflects approval by the agency of manufacture, use or sale for human administration. In addition, the Therapeutics may be employed in conjunction with other therapeutic compounds.

[0956] The Therapeutics of the invention may be administered alone or in combination with adjuvants. Adjuvants that may be administered with the Therapeutics of the invention include, but are not limited to, alum, alum plus deoxycholate (ImmunoAg), MTP-PE (Biocine Corp.), QS21 (Genentech, Inc.), BCG (e.g., THERACYS®), MPL and nonviable prepartions of Corynebacterium parvum. In a specific embodiment, Therapeutics of the invention are administered in combination with alum. In another specific embodiment, Therapeutics of the invention are administered in combination with QS-21. Further adjuvants that may be administered with the Therapeutics of the invention include, but are not limited to, Monophosphoryl lipid immunomodulator, AdjuVax 100a, QS-21, QS-18, CRL1005, Aluminum salts, MF-59, and Virosomal adjuvant technology. Vaccines that may be administered with the Therapeutics of the invention include, but are not limited to, vaccines directed toward protection against MMR (measles, mumps, rubella), polio, varicella, tetanus/diptheria, hepatitis A, hepatitis B, haemophilus influenzae B, whooping cough, pneumonia, influenza, Lyme's Disease, rotavirus, cholera, yellow fever, Japanese encephalitis, poliomyelitis, rabies, typhoid fever, and pertussis. Combinations may be administered either concomitantly, e.g., as an admixture, separately but simultaneously or concurrently; or sequentially. This includes presentations in which the combined agents are administered together as a therapeutic mixture, and also procedures in which the combined agents are administered separately but simultaneously, e.g., as through separate intravenous lines into the same individual. Administration “in combination” further includes the separate administration of one of the compounds or agents given first, followed by the second.

[0957] The Therapeutics of the invention may be administered alone or in combination with other therapeutic agents. Therapeutic agents that may be administered in combination with the Therapeutics of the invention, include but not limited to, chemotherapeutic agents, antibiotics, steroidal and non-steroidal anti-inflammatories, conventional immunotherapeutic agents, and/or therapeutic treatments described below. Combinations may be administered either concomitantly, e.g., as an admixture, separately but simultaneously or concurrently; or sequentially. This includes presentations in which the combined agents are administered together as a therapeutic mixture, and also procedures in which the combined agents are administered separately but simultaneously, e.g., as through separate intravenous lines into the same individual. Administration “in combination” further includes the separate administration of one of the compounds or agents given first, followed by the second.

[0958] In one embodiment, the Therapeutics of the invention are administered in combination with an anticoagulant. Anticoagulants that may be administered with the compositions of the invention include, but are not limited to, heparin, low molecular weight heparin, warfarin sodium (e.g., COUMADIN®), dicumarol, 4-hydroxycoumarin, anisindione (e.g., MIRADON™), acenocoumarol (e.g., nicoumalone, SINTHROME™), indan-1,3-one, phenprocoumon (e.g., MARCUMAR™), ethyl biscoumacetate (e.g., TROMEXAN™), and aspirin. In a specific embodiment, compositions of the invention are administered in combination with heparin and/or warfarin. In another specific embodiment, compositions of the invention are administered in combination with warfarin. In another specific embodiment, compositions of the invention are administered in combination with warfarin and aspirin. In another specific embodiment, compositions of the invention are administered in combination with heparin. In another specific embodiment, compositions of the invention are administered in combination with heparin and aspirin.

[0959] In another embodiment, the Therapeutics of the invention are administered in combination with thrombolytic drugs. Thrombolytic drugs that may be administered with the compositions of the invention include, but are not limited to, plasminogen, lys-plasminogen, alpha2-antiplasmin, streptokinae (e.g., KABIKINASE™), antiresplace (e.g., EMINASE™), tissue plasminogen activator (t-PA, altevase, ACTIVASE™), urokinase (e.g., ABBOKINASE™), sauruplase, (Prourokinase, single chain urokinase), and aminocaproic acid (e.g., AMICAR™). In a specific embodiment, compositions of the invention are administered in combination with tissue plasminogen activator and aspirin.

[0960] In another embodiment, the Therapeutics of the invention are administered in combination with antiplatelet drugs. Antiplatelet drugs that may be administered with the compositions of the invention include, but are not limited to, aspirin, dipyridamole (e.g., PERSANTINE™), and ticlopidine (e.g., TICLID™).

[0961] In specific embodiments, the use of anti-coagulants, thrombolytic and/or antiplatelet drugs in combination with Therapeutics of the invention is contemplated for the detection, prevention, diagnosis, prognostication, treatment, and/or amelioration of thrombosis, arterial thrombosis, venous thrombosis, thromboembolism, pulmonary embolism, atherosclerosis, myocardial infarction, transient ischemic attack, unstable angina. In specific embodiments, the use of anticoagulants, thrombolytic drugs and/or antiplatelet drugs in combination with Therapeutics of the invention is contemplated for the prevention of occulsion of saphenous grafts, for reducing the risk of periprocedural thrombosis as might accompany angioplasty procedures, for reducing the risk of stroke in patients with atrial fibrillation including nonrheumatic atrial fibrillation, for reducing the risk of embolism associated with mechanical heart valves and or mitral valves disease. Other uses for the therapeutics of the invention, alone or in combination with antiplatelet, anticoagulant, and/or thrombolytic drugs, include, but are not limited to, the prevention of occlusions in extracorporeal devices (e.g., intravascular canulas, vascular access shunts in hemodialysis patients, hemodialysis machines, and cardiopulmonary bypass machines).

[0962] In certain embodiments, Therapeutics of the invention are administered in combination with antiretroviral agents, nucleoside/nucleotide reverse transcriptase inhibitors (NRTIs), non-nucleoside reverse transcriptase inhibitors (NNRTIs), and/or protease inhibitors (PIs). NRTIs that may be administered in combination with the Therapeutics of the invention, include, but are not limited to, RETROVIR™ (zidovudine/AZT), VIDEX™ (didanosine/ddI), HIVID™ (zalcitabine/ddC), ZERIT™ (stavudine/d4T), EPIVIR™ (lamivudine/3TC), and COMBIVIR™ (zidovudine/lamivudine). NNRTIs that may be administered in combination with the Therapeutics of the invention, include, but are not limited to, VIRAMUNE™ (nevirapine), RESCRIPTOR™ (delavirdine), and SUSTIVA™ (efavirenz). Protease inhibitors that may be administered in combination with the Therapeutics of the invention, include, but are not limited to, CRIXIVAN™ (indinavir), NORVIR™ (ritonavir), INVIRASE™ (saquinavir), and VIRACEPT™ (nelfinavir). In a specific embodiment, antiretroviral agents, nucleoside reverse transcriptase inhibitors, non-nucleoside reverse transcriptase inhibitors, and/or protease inhibitors may be used in any combination with Therapeutics of the invention to treat AIDS and/or to prevent or treat HIV infection.

[0963] Additional NRTIs include LODENOSINE™ (F-ddA; an acid-stable adenosine NRTI; Triangle/Abbott; COVIRACIL™ (emtricitabine/FTC; structurally related to lamivudine (3TC) but with 3- to 10-fold greater activity in vitro; Triangle/Abbott); dOTC (BCH-10652, also structurally related to lamivudine but retains activity against a substantial proportion of lamivudine-resistant isolates; Biochem Pharma); Adefovir (refused approval for anti-HIV therapy by FDA; Gilead Sciences); PREVEON® (Adefovir Dipivoxil, the active prodrug of adefovir; its active form is PMEA-pp); TENOFOVIR™ (bis-POC PMPA, a PMPA prodrug; Gilead); DAPD/DXG (active metabolite of DAPD; Triangle/Abbott); D-D4FC (related to 3TC, with activity against AZT/3TC-resistant virus); GW420867X (Glaxo Wellcome); ZIAGEN™ (abacavir/159U89; Glaxo Wellcome Inc.); CS-87 (3′azido-2′,3′-dideoxyuridine; WO 99/66936); and S-acyl-2-thioethyl (SATE)-bearing prodrug forms of β-L-FD4C and β-L-FddC (WO 98/17281).

[0964] Additional NNRTIs include COACTINON™ (Emivirine/MKC-442, potent NNRTI of the HEPT class; Triangle/Abbott); CAPRAVIRINE™ (AG-1549/S-1153, a next generation NNRTI with activity against viruses containing the K103N mutation; Agouron); PNU-142721 (has 20- to 50-fold greater activity than its predecessor delavirdine and is active against K103N mutants; Pharmacia & Upjohn); DPC-961 and DPC-963 (second-generation derivatives of efavirenz, designed to be active against viruses with the K103N mutation; DuPont); GW420867X (has 25-fold greater activity than HBY097 and is active against K103N mutants; Glaxo Wellcome); CALANOLIDE A (naturally occurring agent from the latex tree; active against viruses containing either or both the Y181C and K103N mutations); and Propolis (WO 99/49830).

[0965] Additional protease inhibitors include LOPINAVIR™ (ABT378/r; Abbott Laboratories); BMS-232632 (an azapeptide; Bristol-Myres Squibb); TIPRANAVIR™ (PNU-140690, a non-peptic dihydropyrone; Pharmacia & Upjohn); PD-178390 (a nonpeptidic dihydropyrone; Parke-Davis); BMS 232632 (an azapeptide; Bristol-Myers Squibb); L-756,423 (an indinavir analog; Merck); DMP-450 (a cyclic urea compound; Avid & DuPont); AG-1776 (a peptidomimetic with in vitro activity against protease inhibitor-resistant viruses; Agouron); VX-175/GW-433908 (phosphate prodrug of amprenavir; Vertex & Glaxo Welcome); CGP61755 (Ciba); and AGENERASE™ (amprenavir; Glaxo Wellcome Inc.).

[0966] Additional antiretroviral agents include fusion inhibitors/gp41 binders. Fusion inhibitors/gp41 binders include T-20 (a peptide from residues 643-678 of the HIV gp41 transmembrane protein ectodomain which binds to gp41 in its resting state and prevents transformation to the fusogenic state; Trimeris) and T-1249 (a second-generation fusion inhibitor, Trimeris).

[0967] Additional antiretroviral agents include fusion inhibitors/chemokine receptor antagonists. Fusion inhibitors/chemokine receptor antagonists include CXCR4 antagonists such as AMD 3100 (a bicyclam), SDF-1 and its analogs, and ALX40-4C (a cationic peptide), T22 (an 18 amino acid peptide; Trimeris) and the T22 analogs T134 and T140; CCR5 antagonists such as RANTES (9-68), AOP-RANTES, NNY-RANTES, and TAK-779; and CCR5/CXCR4 antagonists such as NSC 651016 (a distamycin analog). Also included are CCR2B, CCR3, and CCR6 antagonists. Chemokine recpetor agonists such as RANTES, SDF-1, MIP-1α, MIP-1β, etc., may also inhibit fusion.

[0968] Additional antiretroviral agents include integrase inhibitors. Integrase inhibitors include dicaffeoylquinic (DFQA) acids; L-chicoric acid (a dicaffeoyltartaric (DCTA) acid); quinalizarin (QLC) and related anthraquinones; ZINTEVIR™ (AR 177, an oligonucleotide that probably acts at cell surface rather than being a true integrase inhibitor; Arondex); and naphthols such as those disclosed in WO 98/50347.

[0969] Additional antiretroviral agents include hydroxyurea-like compunds such as BCX-34 (a purine nucleoside phosphorylase inhibitor, Biocryst); ribonucleotide reductase inhibitors such as DIDOX™ (Molecules for Health); inosine monophosphate dehydrogenase (IMPDH) inhibitors sucha as VX-497 (Vertex); and mycopholic acids such as CellCept (mycophenolate mofetil; Roche).

[0970] Additional antiretroviral agents include inhibitors of viral integrase, inhibitors of viral genome nuclear translocation such as arylene bis(methylketone) compounds; inhibitors of HIV entry such as AOP-RANTES, NNY-RANTES, RANTES-IgG fusion protein, soluble complexes of RANTES and glycosaminoglycans (GAG), and AMD-3100; nucleocapsid zinc finger inhibitors such as dithiane compounds; targets of HIV Tat and Rev; and pharmacoenhancers such as ABT-378.

[0971] Other antiretroviral therapies and adjunct therapies include cytokines and lymphokines such as MIP-1α, MIP-1β, SDF-1α, IL-2, PROLEUKIN™ (aldesleukin/L2-7001; Chiron), IL-4, IL-10, IL-12, and IL-13; interferons such as IFN-α2a; antagonists of TNFs, NFκB, GM-CSF, M-CSF, and IL-10; agents that modulate immune activation such as cyclosporin and prednisone; vaccines such as Remune™ (HIV Immunogen), APL 400-003 (Apollon), recombinant gp120 and fragments, bivalent (B/E) recombinant envelope glycoprotein, rgp120CM235, MN rgp120, SF-2 rgp120, gp120/soluble CD4 complex, Delta JR-FL protein, branched synthetic peptide derived from discontinuous gp120 C3/C4 domain, fusion-competent immunogens, and Gag, Pol, Nef, and Tat vaccines; gene-based therapies such as genetic suppressor elements (GSEs; WO 98/54366), and intrakines (genetically modified CC chemokines targetted to the ER to block surface expression of newly synthesized CCR5 (Yang et al., PNAS 94:11567-72 (1997); Chen et al., Nat. Med. 3:1110-16 (1997)); antibodies such as the anti-CXCR4 antibody 12G5, the anti-CCR5 antibodies 2D7, 5C7, PA8, PA9, PA10, PA11, PA12, and PA14, the anti-CD4 antibodies Q4120 and RPA-T4, the anti-CCR3 antibody 7B11, the anti-gp120 antibodies 17b, 48d, 447-52D, 257-D, 268-D and 50.1, anti-Tat antibodies, anti-TNF-α antibodies, and monoclonal antibody 33A; aryl hydrocarbon (AH) receptor agonists and antagonists such as TCDD, 3,3′,4,4′,5-pentachlorobiphenyl, 3,3′,4,4′-tetrachlorobiphenyl, and α-naphthoflavone (WO 98/30213); and antioxidants such as γ-L-glutamyl-L-cysteine ethyl ester (γ-GCE; WO 99/56764).

[0972] In a further embodiment, the Therapeutics of the invention are administered in combination with an antiviral agent. Antiviral agents that may be administered with the Therapeutics of the invention include, but are not limited to, acyclovir, ribavirin, amantadine, and remantidine.

[0973] In other embodiments, Therapeutics of the invention may be administered in combination with anti-opportunistic infection agents. Anti-opportunistic agents that may be administered in combination with the Therapeutics of the invention, include, but are not limited to, TRIMETHOPRIM-SULFAMETHOXAZOLE™, DAPSONE™, PENTAMIDINE™, ATOVAQUONE™, ISONIAZID™, RIFAMPIN™, PYRAZINAMIDE™, ETHAMBUTOL™, RIFABUTIN™, CLARITHOMYCIN™, AZITHROMYCIN™, GANCICLOVIR™, FOSCARNET™, CIDOFOVIR™, FLUCONAZOLE™, ITRACONAZOLE™, KETOCONAZOLE™, ACYCLOVIR™, FAMCICOLVIR™, PYRIMETHAMINE™, LEUCOVORIN™, NEUPOGEN™ (filgrastim/G-CSF), and LEUKINE™ (sargramostim/GM-CSF). In a specific embodiment, Therapeutics of the invention are used in any combination with TRIMETHOPRIM-SULFAMETHOXAZOLE™, DAPSONE™, PENTAMIDINE™, and/or ATOVAQUONE™ to prophylactically treat or prevent an opportunistic Pneumocystis carinii pneumonia infection. In another specific embodiment, Therapeutics of the invention are used in any combination with ISONIAZID™, RIFAMPIN™, PYRAZINAMIDE™, and/or ETHAMBUTOL™ to prophylactically treat or prevent an opportunistic Mycobacterium avium complex infection. In another specific embodiment, Therapeutics of the invention are used in any combination with RIFABUTIN™, CLARITHROMYCIN™, and/or AZITHROMYCIN™ to prophylactically treat or prevent an opportunistic Mycobacterium tuberculosis infection. In another specific embodiment, Therapeutics of the invention are used in any combination with GANCICLOVIR™, FOSCARNET™, and/or CIDOFOVIR™ to prophylactically treat or prevent an opportunistic cytomegalovirus infection. In another specific embodiment, Therapeutics of the invention are used in any combination with FLUCONAZOLE™, ITRACONAZOLE™, and/or KETOCONAZOLE™ to prophylactically treat or prevent an opportunistic fungal infection. In another specific embodiment, Therapeutics of the invention are used in any combination with ACYCLOVIR™ and/or FAMCICOLVIR™ to prophylactically treat or prevent an opportunistic herpes simplex virus type I and/or type II infection. In another specific embodiment, Therapeutics of the invention are used in any combination with PYRIMETHAMINE™ and/or LEUCOVORIN™ to prophylactically treat or prevent an opportunistic Toxoplasma gondii infection. In another specific embodiment, Therapeutics of the invention are used in any combination with LEUCOVORIN™ and/or NEUPOGEN™ to prophylactically treat or prevent an opportunistic bacterial infection.

[0974] In a further embodiment, the Therapeutics of the invention are administered in combination with an antibiotic agent. Antibiotic agents that may be administered with the Therapeutics of the invention include, but are not limited to, amoxicillin, beta-lactamases, aminoglycosides, beta-lactam (glycopeptide), beta-lactamases, Clindamycin, chloramphenicol, cephalosporins, ciprofloxacin, erythromycin, fluoroquinolones, macrolides, metronidazole, penicillins, quinolones, rapamycin, rifampin, streptomycin, sulfonamide, tetracyclines, trimethoprim, trimethoprim-sulfamethoxazole, and vancomycin.

[0975] In other embodiments, the Therapeutics of the invention are administered in combination with immunestimulants. Immunostimulants that may be administered in combination with the Therapeutics of the invention include, but are not limited to, levamisole (e.g., ERGAMISOL™), isoprinosine (e.g. INOSIPLEX™), interferons (e.g. interferon alpha), and interleukins (e.g., IL-2).

[0976] In other embodiments, Therapeutics of the invention are administered in combination with immunosuppressive agents. Immunosuppressive agents that may be administered in combination with the Therapeutics of the invention include, but are not limited to, steroids, cyclosporine, cyclosporine analogs, cyclophosphamide methylprednisone, prednisone, azathioprine, FK-506, 15-deoxyspergualin, and other immunosuppressive agents that act by suppressing the function of responding T cells. Other immunosuppressive agents that may be administered in combination with the Therapeutics of the invention include, but are not limited to, prednisolone, methotrexate, thalidomide, methoxsalen, rapamycin, leflunomide, mizoribine (BREDININ™), brequinar, deoxyspergualin, and azaspirane (SKF 105685), ORTHOCLONE OKT® 3 (muromonab-CD3), SANDIMMUNE™, NEORAL™, SANGDYA™ (cyclosporine), PROGRAF® (FK506, tacrolimus), CELLCEPT® (mycophenolate motefil, of which the active metabolite is mycophenolic acid), IMURAN™ (azathioprine), glucocorticosteroids, adrenocortical steroids such as DELTASONE™ (prednisone) and HYDELTRASOL™ (prednisolone), FOLEX™ and MEXATE™ (methotrxate), OXSORALEN-ULTRA™ (methoxsalen) and RAPAMUNE™ (sirolimus). In a specific embodiment, immunosuppressants may be used to prevent rejection of organ or bone marrow transplantation.

[0977] In an additional embodiment, Therapeutics of the invention are administered alone or in combination with one or more intravenous immune globulin preparations. Intravenous immune globulin preparations that may be administered with the Therapeutics of the invention include, but not limited to, GAMMAR™, IVEEGAM™, SANDOGLOBULIN™, GAMMAGARD S/D™, ATGAM™ (antithymocyte glubulin), and GAMIMUNE™. In a specific embodiment, Therapeutics of the invention are administered in combination with intravenous immune globulin preparations in transplantation therapy (e.g., bone marrow transplant).

[0978] In certain embodiments, the Therapeutics of the invention are administered alone or in combination with an anti-inflammatory agent. Anti-inflammatory agents that may be administered with the Therapeutics of the invention include, but are not limited to, corticosteroids (e.g. betamethasone, budesonide, cortisone, dexamethasone, hydrocortisone, methylprednisolone, prednisolone, prednisone, and triamcinolone), nonsteroidal anti-inflammatory drugs (e.g., diclofenac, diflunisal, etodolac, fenoprofen, floctafenine, flurbiprofen, ibuprofen, indomethacin, ketoprofen, meclofenamate, mefenamic acid, meloxicam, nabumetone, naproxen, oxaprozin, phenylbutazone, piroxicam, sulindac, tenoxicam, tiaprofenic acid, and tolmetin.), as well as antihistamines, aminoarylcarboxylic acid derivatives, arylacetic acid derivatives, arylbutyric acid derivatives, arylcarboxylic acids, arylpropionic acid derivatives, pyrazoles, pyrazolones, salicylic acid derivatives, thiazinecarboxamides, e-acetamidocaproic acid, S-adenosylmethionine, 3-amino-4-hydroxybutyric acid, amixetrine, bendazac, benzydamine, bucolome, difenpiramide, ditazol, emorfazone, guaiazulene, nabumetone, nimesulide, orgotein, oxaceprol, paranyline, perisoxal, pifoxime, proquazone, proxazole, and tenidap.

[0979] In an additional embodiment, the compositions of the invention are administered alone or in combination with an anti-angiogenic agent. Anti-angiogenic agents that may be administered with the compositions of the invention include, but are not limited to, Angiostatin (Entremed, Rockville, Md.), Troponin-1 (Boston Life Sciences, Boston, Mass.), anti-Invasive Factor, retinoic acid and derivatives thereof, paclitaxel (Taxol), Suramin, Tissue Inhibitor of Metalloproteinase-1, Tissue Inhibitor of Metalloproteinase-2, VEGI, Plasminogen Activator Inhibitor-1, Plasminogen Activator Inhibitor-2, and various forms of the lighter “d group” transition metals.

[0980] Lighter “d group” transition metals include, for example, vanadium, molybdenum, tungsten, titanium, niobium, and tantalum species. Such transition metal species may form transition metal complexes. Suitable complexes of the above-mentioned transition metal species include oxo transition metal complexes.

[0981] Representative examples of vanadium complexes include oxo vanadium complexes such as vanadate and vanadyl complexes. Suitable vanadate complexes include metavanadate and orthovanadate complexes such as, for example, ammonium metavanadate, sodium metavanadate, and sodium orthovanadate. Suitable vanadyl complexes include, for example, vanadyl acetylacetonate and vanadyl sulfate including vanadyl sulfate hydrates such as vanadyl sulfate mono- and trihydrates.

[0982] Representative examples of tungsten and molybdenum complexes also include oxo complexes. Suitable oxo tungsten complexes include tungstate and tungsten oxide complexes. Suitable tungstate complexes include ammonium tungstate, calcium tungstate, sodium tungstate dihydrate, and tungstic acid. Suitable tungsten oxides include tungsten (IV) oxide and tungsten (VI) oxide. Suitable oxo molybdenum complexes include molybdate, molybdenum oxide, and molybdenyl complexes. Suitable molybdate complexes include ammonium molybdate and its hydrates, sodium molybdate and its hydrates, and potassium molybdate and its hydrates. Suitable molybdenum oxides include molybdenum (VI) oxide, molybdenum (VI) oxide, and molybdic acid. Suitable molybdenyl complexes include, for example, molybdenyl acetylacetonate. Other suitable tungsten and molybdenum complexes include hydroxo derivatives derived from, for example, glycerol, tartaric acid, and sugars.

[0983] A wide variety of other anti-angiogenic factors may also be utilized within the context of the present invention. Representative examples include, but are not limited to, platelet factor 4; protamine sulphate; sulphated chitin derivatives (prepared from queen crab shells), (Murata et al., Cancer Res. 51:22-26, (1991)); Sulphated Polysaccharide Peptidoglycan Complex (SP-PG) (the function of this compound may be enhanced by the presence of steroids such as estrogen, and tamoxifen citrate); Staurosporine; modulators of matrix metabolism, including for example, proline analogs, cishydroxyproline, d,L-3,4-dehydroproline, Thiaproline, alpha,alpha-dipyridyl, aminopropionitrile fumarate; 4-propyl-5-4-pyridinyl)-2(3H)-oxazolone; Methotrexate; Mitoxantrone; Heparin; Interferons; 2 Macroglobulin-serum; ChIMP-3 (Pavloff et al., J. Bio. Chem. 267:17321-17326, (1992)); Chymostatin (Tomkinson et al., Biochem J. 286:475-480, (1992)); Cyclodextrin Tetradecasulfate; Eponemycin; Camptothecin; Fumagillin (Ingber et al., Nature 348:555-557, (1990)); Gold Sodium Thiomalate (“GST”; Matsubara and Ziff, J. Clin. Invest 79:1440-1446, (1987)); anticollagenase-serum; alpha2-antiplasmin (Holmes et al., J. Biol. Chem. 262(4):1659-1664, (1987)); Bisantrene (National Cancer Institute); Lobenzarit disodium (N-(2)-carboxyphenyl-4-chloroanthronilic acid disodium or “CCA”; (Takeuchi et al., Agents Actions 36:312-316, (1992)); and metalloproteinase inhibitors such as BB94.

[0984] Additional anti-angiogenic factors that may also be utilized within the context of the present invention include Thalidomide, (Celgene, Warren, N.J.); Angiostatic steroid; AGM-1470 (H. Brem and J. Folkman J Pediatr. Surg. 28:445-51 (1993)); an integrin alpha v beta 3 antagonist (C. Storgard et al., J Clin Invest. 103:47-54 (1999)); carboxynaminolmidazole; Carboxyamidotriazole (CAI) (National Cancer Institute, Bethesda, Md.); Conbretastatin A-4 (CA4P) (OXiGENE, Boston, Mass.); Squalamine (Magainin Pharmaceuticals, Plymouth Meeting, Pa.); TNP-470, (Tap Pharmaceuticals, Deerfield, Ill.); ZD-0101 AstraZeneca (London, UK); APRA (CT2584); Benefin, Byrostatin-1 (SC339555); CGP-41251 (PKC 412); CM101; Dexrazoxane (ICRF187); DMXAA; Endostatin; Flavopridiol; Genestein; GTE; ImmTher; Iressa (ZD1839); Octreotide (Somatostatin); Panretin; Penacillamine; Photopoint; PI-88; Prinomastat (AG-3340) Purlytin; Suradista (FCE26644); Tamoxifen (Nolvadex); Tazarotene; Tetrathiomolybdate; Xeloda (Capecitabine); and 5-Fluorouracil.

[0985] Anti-angiogenic agents that may be administed in combination with the compounds of the invention may work through a variety of mechanisms including, but not limited to, inhibiting proteolysis of the extracellular matrix, blocking the function of endothelial cell-extracellular matrix adhesion molecules, by antagonizing the function of angiogenesis inducers such as growth factors, and inhibiting integrin receptors expressed on proliferating endothelial cells. Examples of anti-angiogenic inhibitors that interfere with extracellular matrix proteolysis and which may be administered in combination with the compositons of the invention include, but are not lmited to, AG-3340 (Agouron, La Jolla, Calif.), BAY-12-9566 (Bayer, West Haven, Conn.), BMS-275291 (Bristol Myers Squibb, Princeton, N.J.), CGS-27032A (Novartis, East Hanover, N.J.), Marimastat (British Biotech, Oxford, UK), and Metastat (Aeterna, St-Foy, Quebec). Examples of anti-angiogenic inhibitors that act by blocking the function of endothelial cell-extracellular matrix adhesion molecules and which may be administered in combination with the compositons of the invention include, but are not lmited to, EMD-121974 (Merck KcgaA Darmstadt, Germany) and Vitaxin (Ixsys, La Jolla, Calif./Medimmune, Gaithersburg, Md.). Examples of anti-angiogenic agents that act by directly antagonizing or inhibiting angiogenesis inducers and which may be administered in combination with the compositons of the invention include, but are not lmited to, Angiozyme (Ribozyme, Boulder, Colo.), Anti-VEGF antibody (Genentech, S. San Francisco, Calif.), PTK-787/ZK-225846 (Novartis, Basel, Switzerland), SU-101 (Sugen, S. San Francisco, Calif.), SU-5416 (Sugen/Pharmacia Upjohn, Bridgewater, N.J.), and SU-6668 (Sugen). Other anti-angiogenic agents act to indirectly inhibit angiogenesis. Examples of indirect inhibitors of angiogenesis which may be administered in combination with the compositons of the invention include, but are not limited to, IM-862 (Cytran, Kirkland, Wash.), Interferon-alpha, IL-12 (Roche, Nutley, N.J.), and Pentosan polysulfate (Georgetown University, Washington, D.C.).

[0986] In particular embodiments, the use of compositions of the invention in combination with anti-angiogenic agents is contemplated for the treatment, prevention, and/or amelioration of an autoimmune disease, such as for example, an autoimmune disease described herein.

[0987] In a particular embodiment, the use of compositions of the invention in combination with anti-angiogenic agents is contemplated for the treatment, prevention, and/or amelioration of arthritis. In a more particular embodiment, the use of compositions of the invention in combination with anti-angiogenic agents is contemplated for the treatment, prevention, and/or amelioration of rheumatoid arthritis.

[0988] In another embodiment, the polynucleotides encoding a polypeptide of the present invention are administered in combination with an angiogenic protein, or polynucleotides encoding an angiogenic protein. Examples of angiogenic proteins that may be administered with the compositions of the invention include, but are not limited to, acidic and basic fibroblast growth factors, VEGF-1, VEGF-2, VEGF-3, epidermal growth factor alpha and beta, platelet-derived endothelial cell growth factor, platelet-derived growth factor, tumor necrosis factor alpha, hepatocyte growth factor, insulin-like growth factor, colony stimulating factor, macrophage colony stimulating factor, granulocyte/macrophage colony stimulating factor, and nitric oxide synthase.

[0989] In additional embodiments, compositions of the invention are administered in combination with a chemotherapeutic agent. Chemotherapeutic agents that may be administered with the Therapeutics of the invention include, but are not limited to alkylating agents such as nitrogen mustards (for example, Mechlorethamine, cyclophosphamide, Cyclophosphamide Ifosfamide, Melphalan (L-sarcolysin), and Chlorambucil), ethylenimines and methylmelamines (for example, Hexamethylmelamine and Thiotepa), alkyl sulfonates (for example, Busulfan), nitrosoureas (for example, Carmustine (BCNU), Lomustine (CCNU), Semustine (methyl-CCNU), and Streptozocin (streptozotocin)), triazenes (for example, Dacarbazine (DTIC; dimethyltriazenoimidazolecarboxamide)), folic acid analogs (for example, Methotrexate (amethopterin)), pyrimidine analogs (for example, Fluorouacil (5-fluorouracil; 5-FU), Floxuridine (fluorodeoxyuridine; FudR), and Cytarabine (cytosine arabinoside)), purine analogs and related inhibitors (for example, Mercaptopurine (6-mercaptopurine; 6-MP), Thioguanine (6-thioguanine; TG), and Pentostatin (2′-deoxycoformycin)), vinca alkaloids (for example, Vinblastine (VLB, vinblastine sulfate)) and Vincristine (vincristine sulfate)), epipodophyllotoxins (for example, Etoposide and Teniposide), antibiotics (for example, Dactinomycin (actinomycin D), Daunorubicin (daunomycin; rubidomycin), Doxorubicin, Bleomycin, Plicamycin (mithramycin), and Mitomycin (mitomycin C), enzymes (for example, L-Asparaginase), biological response modifiers (for example, Interferon-alpha and interferon-alpha-2b), platinum coordination compounds (for example, Cisplatin (cis-DDP) and Carboplatin), anthracenedione (Mitoxantrone), substituted ureas (for example, Hydroxyurea), methylhydrazine derivatives (for example, Procarbazine (N-methylhydrazine; MIH), adrenocorticosteroids (for example, Prednisone), progestins (for example, Hydroxyprogesterone caproate, Medroxyprogesterone, Medroxyprogesterone acetate, and Megestrol acetate), estrogens (for example, Diethylstilbestrol (DES), Diethylstilbestrol diphosphate, Estradiol, and Ethinyl estradiol), antiestrogens (for example, Tamoxifen), androgens (Testosterone proprionate, and Fluoxymesterone), antiandrogens (for example, Flutamide), gonadotropin-releasing horomone analogs (for example, Leuprolide), other hormones and hormone analogs (for example, methyltestosterone, estramustine, estramustine phosphate sodium, chlorotrianisene, and testolactone), and others (for example, dicarbazine, glutamic acid, and mitotane).

[0990] In one embodiment, the compositions of the invention are administered in combination with one or more of the following drugs: inflixiab (also known as Remicade™ Centocor, Inc.), Trocade (Roche, RO-32-3555), Leflunomide (also known as Arava™ from Hoechst Marion Roussel), Kineret™ (an IL-1 Receptor antagonist also known as Anakinra from Amgen, Inc.)

[0991] In a specific embodiment, compositions of the invention are administered in combination with CHOP (cyclophosphamide, doxorubicin, vincristine, and prednisone) or combination of one or more of the components of CHOP. In one embodiment, the compositions of the invention are administered in combination with anti-CD20 antibodies, human monoclonal anti-CD20 antibodies. In another embodiment, the compositions of the invention are administered in combination with anti-CD20 antibodies and CHOP, or anti-CD20 antibodies and any combination of one or more of the components of CHOP, particularly cyclophosphamide and/or prednisone. In a specific embodiment, compositions of the invention are administered in combination with Rituximab. In a further embodiment, compositions of the invention are administered with Rituximab and CHOP, or Rituximab and any combination of one or more of the components of CHOP, particularly cyclophosphamide and/or prednisone. In a specific embodiment, compositions of the invention are administered in combination with tositumomab. In a further embodiment, compositions of the invention are administered with tositumomab and CHOP, or tositumomab and any combination of one or more of the components of CHOP, particularly cyclophosphamide and/or prednisone. The anti-CD20 antibodies may optionally be associated with radioisotopes, toxins or cytotoxic prodrugs.

[0992] In another specific embodiment, the compositions of the invention are administered in combination Zevalin™. In a further embodiment, compositions of the invention are administered with Zevalin™ and CHOP, or Zevalin™ and any combination of one or more of the components of CHOP, particularly cyclophosphamide and/or prednisone. Zevalin™ may be associated with one or more radisotopes. Particularly preferred isotopes are ⁹⁰Y and ¹¹¹In.

[0993] In an additional embodiment, the Therapeutics of the invention are administered in combination with cytokines. Cytokines that may be administered with the Therapeutics of the invention include, but are not limited to, IL2, IL3, IL4, IL5, L6, IL7, L10, IL12, IL13, IL15, anti-CD40, CD40L, IFN-gamma and TNF-alpha. In another embodiment, Therapeutics of the invention may be administered with any interleukin, including, but not limited to, IL-1alpha, IL-1beta, IL-2, IL-3, IL-4, IL-5, IL-6, IL-7, IL-8, IL-9, IL-10, IL-11, IL-12, IL-13, IL-14, IL-15, IL-16, IL-17, IL-18, IL-19, IL-20, and IL-21.

[0994] In one embodiment, the Therapeutics of the invention are administered in combination with members of the TNF family. TNF, TNF-related or TNF-like molecules that may be administered with the Therapeutics of the invention include, but are not limited to, soluble forms of TNP-alpha, lymphotoxin-alpha (LT-alpha, also known as TNF-beta), LT-beta (found in complex heterotrimer LT-alpha2-beta), OPGL, FasL, CD27L, CD30L, CD40L, 4-1BBL, DcR3, OX40L, TNF-gamma (International Publication No. WO 96/14328), AIM-I (International Publication No. WO 97/33899), endoline-alpha (International Publication No. WO 98/07880), OPG, and neutrokine-alpha (International Publication No. WO 98/18921, OX40, and nerve growth factor (NGF), and soluble forms of Fas, CD30, CD27, CD40 and 4-IBB, TR2 (International Publication No. WO 96/34095), DR3 (International Publication No. WO 97/33904), DR4 (International Publication No. WO 98/32856), TR5 (International Publication No. WO 98/30693), TRANK, TR9 (International Publication No. WO 98/56892), TR10 (International Publication No. WO 98/54202), 312C2 (International Publication No. WO 98/06842), and TR12, and soluble forms CD154, CD70, and CD153.

[0995] In an additional embodiment, the Therapeutics of the invention are administered in combination with angiogenic proteins. Angiogenic proteins that may be administered with the Therapeutics of the invention include, but are not limited to, Glioma Derived Growth Factor (GDGF), as disclosed in European Patent Number EP-399816; Platelet Derived Growth Factor-A (PDGF-A), as disclosed in European Patent Number EP-682110; Platelet Derived Growth Factor-B (PDGF-B), as disclosed in European Patent Number EP-282317; Placental Growth Factor (PlGF), as disclosed in International Publication Number WO 92/06194; Placental Growth Factor-2 (PlGF-2), as disclosed in Hauser et al., Growth Factors, 4:259-268 (1993); Vascular Endothelial Growth Factor (VEGF), as disclosed in International Publication Number WO 90/13649; Vascular Endothelial Growth Factor-A (VEGF-A), as disclosed in European Patent Number EP-506477; Vascular Endothelial Growth Factor-2 (VEGF-2), as disclosed in International Publication Number WO 96/39515; Vascular Endothelial Growth Factor B (VEGF-3); Vascular Endothelial Growth Factor B-186 (VEGF-B186), as disclosed in International Publication Number WO 96/26736; Vascular Endothelial Growth Factor-D (VEGF-D), as disclosed in International Publication Number WO 98/02543; Vascular Endothelial Growth Factor-D (VEGF-D), as disclosed in International Publication Number WO 98/07832; and Vascular Endothelial Growth Factor-E (VEGF-E), as disclosed in German Patent Number DE19639601. The above mentioned references are herein incorporated by reference in their entireties.

[0996] In an additional embodiment, the Therapeutics of the invention are administered in combination with Fibroblast Growth Factors. Fibroblast Growth Factors that may be administered with the Therapeutics of the invention include, but are not limited to, FGF-1, FGF-2, FGF-3, FGF-4, FGF-5, FGF-6, FGF-7, FGF-8, FGF-9, FGF-10, FGF-11, FGF-12, FGF-13, FGF-14, and FGF-15.

[0997] In an additional embodiment, the Therapeutics of the invention are administered in combination with hematopoietic growth factors. Hematopoietic growth factors that may be administered with the Therapeutics of the invention include, but are not limited to, granulocyte macrophage colony stimulating factor (GM-CSF) (sargramostim, LEUKINE™, PROKINE™), granulocyte colony stimulating factor (G-CSF) (filgrastim, NEUPOGEN™), macrophage colony stimulating factor (M-CSF, CSF-1) erythropoietin (epoetin alfa, EPOGEN™, PROCRIT™), stem cell factor (SCF, c-kit ligand, steel factor), megakaryocyte colony stimulating factor, PIXY321 (a GMCSF/IL-3 fusion protein), interleukins, especially any one or more of IL-1 through IL-12, interferon-gamma, or thrombopoietin.

[0998] In certain embodiments, Therapeutics of the present invention are administered in combination with adrenergic blockers, such as, for example, acebutolol, atenolol, betaxolol, bisoprolol, carteolol, labetalol, metoprolol, nadolol, oxprenolol, penbutolol, pindolol, propranolol, sotalol, and timolol.

[0999] In another embodiment, the Therapeutics of the invention are administered in combination with an antiarrhythmic drug (e.g., adenosine, amidoarone, bretylium, digitalis, digoxin, digitoxin, diliazem, disopyramide, esmolol, flecainide, lidocaine, mexiletine, moricizine, phenyloin, procainamide, N-acetyl procainamide, propafenone, propranolol, quinidine, sotalol, tocainide, and verapamil).

[1000] In another embodiment, the Therapeutics of the invention are administered in combination with diuretic agents, such as carbonic anhydrase-inhibiting agents (e.g., acetazolamide, dichlorphenamide, and methazolamide), osmotic diuretics (e.g., glycerin, isosorbide, mannitol, and urea), diuretics that inhibit Na⁺—K⁺-2Cl⁻ symport (e.g., furosemide, bumetanide, azosemide, piretanide, tripamide, ethacrynic acid, muzolimine, and torsemide), thiazide and thiazide-like diuretics (e.g., bendroflumethiazide, benzthiazide, chlorothiazide, hydrochlorothiazide, hydroflumethiazide, methyclothiazide, polythiazide, trichormethiazide, chlorthalidone, indapamide, metolazone, and quinethazone), potassium sparing diuretics (e.g., amiloride and triamterene), and mineralcorticoid receptor antagonists (e.g., spironolactone, canrenone, and potassium canrenoate).

[1001] In one embodiment, the Therapeutics of the invention are administered in combination with treatments for endocrine and/or hormone imbalance disorders. Treatments for endocrine and/or hormone imbalance disorders include, but are not limited to, ¹²⁷I, radioactive isotopes of iodine such as ¹³¹I and ¹²³I; recombinant growth hormone, such as HUMATROPE™ (recombinant somatropin); growth hormone analogs such as PROTROPIN™ (somatrem); dopamine agonists such as PARLODEL™ (bromocriptine); somatostatin analogs such as SANDOSTATIN™ (octreotide); gonadotropin preparations such as PREGNYL™, A.P.L.™ and PROFASI™ (chorionic gonadotropin (CG)), PERGONAL™ (menotropins), and METRODIN™ (urofollitropin (uFSH)); synthetic human gonadotropin releasing hormone preparations such as FACTREL™ and LUTREPULSE™ (gonadorelin hydrochloride); synthetic gonadotropin agonists such as LUPRON™ (leuprolide acetate), SUPPRELIN™ (histrelin acetate), SYNAREL™ (nafarelin acetate), and ZOLADEX™ (goserelin acetate); synthetic preparations of thyrotropin-releasing hormone such as RELEFACT TRH™ and THYPINONE™ (protirelin); recombinant human TSH such as THYROGEN™; synthetic preparations of the sodium salts of the natural isomers of thyroid hormones such as L-T₄™, SYNTHROID™ and LEVOTHROID™ (levothyroxine sodium), L-T₃™, CYTOMEL™ and TRIOSTAT™ (liothyroine sodium), and THYROLAR™ (liotrix); antithyroid compounds such as 6-n-propylthiouracil (propylthiouracil), 1-methyl-2-mercaptoimidazole and TAPAZOLE™ (methimazole), NEO-MERCAZOLE™ (carbimazole); beta-adrenergic receptor antagonists such as propranolol and esmolol; Ca²⁺ channel blockers; dexamethasone and iodinated radiological contrast agents such as TELEPAQUE™ (iopanoic acid) and ORAGRAFIN™ (sodium ipodate).

[1002] Additional treatments for endocrine and/or hormone imbalance disorders include, but are not limited to, estrogens or congugated estrogens such as ESTRACE™ (estradiol), ESTINYL™ (ethinyl estradiol), PREMARIN™, ESTRATAB™, ORTHO-EST™, OGEN™ and estropipate (estrone), ESTROVIS™ (quinestrol), ESTRADERM™ (estradiol), DELESTROGEN™ and VALERGEN™ (estradiol valerate), DEPO-ESTRADIOL CYPIONATE™ and ESTROJECT LA™ (estradiol cypionate); antiestrogens such as NOLVADEX™ (tamoxifen), SEROPHENE™ and CLOMID™ (clomiphene); progestins such as DURALUTIN™ (hydroxyprogesterone caproate), MPA™ and DEPO-PROVERA™ (medroxyprogesterone acetate), PROVERA™ and CYCRIN™ (MPA), MEGACE™ (megestrol acetate), NORLUTIN™ (norethindrone), and NORLUTATE™ and AYGESTIN™ (norethindrone acetate); progesterone implants such as NORPLANT SYSTEM™ (subdermal implants of norgestrel); antiprogestins such as RU 486™ (mifepristone); hormonal contraceptives such as ENOVID™ (norethynodrel plus mestranol), PROGESTASERT™ (intrauterine device that releases progesterone), LOESTRIN™, BREVICON™, MODICON™, GENORA™, NELONA™, NORINYL™, OVACON-35™ and OVACON-50™ (ethinyl estradiol/norethindrone), LEVLEN™, NORDETTE™, TR1-LEVLEN™ and TRIPHASIL-21™ (ethinyl estradiol/levonorgestrel) LO/OVRAL™ and OVRAL™ (ethinyl estradiol/norgestrel), DEMULEN™ (ethinyl estradiol/ethynodiol diacetate), NORINYL™, ORTHO-NOVUM™, NORETHIN™, GENORA™, and NELOVA™ (norethindrone/mestranol), DESOGEN™ and ORTHO-CEPT™ (ethinyl estradiol/desogestrel), ORTHO-CYCLEN™ and ORTHO-TRICYCEN™ (ethinyl estradiol/norgestimate), MICRONOR™ and NOR-QD™ (norethindrone), and OVRETTE™ (norgestrel).

[1003] Additional treatments for endocrine and/or hormone imbalance disorders include, but are not limited to, testosterone esters such as methenolone acetate and testosterone undecanoate; parenteral and oral androgens such as TESTOJECT-50™ (testosterone), TESTEX™ (testosterone propionate), DELATESTRYL™ (testosterone enanthate), DEPO-TESTOSTERONE™ (testosterone cypionate), DANOCRINE™ (danazol), HALOTESTIN™ (fluoxymesterone), ORETON METHYL™, TESTRED™ and VIRILON™ (methyltestosterone), and OXANDRIN™ (oxandrolone); testosterone transdermal systems such as TESTODERM™; androgen receptor antagonist and 5-alpha-reductase inhibitors such as ANDROCUR™ (cyproterone acetate), EULEXIN™ (flutamide), and PROSCAR™ (finasteride); adrenocorticotropic hormone preparations such as CORTROSYN™ (cosyntropin); adrenocortical steroids and their synthetic analogs such as ACLOVATE™ (alclometasone dipropionate), CYCLOCORT™ (amcinonide), BECLOVENT™ and VANCERIL™ (beclomethasone dipropionate), CELESTONE™ (betamethasone), BENISONE™ and UTICORT™ (betamethasone benzoate), DIPROSONE™ (betamethasone dipropionate), CELESTONE PHOSPHATE™ (betamethasone sodium phosphate), CELESTONE SOLUSPAN™ (betamethasone sodium phosphate and acetate), BETA-VAL™ and VALISONE™ (betamethasone valerate), TEMOVATE™ (clobetasol propionate), CLODERM™ (clocortolone pivalate), CORTEF™ and HYDROCORTONE™ (cortisol (hydrocortisone)), HYDROCORTONE ACETATE™ (cortisol (hydrocortisone) acetate), LOCOID™ (cortisol (hydrocortisone) butyrate), HYDROCORTONE PHOSPHATE™ (cortisol (hydrocortisone) sodium phosphate), A-HYDROCORT™ and SOLU CORTEF™ (cortisol (hydrocortisone) sodium succinate), WESTCORT™ (cortisol (hydrocortisone) valerate), CORTISONE ACETATE™ (cortisone acetate), DESOWEN™ and TRIDESILON™ (desonide), TOPICORT™ (desoximetasone), DECADRON™ (dexamethasone), DECADRON LA™ (dexamethasone acetate), DECADRON PHOSPHATE™ and HEXADROL PHOSPHATE™ (dexamethasone sodium phosphate), FLORONE™ and MAXIFLOR™ (diflorasone diacetate), FLORINEF ACETATE™ (fludrocortisone acetate), AEROBID™ and NASALIDE™ (flunisolide), FLUONID™ and SYNALAR™ (fluocinolone acetonide), LIDEX™ (fluocinonide), FLUOR-OP™ and FML™ (fluorometholone), CORDRAN™ (flurandrenolide), HALOG™ (halcinonide), HMS LIZUIFILM™ (medrysone), MEDROL™ (methylprednisolone), DEPO-MEDROL™ and MEDROL ACETATE™ (methylprednisone acetate), A-METHAPRED™ and SOLUMEDROL™ (methylprednisolone sodium succinate), ELOCON™ (mometasone furoate), HALDRONE™ (paramethasone acetate), DELTA-CORTEF™ (prednisolone), ECONOPRED™ (prednisolone acetate), HYDELTRASOL™ (prednisolone sodium phosphate), HYDELTRA-T.B.A™ (prednisolone tebutate), DELTASONE™ (prednisone), ARISTOCORT™ and KENACORT™ (triamcinolone), KENALOG™ (triamcinolone acetonide), ARISTOCORT™ and KENACORT DIACETATE™ (triamcinolone diacetate), and ARISTOSPAN™ (triamcinolone hexacetonide); inhibitors of biosynthesis and action of adrenocortical steroids such as CYTADREN™ (aminoglutethimide), NIZORAL™ (ketoconazole), MODRASTANE™ (trilostane), and METOPIRONE™ (metyrapone); bovine, porcine or human insulin or mixtures thereof; insulin analogs; recombinant human insulin such as HUMULIN™ and NOVOLIN™; oral hypoglycemic agents such as ORAMIDE™ and ORINASE™ (tolbutamide), DIABINESE™ (chlorpropamide), TOLAMIDE™ and TOLINASE™ (tolazamide), DYMELOR™ (acetohexamide), glibenclamide, MICRONASE™, DIBETA™ and GLYNASE™ (glyburide), GLUCOTROL™ (glipizide), and DIAMICRON™ (gliclazide), GLUCOPHAGE™ (metformin), ciglitazone, pioglitazone, and alpha-glucosidase inhibitors; bovine or porcine glucagon; somatostatins such as SANDOSTATIN™ (octreotide); and diazoxides such as PROGLYCEM™ (diazoxide).

[1004] In one embodiment, the Therapeutics of the invention are administered in combination with treatments for uterine motility disorders. Treatments for uterine motility disorders include, but are not limited to, estrogen drugs such as conjugated estrogens (e.g., PREMARIN® and ESTRATAB®), estradiols (e.g., CLIMARA® and ALORA®), estropipate, and chlorotrianisene; progestin drugs (e.g., AMEN® (medroxyprogesterone), MICRONOR® (norethidrone acetate), PROMETRIUM® progesterone, and megestrol acetate); and estrogen/progesterone combination therapies such as, for example, conjugated estrogens/medroxyprogesterone (e.g., PREMPRO™ and PREMPHASE®) and norethindrone acetate/ethinyl estsradiol (e.g., FEMHRT™).

[1005] In an additional embodiment, the Therapeutics of the invention are administered in combination with drugs effective in treating iron deficiency and hypochromic anemias, including but not limited to, ferrous sulfate (iron sulfate, FEOSOL™), ferrous fumarate (e.g.; FEOSTAT™), ferrous gluconate (e.g., FERGON™), polysaccharide-iron complex (e.g., NIFEREX™), iron dextran injection (e.g., INFED™), cupric sulfate, pyroxidine, riboflavin, Vitamin B₁₂, cyancobalamin injection (e.g., REDISOL™, RUBRAMIN PC™), hydroxocobalamin, folic acid (e.g., FOLVITE™), leucovorin (folinic acid, 5-CHOH4PteGlu, citrovorum factor) or WELLCOVORIN (Calcium salt of leucovorin), transferrin or ferritin.

[1006] In certain embodiments, the Therapeutics of the invention are administered in combination with agents used to treat psychiatric disorders. Psychiatric drugs that may be administered with the Therapeutics of the invention include, but are not limited to, antipsychotic agents (e.g., chlorpromazine, chlorprothixene, clozapine, fluphenazine, haloperidol, loxapine, mesoridazine, molindone, olanzapine, perphenazine, pimozide, quetiapine, risperidone, thioridazine, thiothixene, trifluoperazine, and triflupromazine), antimanic agents (e.g., carbamazepine, divalproex sodium, lithium carbonate, and lithium citrate), antidepressants (e.g., amitriptyline, amoxapine, bupropion, citalopram, clomipramine, desipramine, doxepin, fluvoxamine, fluoxetine, imipramine, isocarboxazid, maprotiline, mirtazapine, nefazodone, nortriptyline, paroxetine, phenelzine, protriptyline, sertraline, tranylcypromine, trazodone, trimipramine, and venlafaxine), antianxiety agents (e.g., alprazolam, buspirone, chlordiazepoxide, clorazepate, diazepam, halazepam, lorazepam, oxazepam, and prazepam), and stimulants (e.g., d-amphetamine, methylphenidate, and pemoline).

[1007] In other embodiments, the Therapeutics of the invention are administered in combination with agents used to treat neurological disorders. Neurological agents that may be administered with the Therapeutics of the invention include, but are not limited to, antiepileptic agents (e.g., carbamazepine, clonazepam, ethosuximide, phenobarbital, phenyloin, primidone, valproic acid, divalproex sodium, felbamate, gabapentin, lamotrigine, levetiracetnm, oxcarbazepine, tiagabine, topiramate, zonisamide, diazepam, lorazepam, and clonazepam), antiparkinsonian agents (e.g., levodopa/carbidopa, selegiline, amantidine, bromocriptine, pergolide, ropinirole, pramipexole, benztropine; biperiden; ethopropazine; procyclidine; trihexyphenidyl, tolcapone), and ALS therapeutics (e.g. riluzole).

[1008] In another embodiment, Therapeutics of the invention are administered in combination with vasodilating agents and/or calcium channel blocking agents. Vasodilating agents that may be administered with the Therapeutics of the invention include, but are not limited to, Angiotensin Converting Enzyme (ACE) inhibitors (e.g., papaverine, isoxsuprine, benazepril, captopril, cilazapril, enalapril, enalaprilat, fosinopril, lisinopril, moexipril, perindopril, quinapril, ramipril, spirapril, trandolapril, and nylidrin), and nitrates (e.g., isosorbide dinitrate, isosorbide mononitrate, and nitroglycerin). Examples of calcium channel blocking agents that may be administered in combination with the Therapeutics of the invention include, but are not limited to amlodipine, bepridil, diltiazem, felodipine, flunarizine, isradipine, nicardipine, nifedipine, nimodipine, and verapamil.

[1009] In certain embodiments, the Therapeutics of the invention are administered in combination with treatments for gastrointestinal disorders. Treatments for gastrointestinal disorders that may be administered with the Therapeutic of the invention include, but are not limited to, H₂ histamine receptor antagonists (e.g., TAGAMET™ (cimetidine), ZANTAC™ (ranitidine), PEPCID™ (famotidine), and AXID™ (nizatidine)); inhibitors of H⁺, K⁺ ATPase (e.g., PREVACID™ (lansoprazole) and PRILOSEC™ (omeprazole)); Bismuth compounds (e.g., PEPTO-BISMOL™ (bismuth subsalicylate) and DE-NOL™ (bismuth subcitrate)); various antacids; sucralfate; prostaglandin analogs (e.g. CYTOTEC™ (misoprostol)); muscarinic cholinergic antagonists; laxatives (e.g., surfactant laxatives, stimulant laxatives, saline and osmotic laxatives); antidiarrheal agents (e.g., LOMOTIL™ (diphenoxylate), MOTOFEN™ (diphenoxin), and IMODIUM™ (loperamide hydrochloride)), synthetic analogs of somatostatin such as SANDOSTATIN™ (octreotide), antiemetic agents (e.g., ZOFRAN™ (ondansetron), KYTRIL™ (granisetron hydrochloride), tropisetron, dolasetron, metoclopramide, chlorpromazine, perphenazine, prochlorperazine, promethazine, thiethylperazine, triflupromazine, domperidone, haloperidol, droperidol, trimethobenzamide, dexamethasone, methylprednisolone, dronabinol, and nabilone); D2 antagonists (e.g., metoclopramide, trimethobenzamide and chlorpromazine); bile salts; chenodeoxycholic acid; ursodeoxycholic acid; and pancreatic enzyme preparations such as pancreatin and pancrelipase.

[1010] In additional embodiments, the Therapeutics of the invention are administered in combination with other therapeutic or prophylactic regimens, such as, for example, radiation therapy.

### Example 14

### Method of Treating Decreased Levels of the Polypeptide

[1011] The present invention relates to a method for treating an individual in need of an increased level of a polypeptide of the invention in the body comprising administering to such an individual a composition comprising a therapeutically effective amount of polypeptides (including agonists thereto), and/or antibodies of the invention. Moreover, it will be appreciated that conditions caused by a decrease in the standard or normal expression level of a polypeptide of the present invention in an individual may be treated by administering agonists of said polypeptide. Thus, the invention also provides a method of treatment of an individual in need of an increased level of the polypeptide comprising administering to such an individual a Therapeutic comprising an amount of the agonist (including polypeptides and antibodies of the present invention) to increase the activity level of the polypeptide in such an individual.

[1012] For example, a patient with decreased levels of a polypeptide receives a daily dose 0.1-100 ug/kg of the agonist for six consecutive days. The exact details of the dosing scheme, based on administration and formulation, are provided in Example 13.

### Example 15

### Method of Treating Increased Levels of the Polypeptide

[1013] The present invention also relates to a method of treating an individual in need of a decreased level of a polypeptide of the invention in the body comprising administering to such an individual a composition comprising a therapeutically effective amount of an antagonist of the invention (including polypeptides and antibodies of the invention).

[1014] In one example, antisense technology is used to inhibit production of a polypeptide of the present invention. This technology is one example of a method of decreasing levels of a polypeptide, due to a variety of etiologies, such as cancer.

[1015] For example, a patient diagnosed with abnormally increased levels of a polypeptide is administered intravenously antisense polynucleotides at 0.5, 1.0, 1.5, 2.0 and 3.0 mg/kg day for 21 days. This treatment is repeated after a 7-day rest period if the treatment was well tolerated. The antisense polynucleotides of the present invention can be formulated using techniques and formulations described herein (e.g. see Example 13), or otherwise known in the art.

### Example 16

### Method of Treatment Using Gene Therapy—Ex Vivo

[1016] One method of gene therapy transplants fibroblasts, which are capable of expressing a polypeptide, onto a patient. Generally, fibroblasts are obtained from a subject by skin biopsy. The resulting tissue is placed in tissue-culture medium and separated into small pieces. Small chunks of the tissue are placed on a wet surface of a tissue culture flask, approximately ten pieces are placed in each flask. The flask is turned upside down, closed tight and left at room temperature over night. After 24 hours at room temperature, the flask is inverted and the chunks of tissue remain fixed to the bottom of the flask and fresh media (e.g., Ham's F12 media, with 10% FBS, penicillin and streptomycin) is added. The flasks are then incubated at 37 degree C. for approximately one week

[1017] At this time, fresh media is added and subsequently changed every several days. After an additional two weeks in culture, a monolayer of fibroblasts emerge. The monolayer is trypsinized and scaled into larger flasks.

[1018] pMV-7 (Kirschmeier, P. T. et al., DNA, 7:219-25 (1988)), flanked by the long terminal repeats of the Moloney murine sarcoma virus, is digested with EcoRI and HindIII and subsequently treated with calf intestinal phosphatase. The linear vector is fractionated on agarose gel and purified, using glass beads.

[1019] The cDNA encoding a polypeptide of the present invention can be amplified using PCR primers which correspond to the 5′ and 3′ end sequences respectively as set forth in Example 1 using primers and having appropriate restriction sites and initiation/stop codons, if necessary. Preferably, the 5′ primer contains an EcoRI site and the 3′ primer includes a HindIII site. Equal quantities of the Moloney murine sarcoma virus linear backbone and the amplified EcoRI and HindIII fragment are added together, in the presence of T4 DNA ligase. The resulting mixture is maintained under conditions appropriate for ligation of the two fragments. The ligation mixture is then used to transform bacteria HB101, which are then plated onto agar containing kanamycin for the purpose of confirming that the vector has the gene of interest properly inserted.

[1020] The amphotropic pA317 or GP+am12 packaging cells are grown in tissue culture to confluent density in Dulbecco's Modified Eagles Medium (DMEM) with 10% calf serum (CS), penicillin and streptomycin. The MSV vector containing the gene is then added to the media and the packaging cells transduced with the vector. The packaging cells now produce infectious viral particles containing the gene (the packaging cells are now referred to as producer cells).

[1021] Fresh media is added to the transduced producer cells, and subsequently, the media is harvested from a 10 cm plate of confluent producer cells. The spent media, containing the infectious viral particles, is filtered through a millipore filter to remove detached producer cells and this media is then used to infect fibroblast cells. Media is removed from a sub-confluent plate of fibroblasts and quickly replaced with the media from the producer cells. This media is removed and replaced with fresh media. If the titer of virus is high, then virtually all fibroblasts will be infected and no selection is required. If the titer is very low, then it is necessary to use a retroviral vector that has a selectable marker, such as neo or his. Once the fibroblasts have been efficiently infected, the fibroblasts are analyzed to determine whether protein is produced.

[1022] The engineered fibroblasts are then transplanted onto the host, either alone or after having been grown to confluence on cytodex 3 microcarrier beads.

### Example 17

### Gene Therapy Using Endogenous Genes Corresponding to Polynucleotides of the Invention

[1023] Another method of gene therapy according to the present invention involves operably associating the endogenous polynucleotide sequence of the invention with a promoter via homologous recombination as described, for example, in U.S. Pat. No. 5,641,670, issued Jun. 24, 1997; International Publication NO: WO 96/29411, published Sep. 26, 1996; International Publication NO: WO 94/12650, published Aug. 4, 1994; Koller et al., Proc. Natl. Acad. Sci. USA, 86:8932-8935 (1989); and Zijlstra et al., Nature, 342:435-438 (1989). This method involves the activation of a gene which is present in the target cells, but which is not expressed in the cells, or is expressed at a lower level than desired.

[1024] Polynucleotide constructs are made which contain a promoter and targeting sequences, which are homologous to the 5′ non-coding sequence of endogenous polynucleotide sequence, flanking the promoter. The targeting sequence will be sufficiently near the 5′ end of the polynucleotide sequence so the promoter will be operably linked to the endogenous sequence upon homologous recombination. The promoter and the targeting sequences can be amplified using PCR. Preferably, the amplified promoter contains distinct restriction enzyme sites on the 5′ and 3′ ends. Preferably, the 3′ end of the first targeting sequence contains the same restriction enzyme site as the 5′ end of the amplified promoter and the 5′ end of the second targeting sequence contains the same restriction site as the 3′ end of the amplified promoter.

[1025] The amplified promoter and the amplified targeting sequences are digested with the appropriate restriction enzymes and subsequently treated with calf intestinal phosphatase. The digested promoter and digested targeting sequences are added together in the presence of T4 DNA ligase. The resulting mixture is maintained under conditions appropriate for ligation of the two fragments. The construct is size fractionated on an agarose gel, then purified by phenol extraction and ethanol precipitation.

[1026] In this Example, the polynucleotide constructs are administered as naked polynucleotides via electroporation. However, the polynucleotide constructs may also be administered with transfection-facilitating agents, such as liposomes, viral sequences, viral particles, precipitating agents, etc. Such methods of delivery are known in the art.

[1027] Once the cells are transfected, homologous recombination will take place which results in the promoter being operably linked to the endogenous polynucleotide sequence. This results in the expression of polynucleotide corresponding to the polynucleotide in the cell. Expression may be detected by immunological staining, or any other method known in the art.

[1028] Fibroblasts are obtained from a subject by skin biopsy. The resulting tissue is placed in DMEM+10% fetal calf serum. Exponentially growing or early stationary phase fibroblasts are trypsinized and rinsed from the plastic surface with nutrient medium. An aliquot of the cell suspension is removed for counting, and the remaining cells are subjected to centrifugation. The supernatant is aspirated and the pellet is resuspended in 5 ml of electroporation buffer (20 mM HEPES pH 7.3, 137 mM NaCl, 5 mM KCl, 0.7 mM Na₂ HPO₄, 6 mM dextrose). The cells are recentrifuged, the supernatant aspirated, and the cells resuspended in electroporation buffer containing 1 mg/ml acetylated bovine serum albumin. The final cell suspension contains approximately 3×10⁶ cells/ml. Electroporation should be performed immediately following resuspension.

[1029] Plasmid DNA is prepared according to standard techniques. For example, to construct a plasmid for targeting to the locus corresponding to the polynucleotide of the invention, plasmid pUC18 (MBI Fermentas, Amherst, N.Y.) is digested with HindIII. The CMV promoter is amplified by PCR with an XbaI site on the 5′ end and a BamHI site on the 3′ end. Two non-coding sequences are amplified via PCR: one non-coding sequence (fragment 1) is amplified with a HindIII site at the 5′ end and an Xba site at the 3′end; the other non-coding sequence (fragment 2) is amplified with a BamHI site at the 5′end and a HindIII site at the 3′end. The CMV promoter and the fragments (1 and 2) are digested with the appropriate enzymes (CMV promoter—XbaI and BamHI; fragment 1—XbaI; fragment 2—BamHI) and ligated together. The resulting ligation product is digested with HindIII, and ligated with the HindIII-digested pUC18 plasmid.

[1030] Plasmid DNA is added to a sterile cuvette with a 0.4 cm electrode gap (Bio-Rad). The final DNA concentration is generally at least 120 μg/ml. 0.5 ml of the cell suspension (containing approximately 1.5.×10⁶ cells) is then added to the cuvette, and the cell suspension and DNA solutions are gently mixed. Electroporation is performed with a Gene-Pulser apparatus (Bio-Rad). Capacitance and voltage are set at 960 μF and 250-300 V, respectively. As voltage increases, cell survival decreases, but the percentage of surviving cells that stably incorporate the introduced DNA into their genome increases dramatically. Given these parameters, a pulse time of approximately 14-20 mSec should be observed.

[1031] Electroporated cells are maintained at room temperature for approximately 5 min, and the contents of the cuvette are then gently removed with a sterile transfer pipette. The cells are added directly to 10 ml of prewarmed nutrient media (DMEM with 15% calf serum) in a 10 cm dish and incubated at 37 degree C. The following day, the media is aspirated and replaced with 10 ml of fresh media and incubated for a further 16-24 hours.

[1032] The engineered fibroblasts are then injected into the host, either alone or after having been grown to confluence on cytodex 3 microcarrier beads. The fibroblasts now produce the protein product. The fibroblasts can then be introduced into a patient as described above.

### Example 18

### Method of Treatment Using Gene Therapy—In Vivo

[1033] Another aspect of the present invention is using in vivo gene therapy methods to prevent, treat, and/or ameliorate cancer or other hyperproliferative diseases and disorders. The gene therapy method relates to the introduction of naked nucleic acid (DNA, RNA, and antisense DNA or RNA) sequences into an animal to increase or decrease the expression of the polypeptide. The polynucleotide of the present invention may be operatively linked to (i.e., associated with) a promoter or any other genetic elements necessary for the expression of the polypeptide by the target tissue. Such gene therapy and delivery techniques and methods are known in the art, see, for example, WO90/11092, WO98/11779; U.S. Pat. Nos. 5,693,622, 5,705,151, 5,580,859; Tabata et al., Cardiovasc. Res. 35(3):470-479 (1997); Chao et al., Pharmacol. Res. 35(6):517-522 (1997); Wolff, Neuromuscul. Disord. 7(5):314-318 (1997); Schwartz et al., Gene Ther. 3(5):405-411 (1996); Tsurumi et al., Circulation 94(12):3281-3290 (1996) (incorporated herein by reference).

[1034] The polynucleotide constructs may be delivered by any method that delivers injectable materials to the cells of an animal, such as, injection into the interstitial space of tissues (heart, muscle, skin, lung, liver, intestine and the like). The polynucleotide constructs can be delivered in a pharmaceutically acceptable liquid or aqueous carrier.

[1035] The term “naked” polynucleotide, DNA or RNA, refers to sequences that are free from any delivery vehicle that acts to assist, promote, or facilitate entry into the cell, including viral sequences, viral particles, liposome formulations, lipofectin or precipitating agents and the like. However, the polynucleotides of the present invention may also be delivered in liposome formulations (such as those taught in Felgner P. L. et al. (1995) Ann. NY Acad. Sci. 772:126-139 and Abdallah B. et al. (1995) Biol. Cell 85(1):1-7) which can be prepared by methods well known to those skilled in the art.

[1036] The polynucleotide vector constructs used in the gene therapy method are preferably constructs that will not integrate into the host genome nor will they contain sequences that allow for replication. Any strong promoter known to those skilled in the art can be used for driving the expression of DNA. Unlike other gene therapy techniques, one major advantage of introducing naked nucleic acid sequences into target cells is the transitory nature of the polynucleotide synthesis in the cells. Studies have shown that non-replicating DNA sequences can be introduced into cells to provide production of the desired polypeptide for periods of up to six months.

[1037] The polynucleotide construct can be delivered to the interstitial space of tissues within an animal, including muscle, skin, brain, lung, liver, spleen, bone marrow, thymus, heart, lymph, blood, bone, cartilage, pancreas, kidney, gall bladder, stomach, intestine, testis, ovary, uterus, rectum, nervous system, eye, gland, and connective tissue. Interstitial space of the tissues comprises the intercellular fluid, mucopolysaccharide matrix among the reticular fibers of organ tissues, elastic fibers in the walls of vessels or chambers, collagen fibers of fibrous tissues, or that same matrix within connective tissue ensheathing muscle cells or in the lacunae of bone. It is similarly the space occupied by the plasma of the circulation and the lymph fluid of the lymphatic channels. Delivery to the interstitial space of muscle tissue is preferred for the reasons discussed below. They may be conveniently delivered by injection into the tissues comprising these cells. They are preferably delivered to and expressed in persistent, non-dividing cells which are differentiated, although delivery and expression may be achieved in non-differentiated or less completely differentiated cells, such as, for example, stem cells of blood or skin fibroblasts. In vivo muscle cells are particularly competent in their ability to take up and express polynucleotides.

[1038] For the naked polynucleotide injection, an effective dosage amount of DNA or RNA will be in the range of from about 0.05 g/kg body weight to about 50 mg/kg body weight. Preferably the dosage will be from about 0.005 mg/kg to about 20 mg/kg and more preferably from about 0.05 mg/kg to about 5 mg/kg. Of course, as the artisan of ordinary skill will appreciate, this dosage will vary according to the tissue site of injection. The appropriate and effective dosage of nucleic acid sequence can readily be determined by those of ordinary skill in the art and may depend on the condition being treated and the route of administration. The preferred route of administration is by the parenteral route of injection into the interstitial space of tissues. However, other parenteral routes may also be used, such as, inhalation of an aerosol formulation particularly for delivery to lungs or bronchial tissues, throat or mucous membranes of the nose. In addition, naked polynucleotide constructs can be delivered to arteries during angioplasty by the catheter used in the procedure.

[1039] The dose response effects of injected polynucleotide in muscle in vivo is determined as follows. Suitable template DNA for production of mRNA coding for polypeptide of the present invention is prepared in accordance with a standard recombinant DNA methodology. The template DNA, which may be either circular or linear, is either used as naked DNA or complexed with liposomes. The quadriceps muscles of mice are then injected with various amounts of the template DNA.

[1040] Five to six week old female and male Balb/C mice are anesthetized by intraperitoneal injection with 0.3 ml of 2.5% Avertin. A 1.5 cm incision is made on the anterior thigh, and the quadriceps muscle is directly visualized. The template DNA is injected in 0.1 ml of carrier in a 1 cc syringe through a 27 gauge needle over one minute, approximately 0.5 cm from the distal insertion site of the muscle into the knee and about 0.2 cm deep. A suture is placed over the injection site for future localization, and the skin is closed with stainless steel clips.

[1041] After an appropriate incubation time (e.g., 7 days) muscle extracts are prepared by excising the entire quadriceps. Every fifth 15 um cross-section of the individual quadriceps muscles is histochemically stained for protein expression. A time course for protein expression may be done in a similar fashion except that quadriceps from different mice are harvested at different times. Persistence of DNA in muscle following injection may be determined by Southern blot analysis after preparing total cellular DNA and HIRT supernatants from injected and control mice. The results of the above experimentation in mice can be used to extrapolate proper dosages and other treatment parameters in humans and other animals using naked DNA.

### Example 19

### Transgenic Animals

[1042] The polypeptides of the invention can also be expressed in transgenic animals. Animals of any species, including, but not limited to, mice, rats, rabbits, hamsters, guinea pigs, pigs, micro-pigs, goats, sheep, cows and non-human primates, e.g., baboons, monkeys, and chimpanzees may be used to generate transgenic animals. In a specific embodiment, techniques described herein or otherwise known in the art, are used to express polypeptides of the invention in humans, as part of a gene therapy protocol.

[1043] Any technique known in the art may be used to introduce the transgene (i.e., polynucleotides of the invention) into animals to produce the founder lines of transgenic animals. Such techniques include, but are not limited to, pronuclear microinjection (Paterson et al., Appl. Microbiol. Biotechnol. 40:691-698 (1994); Carver et al., Biotechnology (NY) 11:1263-1270 (1993); Wright et al., Biotechnology (NY) 9:830-834 (1991); and Hoppe et al., U.S. Pat. No. 4,873,191 (1989)); retrovirus mediated gene transfer into germ lines (Van der Putten et al., Proc. Natl. Acad. Sci., USA 82:6148-6152 (1985)), blastocysts or embryos; gene targeting in embryonic stem cells (Thompson et al., Cell 56:313-321 (1989)); electroporation of cells or embryos (Lo, 1983, Mol Cell. Biol. 3:1803-1814 (1983)); introduction of the polynucleotides of the invention using a gene gun (see, e.g., Ulmer et al., Science 259:1745 (1993); introducing nucleic acid constructs into embryonic pleuripotent stem cells and transferring the stem cells back into the blastocyst; and sperm-mediated gene transfer (Lavitrano et al., Cell 57:717-723 (1989); etc. For a review of such techniques, see Gordon, “Transgenic Animals,” Intl. Rev. Cytol. 115:171-229 (1989), which is incorporated by reference herein in its entirety.

[1044] Any technique known in the art may be used to produce transgenic clones containing polynucleotides of the invention, for example, nuclear transfer into enucleated oocytes of nuclei from cultured embryonic, fetal, or adult cells induced to quiescence (Campell et al., Nature 380:64-66 (1996); Wilmut et al., Nature 385:810-813 (1997)).

[1045] The present invention provides for transgenic animals that carry the transgene in all their cells, as well as animals which carry the transgene in some, but not all their cells, i.e., mosaic animals or chimeric. The transgene may be integrated as a single transgene or as multiple copies such as in concatamers, e.g., head-to-head tandems or head-to-tail tandems. The transgene may also be selectively introduced into and activated in a particular cell type by following, for example, the teaching of Lasko et al. (Lasko et al., Proc. Natl. Acad. Sci. USA 89:6232-6236 (1992)). The regulatory sequences required for such a cell-type specific activation will depend upon the particular cell type of interest, and will be apparent to those of skill in the art. When it is desired that the polynucleotide transgene be integrated into the chromosomal site of the endogenous gene, gene targeting is preferred. Briefly, when such a technique is to be utilized, vectors containing some nucleotide sequences homologous to the endogenous gene are designed for the purpose of integrating, via homologous recombination with chromosomal sequences, into and disrupting the function of the nucleotide sequence of the endogenous gene. The transgene may also be selectively introduced into a particular cell type, thus inactivating the endogenous gene in only that cell type, by following, for example, the teaching of Gu et al. (Gu et al., Science 265:103-106 (1994)). The regulatory sequences required for such a cell-type specific inactivation will depend upon the particular cell type of interest, and will be apparent to those of skill in the art.

[1046] Once transgenic animals have been generated, the expression of the recombinant gene may be assayed utilizing standard techniques. Initial screening may be accomplished by Southern blot analysis or PCR techniques to analyze animal tissues to verify that integration of the transgene has taken place. The level of mRNA expression of the transgene in the tissues of the transgenic animals may also be assessed using techniques which include, but are not limited to, Northern blot analysis of tissue samples obtained from the animal, in situ hybridization analysis, and reverse transcriptase-PCR (rt-PCR). Samples of transgenic gene-expressing tissue may also be evaluated immunocytochemically or immunohistochemically using antibodies specific for the transgene product.

[1047] Once the founder animals are produced, they may be bred, inbred, outbred, or crossbred to produce colonies of the particular animal. Examples of such breeding strategies include, but are not limited to: outbreeding of founder animals with more than one integration site in order to establish separate lines; inbreeding of separate lines in order to produce compound transgenics that express the transgene at higher levels because of the effects of additive expression of each transgene; crossing of heterozygous transgenic animals to produce animals homozygous for a given integration site in order to both augment expression and eliminate the need for screening of animals by DNA analysis; crossing of separate homozygous lines to produce compound heterozygous or homozygous lines; and breeding to place the transgene on a distinct background that is appropriate for an experimental model of interest.

[1048] Transgenic animals of the invention have uses which include, but are not limited to, animal model systems useful in elaborating the biological function of polypeptides of the present invention, studying conditions and/or disorders associated with aberrant expression, and in screening for compounds effective in ameliorating such conditions and/or disorders.

### Example 20

### Knock-Out Animals

[1049] Endogenous gene expression can also be reduced by inactivating or “knocking out” the gene and/or its promoter using targeted homologous recombination. (e.g., see Smithies et al., Nature 317:230-234 (1985); Thomas & Capecchi, Cell 51:503-512 (1987); Thompson et al., Cell 5:313-321 (1989); each of which is incorporated by reference herein in its entirety). For example, a mutant, non-functional polynucleotide of the invention (or a completely unrelated DNA sequence) flanked by DNA homologous to the endogenous polynucleotide sequence (either the coding regions or regulatory regions of the gene) can be used, with or without a selectable marker and/or a negative selectable marker, to transfect cells that express polypeptides of the invention in vivo. In another embodiment, techniques known in the art are used to generate knockouts in cells that contain, but do not express the gene of interest Insertion of the DNA construct, via targeted homologous recombination, results in inactivation of the targeted gene. Such approaches are particularly suited in research and agricultural fields where modifications to embryonic stem cells can be used to generate animal offspring with an inactive targeted gene (e.g., see Thomas & Capecchi 1987 and Thompson 1989, supra). However this approach can be routinely adapted for use in humans provided the recombinant DNA constructs are directly administered or targeted to the required site in vivo using appropriate viral vectors that will be apparent to those of skill in the art.

[1050] In further embodiments of the invention, cells that are genetically engineered to express the polypeptides of the invention, or alternatively, that are genetically engineered not to express the polypeptides of the invention (e.g., knockouts) are administered to a patient in vivo. Such cells may be obtained from the patient (i.e., animal, including human) or an MHC compatible donor and can include, but are not limited to fibroblasts, bone marrow cells, blood cells (e.g., lymphocytes), adipocytes, muscle cells, endothelial cells etc. The cells are genetically engineered in vitro using recombinant DNA techniques to introduce the coding sequence of polypeptides of the invention into the cells, or alternatively, to disrupt the coding sequence and/or endogenous regulatory sequence associated with the polypeptides of the invention, e.g., by transduction (using viral vectors, and preferably vectors that integrate the transgene into the cell genome) or transfection procedures, including, but not limited to, the use of plasmids, cosmids, YACs, naked DNA, electroporation, liposomes, etc. The coding sequence of the polypeptides of the invention can be placed under the control of a strong constitutive or inducible promoter or promoter/enhancer to achieve expression, and preferably secretion, of the polypeptides of the invention. The engineered cells which express and preferably secrete the polypeptides of the invention can be introduced into the patient systemically, e.g., in the circulation, or intraperitoneally.

[1051] Alternatively, the cells can be incorporated into a matrix and implanted in the body, e.g., genetically engineered fibroblasts can be implanted as part of a skin graft; genetically engineered endothelial cells can be implanted as part of a lymphatic or vascular graft (See, for example, Anderson et al. U.S. Pat. No. 5,399,349; and Mulligan & Wilson, U.S. Pat. No. 5,460,959 each of which is incorporated by reference herein in its entirety).

[1052] When the cells to be administered are non-autologous or non-MHC compatible cells, they can be administered using well known techniques which prevent the development of a host immune response against the introduced cells. For example, the cells may be introduced in an encapsulated form which, while allowing for an exchange of components with the immediate extracellular environment, does not allow the introduced cells to be recognized by the host immune system.

[1053] Transgenic and “knock-out” animals of the invention have uses which include, but are not limited to, animal model systems useful in elaborating the biological function of polypeptides of the present invention, studying conditions and/or disorders associated with aberrant expression, and in screening for compounds effective in ameliorating such conditions and/or disorders.

### Example 21

### Assays Detecting Stimulation or Inhibition of B Cell Proliferation and Differentiation

[1054] Generation of functional humoral immune responses requires both soluble and cognate signaling between B-lineage cells and their microenvironment. Signals may impart a positive stimulus that allows a B-lineage cell to continue its programmed development, or a negative stimulus that instructs the cell to arrest its current developmental pathway. To date, numerous stimulatory and inhibitory signals have been found to influence B cell responsiveness including IL-2, IL-4, L-5, IL-6, IL-7, IL10, IL-13, IL-14 and IL-15. Interestingly, these signals are by themselves weak effectors but can, in combination with various co-stimulatory proteins, induce activation, proliferation, differentiation, homing, tolerance and death among B cell populations.

[1055] One of the best studied classes of B-cell co-stimulatory proteins is the TNF-superfamily. Within this family CD40, CD27, and CD30 along with their respective ligands CD154, CD70, and CD153 have been found to regulate a variety of immune responses. Assays which allow for the detection and/or observation of the proliferation and differentiation of these B-cell populations and their precursors are valuable tools in determining the effects various proteins may have on these B-cell populations in terms of proliferation and differentiation. Listed below are two assays designed to allow for the detection of the differentiation, proliferation, or inhibition of B-cell populations and their precursors.

[1056] In Vitro Assay—Agonists or antagonists of the invention can be assessed for its ability to induce activation, proliferation, differentiation or inhibition and/or death in B-cell populations and their precursors. The activity of the agonists or antagonists of the invention on purified human tonsillar B cells, measured qualitatively over the dose range from 0.1 to 10,000 ng/mL, is assessed in a standard B-lymphocyte co-stimulation assay in which purified tonsillar B cells are cultured in the presence of either formalin-fixed Staphylococcus aureus Cowan I (SAC) or immobilized anti-human IgM antibody as the priming agent. Second signals such as IL-2 and IL-15 synergize with SAC and IgM crosslinking to elicit B cell proliferation as measured by tritiated-thymidine incorporation. Novel synergizing agents can be readily identified using this assay. The assay involves isolating human tonsillar B cells by magnetic bead (MACS) depletion of CD3-positive cells. The resulting cell population is greater than 95% B cells as assessed by expression of CD45R(B220).

[1057] Various dilutions of each sample are placed into individual wells of a 96-well plate to which are added 10⁵ B-cells suspended in culture medium (RPMI 1640 containing 10% FBS, 5×10⁻⁵M 2ME, 100 U/ml penicillin, 10 ug/ml streptomycin, and 10⁻⁵ dilution of SAC) in a total volume of 150 ul. Proliferation or inhibition is quantitated by a 20 h pulse (1 uCi/well) with 3H-thymidine (6.7 Ci/mM) beginning 72 h post factor addition. The positive and negative controls are IL2 and medium respectively.

[1058] In vivo Assay—BALB/c mice are injected (i.p.) twice per day with buffer only, or 2 mg/Kg of agonists or antagonists of the invention, or truncated forms thereof. Mice receive this treatment for 4 consecutive days, at which time they are sacrificed and various tissues and serum collected for analyses. Comparison of H&E sections from normal spleens and spleens treated with agonists or antagonists of the invention identify the results of the activity of the agonists or antagonists on spleen cells, such as the diffusion of peri-arterial lymphatic sheaths, and/or significant increases in the nucleated cellularity of the red pulp regions, which may indicate the activation of the differentiation and proliferation of B-cell populations. Immunohistochemical studies using a B cell marker, anti-CD45R(B220), are used to determine whether any physiological changes to splenic cells, such as splenic disorganization, are due to increased B-cell representation within loosely defined B-cell zones that infiltrate established T-cell regions.

[1059] Flow cytometric analyses of the spleens from mice treated with agonist or antagonist is used to indicate whether the agonists or antagonists specifically increases the proportion of ThB+, CD45R(B220)dull B cells over that which is observed in control mice.

[1060] Likewise, a predicted consequence of increased mature B-cell representation in vivo is a relative increase in serum Ig titers. Accordingly, serum IgM and IgA levels are compared between buffer and agonists or antagonists-treated mice.

[1061] The studies described in this example tested activity of agonists or antagonists of the invention. However, one skilled in the art could easily modify the exemplified studies to test the activity of polynucleotides or polypeptides of the invention (e.g., gene therapy).

### Example 22

### T Cell Proliferation Assay

[1062] A CD3-induced proliferation assay is performed on PBMCs and is measured by the uptake of ³H-thymidine. The assay is performed as follows. Ninety-six well plates are coated with 100 μl/well of mAb to CD3 (HIT3a, Pharmingen) or isotype-matched control mAb (B33.1) overnight at 4 degrees C. (1 μg/ml in 0.05M bicarbonate buffer, pH 9.5), then washed three times with PBS. PBMC are isolated by F/H gradient centrifugation from human peripheral blood and added to quadruplicate wells (5×10⁴/well) of mAb coated plates in RPMI containing 10% FCS and P/S in the presence of varying concentrations of agonists or antagonists of the invention (total volume 200 ul). Relevant protein buffer and medium alone are controls. After 48 hr. culture at 37 degrees C., plates are spun for 2 min. at 1000 rpm and 100 μl of supernatant is removed and stored −20 degrees C. for measurement of IL-2 (or other cytokines) if effect on proliferation is observed. Wells are supplemented with 100 ul of medium containing 0.5 uCi of 3H-thymidine and cultured at 37 degrees C. for 18-24 hr. Wells are harvested and incorporation of 3H-thymidine used as a measure of proliferation. Anti-CD3 alone is the positive control for proliferation. IL-2 (100 U/ml) is also used as a control which enhances proliferation. Control antibody which does not induce proliferation of T cells is used as the negative control for the effects of agonists or antagonists of the invention.

[1063] The studies described in this example tested activity of agonists or antagonists of the invention. However, one skilled in the art could easily modify the exemplified studies to test the activity of polynucleotides or polypeptides of the invention (e.g., gene therapy).

### Example 23

### Effect of Agonists or Antagonists of the Invention on the Expression of MHC Class II, Costimulatory and Adhesion Molecules and Cell Differentiation of Monocytes and Monocyte-Derived Human Dendritic Cells

[1064] Dendritic cells are generated by the expansion of proliferating precursors found in the peripheral blood: adherent PBMC or elutriated monocytic fractions are cultured for 7-10 days with GM-CSF (50 ng/ml) and IL-4 (20 ng/ml). These dendritic cells have the characteristic phenotype of immature cells (expression of CD1, CD80, CD86, CD40 and MHC class II antigens). Treatment with activating factors, such as TNF-α, causes a rapid change in surface phenotype (increased expression of MHC class I and II, costimulatory and adhesion molecules, downregulation of FCγRII, upregulation of CD83). These changes correlate with increased antigen-presenting capacity and with functional maturation of the dendritic cells.

[1065] FACS analysis of surface antigens is performed as follows. Cells are treated 1-3 days with increasing concentrations of agonist or antagonist of the invention or LPS (positive control), washed with PBS containing 1% BSA and 0.02 mM sodium azide, and then incubated with 1:20 dilution of appropriate FITC- or PE-labeled monoclonal antibodies for 30 minutes at 4 degrees C. After an additional wash, the labeled cells are analyzed by flow cytometry on a FACScan (Becton Dickinson).

[1066] Effect on the production of cytokines. Cytokines generated by dendritic cells, in particular IL-12, are important in the initiation of T-cell dependent immune responses. IL-12 strongly influences the development of Th1 helper T-cell immune response, and induces cytotoxic T and NK cell function. An ELISA is used to measure the IL-12 release as follows. Dendritic cells (10⁶/ml) are treated with increasing concentrations of agonists or antagonists of the invention for 24 hours. LPS (100 ng/ml) is added to the cell culture as positive control. Supernatants from the cell cultures are then collected and analyzed for IL-12 content using commercial ELISA kit (e.g., R & D Systems (Minneapolis, Minn.)). The standard protocols provided with the kits are used.

[1067] Effect on the expression of MHC Class II, costimulatory and adhesion molecules. Three major families of cell surface antigens can be identified on monocytes: adhesion molecules, molecules involved in antigen presentation, and Fc receptor. Modulation of the expression of MHC class I antigens and other costimulatory molecules, such as B7 and ICAM-1, may result in changes in the antigen presenting capacity of monocytes and ability to induce T cell activation. Increased expression of Fc receptors may correlate with improved monocyte cytotoxic activity, cytokine release and phagocytosis.

[1068] FACS analysis is used to examine the surface antigens as follows. Monocytes are treated 1-5 days with increasing concentrations of agonists or antagonists of the invention or LPS (positive control), washed with PBS containing 1% BSA and 0.02 mM sodium azide, and then incubated with 1:20 dilution of appropriate FITC- or PE-labeled monoclonal antibodies for 30 minutes at 4 degrees C. After an additional wash, the labeled cells are analyzed by flow cytometry on a FACScan (Becton Dickinson).

[1069] Monocyte activation and/or increased survival. Assays for molecules that activate (or alternatively, inactivate) monocytes and/or increase monocyte survival (or alternatively, decrease monocyte survival) are known in the art and may routinely be applied to determine whether a molecule of the invention functions as an inhibitor or activator of monocytes. Agonists or antagonists of the invention can be screened using the three assays described below. For each of these assays, Peripheral blood mononuclear cells (PBMC) are purified from single donor leukopacks (American Red Cross, Baltimore, Md.) by centrifugation through a Histopaque gradient (Sigma). Monocytes are isolated from PBMC by counterflow centrifugal elutriation.

[1070] Monocyte Survival Assay. Human peripheral blood monocytes progressively lose viability when cultured in absence of serum or other stimuli. Their death results from internally regulated processes (apoptosis). Addition to the culture of activating factors, such as TNF-alpha dramatically improves cell survival and prevents DNA fragmentation. Propidium iodide (PI) staining is used to measure apoptosis as follows. Monocytes are cultured for 48 hours in polypropylene tubes in serum-free medium (positive control), in the presence of 100 ng/ml TNP-alpha (negative control), and in the presence of varying concentrations of the compound to be tested. Cells are suspended at a concentration of 2×10⁶/ml in PBS containing PI at a final concentration of 5 μg/ml, and then incubated at room temperature for 5 minutes before FACScan analysis. PI uptake has been demonstrated to correlate with DNA fragmentation in this experimental paradigm.

[1071] Effect on cytokine release. An important function of monocytes/macrophages is their regulatory activity on other cellular populations of the immune system through the release of cytokines after stimulation. An ELISA to measure cytokine release is performed as follows. Human monocytes are incubated at a density of 5×10⁵ cells/ml with increasing concentrations of agonists or antagonists of the invention and under the same conditions, but in the absence of agonists or antagonists. For IL-12 production, the cells are primed overnight with IFN (100 U/ml) in the presence of agonist or antagonist of the invention. LPS (10 ng/ml) is then added. Conditioned media are collected after 24 h and kept frozen until use. Measurement of TNF-alpha, IL-10, MCP-1 and IL-8 is then performed using a commercially available ELISA kit (e.g., R & D Systems (Minneapolis, Minn.)) and applying the standard protocols provided with the kit.

[1072] Oxidative burst Purified monocytes are plated in 96-w plate at 2-1×10⁵ cell/well. Increasing concentrations of agonists or antagonists of the invention are added to the wells in a total volume of 0.2 ml culture medium (RPMI 1640+10% FCS, glutamine and antibiotics). After 3 days incubation, the plates are centrifuged and the medium is removed from the wells. To the macrophage monolayers, 0.2 ml per well of phenol red solution (140 mM NaCl, 10 mM potassium phosphate buffer pH 7.0, 5.5 mM dextrose, 0.56 mM phenol red and 19 U/ml of HRPO) is added, together with the stimulant (200 nM PMA). The plates are incubated at 37° C. for 2 hours and the reaction is stopped by adding 20 μl 1N NaOH per well. The absorbance is read at 610 nm. To calculate the amount of H₂O₂ produced by the macrophages, a standard curve of a H₂O₂ solution of known molarity is performed for each experiment.

[1073] The studies described in this example tested activity of agonists or antagonists of the invention. However, one skilled in the art could easily modify the exemplified studies to test the activity of polynucleotides or polypeptides of the invention (e.g., gene therapy).

### Example 24

### Biological Effects of Agonists or Antagonists of the Invention

[1074] Astrocyte and Neuronal Assays

[1075] Agonists or antagonists of the invention, expressed in Escherichia coli and purified as described above, can be tested for activity in promoting the survival, neurite outgrowth, or phenotypic differentiation of cortical neuronal cells and for inducing the proliferation of glial fibrillary acidic protein immunopositive cells, astrocytes. The selection of cortical cells for the bioassay is based on the prevalent expression of FGF-1 and FGF-2 in cortical structures and on the previously reported enhancement of cortical neuronal survival resulting from FGF-2 treatment. A thymidine incorporation assay, for example, can be used to elucidate an agonist or antagonist of the invention's activity on these cells.

[1076] Moreover, previous reports describing the biological effects of FGF-2 (basic FGF) on cortical or hippocampal neurons in vitro have demonstrated increases in both neuron survival and neurite outgrowth (Walicke et al., “Fibroblast growth factor promotes survival of dissociated hippocampal neurons and enhances neurite extension.” Proc. Natl. Acad. Sci. USA 83:3012-3016. (1986), assay herein incorporated by reference in its entirety). However, reports from experiments done on PC-12 cells suggest that these two responses are not necessarily synonymous and may depend on not only which FGF is being tested but also on which receptor(s) are expressed on the target cells. Using the primary cortical neuronal culture paradigm, the ability of an agonist or antagonist of the invention to induce neurite outgrowth can be compared to the response achieved with FGF-2 using, for example, a thymidine incorporation assay.

[1077] Fibroblast and Endothelial Cell Assays

[1078] Human lung fibroblasts are obtained from Clonetics (San Diego, Calif.) and maintained in growth media from Clonetics. Dermal microvascular endothelial cells are obtained from Cell Applications (San Diego, Calif.). For proliferation assays, the human lung fibroblasts and dermal microvascular endothelial cells can be cultured at 5,000 cells/well in a 96-well plate for one day in growth medium. The cells are then incubated for one day in 0.1% BSA basal medium. After replacing the medium with fresh 0.1% BSA medium, the cells are incubated with the test proteins for 3 days. Alamar Blue (Alamar Biosciences, Sacramento, Calif.) is added to each well to a final concentration of 10%. The cells are incubated for 4 hr. Cell viability is measured by reading in a CytoFluor fluorescence reader. For the PGE₂ assays, the human lung fibroblasts are cultured at 5,000 cells/well in a 96-well plate for one day. After a medium change to 0.1% BSA basal medium, the cells are incubated with FGF-2 or agonists or antagonists of the invention with or without IL-1α for 24 hours. The supernatants are collected and assayed for PGE₂ by EIA kit (Cayman, Ann Arbor, Mich.). For the IL-6 assays, the human lung fibroblasts are cultured at 5,000 cells/well in a 96-well plate for one day. After a medium change to 0.1% BSA basal medium, the cells are incubated with FGF-2 or with or without agonists or antagonists of the invention IL-1α for 24 hours. The supernatants are collected and assayed for IL-6 by ELISA kit (Endogen, Cambridge, Mass.).

[1079] Human lung fibroblasts are cultured with FGF-2 or agonists or antagonists of the invention for 3 days in basal medium before the addition of Alamar Blue to assess effects on growth of the fibroblasts. FGF-2 should show a stimulation at 10-2500 ng/ml which can be used to compare stimulation with agonists or antagonists of the invention.

[1080] Parkinson Models.

[1081] The loss of motor function in Parkinson's disease is attributed to a deficiency of striatal dopamine resulting from the degeneration of the nigrostriatal dopaminergic projection neurons. An animal model for Parkinson's that has been extensively characterized involves the systemic administration of 1-methyl-4 phenyl 1,2,3,6-tetrahydropyridine (MPTP). In the CNS, MPTP is taken-up by astrocytes and catabolized by monoamine oxidase B to 1-methyl-4-phenyl pyridine (MPP⁺) and released. Subsequently, MPP⁺ is actively accumulated in dopaminergic neurons by the high-affinity reuptake transporter for dopamine. MPP⁺ is then concentrated in mitochondria by the electrochemical gradient and selectively inhibits nicotidamide adenine disphosphate: ubiquinone oxidoreductionase (complex I), thereby interfering with electron transport and eventually generating oxygen radicals.

[1082] It has been demonstrated in tissue culture paradigms that FGF-2 (basic FGF) has trophic activity towards nigral dopaminergic neurons (Ferrari et al., Dev. Biol. 1989). Recently, Dr. Unsicker's group has demonstrated that administering FGF-2 in gel foam implants in the striatum results in the near complete protection of nigral dopaminergic neurons from the toxicity associated with MPTP exposure (Otto and Unsicker, J. Neuroscience, 1990).

[1083] Based on the data with FGF-2, agonists or antagonists of the invention can be evaluated to determine whether it has an action similar to that of FGF-2 in enhancing dopaminergic neuronal survival in vitro and it can also be tested in vivo for protection of dopaminergic neurons in the striatum from the damage associated with MPTP treatment. The potential effect of an agonist or antagonist of the invention is first examined in vitro in a dopaminergic neuronal cell culture paradigm. The cultures are prepared by dissecting the midbrain floor plate from gestation day 14 Wistar rat embryos. The tissue is dissociated with trypsin and seeded at a density of 200,000 cells/cm² on polyorthinine-laminin coated glass coverslips. The cells are maintained in Dulbecco's Modified Eagle's medium and F12 medium containing hormonal supplements (N1). The cultures are fixed with paraformaldehyde after 8 days in vitro and are processed for tyrosine hydroxylase, a specific marker for dopaminergic neurons; immunohistochemical staining. Dissociated cell cultures are prepared from embryonic rats. The culture medium is changed every third day and the factors are also added at that time.

[1084] Since the dopaminergic neurons are isolated from animals at gestation day 14, a developmental time which is past the stage when the dopaminergic precursor cells are proliferating, an increase in the number of tyrosine hydroxylase immunopositive neurons would represent an increase in the number of dopaminergic neurons surviving in vitro. Therefore, if an agonist or antagonist of the invention acts to prolong the survival of dopaminergic neurons, it would suggest that the agonist or antagonist may be involved in Parkinson's Disease.

[1085] The studies described in this example tested activity of agonists or antagonists of the invention. However, one skilled in the art could easily modify the exemplified studies to test the activity of polynucleotides or polypeptides of the invention (e.g., gene therapy).

### Example 25

### The Effect of Agonists or Antagonists of the Invention on the Growth of Vascular Endothelial Cells

[1086] On day 1, human umbilical vein endothelial cells (C) are seeded at 2-5×10⁴ cells/35 mm dish density in M199 medium containing 4% fetal bovine serum (PBS), 16 units/ml heparin, and 50 units/ml endothelial cell growth supplements (ECGS, Biotechnique, Inc.). On day 2, the medium is replaced with M199 containing 10% FBS, 8 units/ml heparin. An agonist or antagonist of the invention, and positive controls, such as VEGF and basic FGF (bFGF) are added, at varying concentrations. On days 4 and 6, the medium is replaced. On day 8, cell number is determined with a Coulter Counter.

[1087] An increase in the number of HUVEC cells indicates that the compound of the invention may proliferate vascular endothelial cells, while a decrease in the number of HUVEC cells indicates that the compound of the invention inhibits vascular endothelial cells.

[1088] The studies described in this example tested activity of a polypeptide of the invention. However, one skilled in the art could easily modify the exemplified studies to test the activity of polynucleotides (e.g., gene therapy), agonists, and/or antagonists of the invention.

### Example 26

### Rat Corneal Wound Healing Model

[1089] This animal model shows the effect of an agonist or antagonist of the invention on neovascularization. The experimental protocol includes:

[1090] Making a 1-1.5 mm long incision from the center of cornea into the stromal layer.

[1091] Inserting a spatula below the lip of the incision facing the outer corner of the eye.

[1092] Making a pocket (its base is 1-1.5 mm form the edge of the eye).

[1093] Positioning a pellet, containing 50 ng-5 ug of an agonist or antagonist of the invention, within the pocket.

[1094] Treatment with an agonist or antagonist of the invention can also be applied topically to the corneal wounds in a dosage range of 20 mg-500 mg (daily treatment for five days).

[1095] The studies described in this example tested activity of agonists or antagonists of the invention. However, one skilled in the art could easily modify the exemplified studies to test the activity of polynucleotides or polypeptides of the invention (e.g., gene therapy).

### Example 27

### Diabetic Mouse and Glucocorticoid-Impaired Wound Healing Models

[1096] Diabetic db+/db+ Mouse Model.

[1097] To demonstrate that an agonist or antagonist of the invention accelerates the healing process, the genetically diabetic mouse model of wound healing is used. The full thickness wound healing model in the db+/db+ mouse is a well characterized, clinically relevant and reproducible model of impaired wound healing. Healing of the diabetic wound is dependent on formation of granulation tissue and re-epithelialization rather than contraction (Gartner, M. H. et al., J. Surg. Res. 52:389 (1992); Greenhalgh, D. G. et al., Am. J. Pathol. 136:1235 (1990)).

[1098] The diabetic animals have many of the characteristic features observed in Type II diabetes mellitus. Homozygous (db+/db+) mice are obese in comparison to their normal heterozygous (db+/+m) littermates. Mutant diabetic (db+/db+) mice have a single autosomal recessive mutation on chromosome 4 (db+) (Coleman et al. Proc. Natl. Acad. Sci. USA 77:283-293 (1982)). Animals show polyphagia, polydipsia and polyuria. Mutant diabetic mice (db+/db+) have elevated blood glucose, increased or normal insulin levels, and suppressed cell-mediated immunity (Mandel et al., J. Immunol. 120:1375 (1978); Debray-Sachs, M. et al., Clin. Exp. Immunol. 51(1):1-7 (1983); Leiter et al., Am. J. of Pathol. 114:46-55 (1985)). Peripheral neuropathy, myocardial complications, and microvascular lesions, basement membrane thickening and glomerular filtration abnormalities have been described in these animals (Norido, F. et al., Exp. Neurol. 83(2):221-232 (1984); Robertson et al., Diabetes 29(1):60-67 (1980); Giacomelli et al., Lab Invest. 40(4):460-473 (1979); Coleman, D. L., Diabetes 31 (Suppl):1-6 (1982)). These homozygous diabetic mice develop hyperglycemia that is resistant to insulin analogous to human type II diabetes (Mandel et al., J. Immunol. 120:1375-1377 (1978)).

[1099] The characteristics observed in these animals suggests that healing in this model may be similar to the healing observed in human diabetes (Greenhalgh, et al., Am. J. of Pathol. 136:1235-1246 (1990)).

[1100] Genetically diabetic female C57BL/KsJ (db+/db+) mice and their non-diabetic (db+/+m) heterozygous littermates are used in this study (Jackson Laboratories). The animals are purchased at 6 weeks of age and are 8 weeks old at the beginning of the study. Animals are individually housed and received food and water ad libitum. All manipulations are performed using aseptic techniques. The experiments are conducted according to the rules and guidelines of Human Genome Sciences, Inc. Institutional Animal Care and Use Committee and the Guidelines for the Care and Use of Laboratory Animals.

[1101] Wounding protocol is performed according to previously reported methods (Tsuboi, R. and Rifkin, D. B., J. Exp. Med. 172:245-251 (1990)). Briefly, on the day of wounding, animals are anesthetized with an intraperitoneal injection of Avertin (0.01 mg/mL), 2,2,2-tribromoethanol and 2-methyl-2-butanol dissolved in deionized water. The dorsal region of the animal is shaved and the skin washed with 70% ethanol solution and iodine. The surgical area is dried with sterile gauze prior to wounding. An 8 mm full-thickness wound is then created using a Keyes tissue punch. Immediately following wounding, the surrounding skin is gently stretched to eliminate wound expansion. The wounds are left open for the duration of the experiment. Application of the treatment is given topically for 5 consecutive days commencing on the day of wounding. Prior to treatment, wounds are gently cleansed with sterile saline and gauze sponges.

[1102] Wounds are visually examined and photographed at a fixed distance at the day of surgery and at two day intervals thereafter. Wound closure is determined by daily measurement on days 1-5 and on day 8. Wounds are measured horizontally and vertically using a calibrated Jameson caliper. Wounds are considered healed if granulation tissue is no longer visible and the wound is covered by a continuous epithelium.

[1103] An agonist or antagonist of the invention is administered using at a range different doses, from 4 mg to 500 mg per wound per day for 8 days in vehicle. Vehicle control groups received 5 mL of vehicle solution.

[1104] Animals are euthanized on day 8 with an intraperitoneal injection of sodium pentobarbital (300 mg/kg). The wounds and surrounding skin are then harvested for histology and immunohistochemistry. Tissue specimens are placed in 10% neutral buffered formalin in tissue cassettes between biopsy sponges for further processing.

[1105] Three groups of 10 animals each (5 diabetic and 5 non-diabetic controls) are evaluated: 1) Vehicle placebo control, 2) untreated group, and 3) treated group.

[1106] Wound closure is analyzed by measuring the area in the vertical and horizontal axis and obtaining the total square area of the wound. Contraction is then estimated by establishing the differences between the initial wound area (day 0) and that of post treatment (day 8). The wound area on day 1 is 64 mm², the corresponding size of the dermal punch. Calculations are made using the following formula:
[Open area on day 8]−[Open area on day 1]/[Open area on day 1]

[1107] Specimens are fixed in 10% buffered formalin and paraffin embedded blocks are sectioned perpendicular to the wound surface (5 mm) and cut using a Reichert-Jung microtome. Routine hematoxylin-eosin (H&E) staining is performed on cross-sections of bisected wounds. Histologic examination of the wounds are used to assess whether the healing process and the morphologic appearance of the repaired skin is altered by treatment with an agonist or antagonist of the invention. This assessment included verification of the presence of cell accumulation, inflammatory cells, capillaries, fibroblasts, re-epithelialization and epidermal maturity (Greenhalgh, D. G. et al., Am. J. Pathol. 136:1235 (1990)). A calibrated lens micrometer is used by a blinded observer.

[1108] Tissue sections are also stained immunohistochemically with a polyclonal rabbit anti-human keratin antibody using ABC Elite detection system. Human skin is used as a positive tissue control while non-immune IgG is used as a negative control. Keratinocyte growth is determined by evaluating the extent of reepithelialization of the wound using a calibrated lens micrometer.

[1109] Proliferating cell nuclear antigen/cyclin (PCNA) in skin specimens is demonstrated by using anti-PCNA antibody (1:50) with an ABC Elite detection system. Human colon cancer served as a positive tissue control and human brain tissue is used as a negative tissue control. Each specimen included a section with omission of the primary antibody and substitution with non-immune mouse IgG. Ranking of these sections is based on the extent of proliferation on a scale of 0-8, the lower side of the scale reflecting slight proliferation to the higher side reflecting intense proliferation.

[1110] Experimental data are analyzed using an unpaired t test. A p value of <0.05 is considered significant.

[1111] Steroid Impaired Rat Model

[1112] The inhibition of wound healing by steroids has been well documented in various in vitro and in vivo systems (Wahl, Glucocorticoids and Wound healing. In: Anti-Inflammatory Steroid Action: Basic and Clinical Aspects. 280-302 (1989); Wahl et al., J. Immunol. 115: 476-481 (1975); Werb et al., J. Exp. Med. 147:1684-1694 (1978)). Glucocorticoids retard wound healing by inhibiting angiogenesis, decreasing vascular permeability (Ebert et al., An. Intern. Med. 37:701-705 (1952)), fibroblast proliferation, and collagen synthesis (Beck et al., Growth Factors. 5: 295-304 (1991); Haynes et al., J. Clin. Invest. 61: 703-797 (1978)) and producing a transient reduction of circulating monocytes (Haynes et al., J. Clin. Invest. 61: 703-797 (1978); Wahl, “Glucocorticoids and wound healing”, In: Antiinflammatory Steroid Action: Basic and Clinical Aspects, Academic Press, New York, pp. 280-302 (1989)). The systemic administration of steroids to impaired wound healing is a well establish phenomenon in rats (Beck et al., Growth Factors. 5: 295-304 (1991); Haynes et al., J. Clin. Invest. 61: 703-797 (1978); Wahl, “Glucocorticoids and wound healing”, In: Antiinflammatory Steroid Action: Basic and Clinical Aspects, Academic Press, New York, pp. 280-302 (1989); Pierce et al., Proc. Natl. Acad. Sci. USA 86: 2229-2233 (1989)).

[1113] To demonstrate that an agonist or antagonist of the invention can accelerate the healing process, the effects of multiple topical applications of the agonist or antagonist on full thickness excisional skin wounds in rats in which healing has been impaired by the systemic administration of methylprednisolone is assessed.

[1114] Young adult male Sprague Dawley rats weighing 250-300 g (Charles River Laboratories) are used in this example. The animals are purchased at 8 weeks of age and are 9 weeks old at the beginning of the study. The healing response of rats is impaired by the systemic administration of methylprednisolone (17 mg/kg/rat intramuscularly) at the time of wounding. Animals are individually housed and received food and water ad libitum. All manipulations are performed using aseptic techniques. This study is conducted according to the rules and guidelines of Human Genome Sciences, Inc. Institutional Animal Care and Use Committee and the Guidelines for the Care and Use of Laboratory Animals.

[1115] The wounding protocol is followed according to section A, above. On the day of wounding, animals are anesthetized with an intramuscular injection of ketamine (50 mg/kg) and xylazine (5 mg/kg). The dorsal region of the animal is shaved and the skin washed with 70% ethanol and iodine solutions. The surgical area is dried with sterile gauze prior to wounding. An 8 mm full-thickness wound is created using a Keyes tissue punch. The wounds are left open for the duration of the experiment. Applications of the testing materials are given topically once a day for 7 consecutive days commencing on the day of wounding and subsequent to methylprednisolone administration. Prior to treatment, wounds are gently cleansed with sterile saline and gauze sponges.

[1116] Wounds are visually examined and photographed at a fixed distance at the day of wounding and at the end of treatment. Wound closure is determined by daily measurement on days 1-5 and on day 8. Wounds are measured horizontally and vertically using a calibrated Jameson caliper. Wounds are considered healed if granulation tissue is no longer visible and the wound is covered by a continuous epithelium.

[1117] The agonist or antagonist of the invention is administered using at a range different doses, from 4 mg to 500 mg per wound per day for 8 days in vehicle. Vehicle control groups received 50 mL of vehicle solution.

[1118] Animals are euthanized on day 8 with an intraperitoneal injection of sodium pentobarbital (300 mg/kg). The wounds and surrounding skin are then harvested for histology. Tissue specimens are placed in 10% neutral buffered formalin in tissue cassettes between biopsy sponges for further processing.

[1119] Three groups of 10 animals each (5 with methylprednisolone and 5 without glucocorticoid) are evaluated: 1) Untreated group 2) Vehicle placebo control 3) treated groups.

[1120] Wound closure is analyzed by measuring the area in the vertical and horizontal axis and obtaining the total area of the wound. Closure is then estimated by establishing the differences between the initial wound area (day 0) and that of post treatment (day 8). The wound area on day 1 is 64 mm², the corresponding size of the dermal punch. Calculations are made using the following formula:
[Open area on day 8]−[Open area on day 1]/[Open area on day 1]

[1121] Specimens are fixed in 10% buffered formalin and paraffin embedded blocks are sectioned perpendicular to the wound surface (5 mm) and cut using an Olympus microtome. Routine hematoxylin-eosin (H&E) staining is performed on cross-sections of bisected wounds. Histologic examination of the wounds allows assessment of whether the healing process and the morphologic appearance of the repaired skin is improved by treatment with an agonist or antagonist of the invention. A calibrated lens micrometer is used by a blinded observer to determine the distance of the wound gap.

[1122] Experimental data are analyzed using an unpaired t test. A p value of <0.05 is considered significant.

[1123] The studies described in this example tested activity of agonists or antagonists of the invention. However, one skilled in the art could easily modify the exemplified studies to test the activity of polynucleotides or polypeptides of the invention (e.g., gene therapy).

### Example 28

### Lymphadema Animal Model

[1124] The purpose of this experimental approach is to create an appropriate and consistent lymphedema model for testing the therapeutic effects of an agonist or antagonist of the invention in lymphangiogenesis and reestablishment of the lymphatic circulatory system in the rat hind limb. Effectiveness is measured by swelling volume of the affected limb, quantification of the amount of lymphatic vasculature, total blood plasma protein, and histopathology. Acute lymphedema is observed for 7-10 days. Perhaps more importantly, the chronic progress of the edema is followed for up to 34 weeks.

[1125] Prior to beginning surgery, blood sample is drawn for protein concentration analysis. Male rats weighing approximately ˜350 g are dosed with Pentobarbital. Subsequently, the right legs are shaved from knee to hip. The shaved area is swabbed with gauze soaked in 70% EtOH. Blood is drawn for serum total protein testing. Circumference and volumetric measurements are made prior to injecting dye into paws after marking 2 measurement levels (0.5 cm above heel, at mid-pt of dorsal paw). The intradermal dorsum of both right and left paws are injected with 0.05 ml of 1% Evan's Blue. Circumference and volumetric measurements are then made following injection of dye into paws.

[1126] Using the knee joint as a landmark, a mid-leg inguinal incision is made circumferentially allowing the femoral vessels to be located. Forceps and hemostats are used to dissect and separate the skin flaps. After locating the femoral vessels, the lymphatic vessel that runs along side and underneath the vessel(s) is located. The main lymphatic vessels in this area are then electrically coagulated or suture ligated.

[1127] Using a microscope, muscles in back of the leg (near the semitendinosis and adductors) are bluntly dissected. The popliteal lymph node is then located. The 2 proximal and 2 distal lymphatic vessels and distal blood supply of the popliteal node are then ligated by suturing. The popliteal lymph node, and any accompanying adipose tissue, is then removed by cutting connective tissues.

[1128] Care is taken to control any mild bleeding resulting from this procedure. After lymphatics are occluded, the skin flaps are sealed by using liquid skin (Vetbond) (AJ Buck). The separated skin edges are sealed to the underlying muscle tissue while leaving a gap of ˜0.5 cm around the leg. Skin also may be anchored by suturing to underlying muscle when necessary.

[1129] To avoid infection, animals are housed individually with mesh (no bedding). Recovering animals are checked daily through the optimal edematous peak, which typically occurred by day 5-7. The plateau edematous peak are then observed. To evaluate the intensity of the lymphedema, the circumference and volumes of 2 designated places on each paw before operation and daily for 7 days are measured. The effect of plasma proteins on lymphedema is determined and whether protein analysis is a useful testing perimeter is also investigated. The weights of both control and edematous limbs are evaluated at 2 places. Analysis is performed in a blind manner.

[1130] Circumference Measurements: Under brief gas anesthetic to prevent limb movement, a cloth tape is used to measure limb circumference. Measurements are done at the ankle bone and dorsal paw by 2 different people and those 2 readings are averaged. Readings are taken from both control and edematous limbs.

[1131] Volumetric Measurements: On the day of surgery, animals are anesthetized with Pentobarbital and are tested prior to surgery. For daily volumetrics animals are under brief halothane anesthetic (rapid immobilization and quick recovery), and both legs are shaved and equally marked using waterproof marker on legs. Legs are first dipped in water, then dipped into instrument to each marked level then measured by Buxco edema software (Chen/Victor). Data is recorded by one person, while the other is dipping the limb to marked area.

[1132] Blood-plasma protein measurements: Blood is drawn, spun, and serum separated prior to surgery and then at conclusion for total protein and Ca2⁺ comparison.

[1133] Limb Weight Comparison: After drawing blood, the animal is prepared for tissue collection. The limbs are amputated using a quillitine, then both experimental and control legs are cut at the ligature and weighed. A second weighing is done as the tibio-cacaneal joint is disarticulated and the foot is weighed.

[1134] Histological Preparations: The transverse muscle located behind the knee (popliteal) area is dissected and arranged in a metal mold, filled with freezeGel, dipped into cold methylbutane, placed into labeled sample bags at −80EC until sectioning. Upon sectioning, the muscle is observed under fluorescent microscopy for lymphatics.

[1135] The studies described in this example tested activity of agonists or antagonists of the invention. However, one skilled in the art could easily modify the exemplified studies to test the activity of polynucleotides or polypeptides of the invention (e.g., gene therapy).

### Example 29

### Suppression of TNF Alpha-Induced Adhesion Molecule Expression by an Agonist or Antagonist of the Invention

[1136] The recruitment of lymphocytes to areas of inflammation and angiogenesis involves specific receptor-ligand interactions between cell surface adhesion molecules (CAMs) on lymphocytes and the vascular endothelium. The adhesion process, in both normal and pathological settings, follows a multi-step cascade that involves intercellular adhesion molecule-1 (ICAM-1), vascular cell adhesion molecule-1 (VCAM-1), and endothelial leukocyte adhesion molecule-1 (E-selectin) expression on endothelial cells (EC). The expression of these molecules and others on the vascular endothelium determines the efficiency with which leukocytes may adhere to the local vasculature and extravasate into the local tissue during the development of an inflammatory response. The local concentration of cytokines and growth factor participate in the modulation of the expression of these CAMs.

[1137] Tumor necrosis factor alpha (TNF-a), a potent proinflammatory cytokine, is a stimulator of all three CAMs on endothelial cells and may be involved in a wide variety of inflammatory responses, often resulting in a pathological outcome.

[1138] The potential of an agonist or antagonist of the invention to mediate a suppression of TNF-a induced CAM expression can be examined. A modified ELISA assay which uses ECs as a solid phase absorbent is employed to measure the amount of CAM expression on TNF-a treated ECs when co-stimulated with a member of the FGF family of proteins.

[1139] To perform the experiment, human umbilical vein endothelial cell (HUVEC) cultures are obtained from pooled cord harvests and maintained in growth medium (EGM-2; Clonetics, San Diego, Calif.) supplemented with 10% FCS and 1% penicillin/streptomycin in a 37 degree C. humidified incubator containing 5% CO₂. HUVECs are seeded in 96-well plates at concentrations of 1×10⁴ cells/well in EGM medium at 37 degree C. for 18-24 hrs or until confluent The monolayers are subsequently washed 3 times with a serum-free solution of RPMI-1640 supplemented with 100 U/ml penicillin and 100 mg/ml streptomycin, and treated with a given cytokine and/or growth factor(s) for 24 h at 37 degree C. Following incubation, the cells are then evaluated for CAM expression.

[1140] Human Umbilical Vein Endothelial cells (HUVECs) are grown in a standard 96 well plate to confluence. Growth medium is removed from the cells and replaced with 90 ul of 199 Medium (10% FBS). Samples for testing and positive or negative controls are added to the plate in triplicate (in 10 ul volumes). Plates are incubated at 37 degree C. for either 5 h (selectin and integrin expression) or 24 h (integrin expression only). Plates are aspirated to remove medium and 100 μl of 0.1% paraformaldehyde-PBS (with Ca++ and Mg++) is added to each well. Plates are held at 4° C. for 30 min.

[1141] Fixative is then removed from the wells and wells are washed 1× with PBS (+Ca,Mg)+0.5% BSA and drained. Do not allow the wells to dry. Add 10 μl of diluted primary antibody to the test and control wells. Anti-ICAM-1-Biotin, Anti-VCAM-1-Biotin and Anti-E-selectin-Biotin are used at a concentration of 10 μg/ml (1:10 dilution of 0.1 mg/ml stock antibody). Cells are incubated at 37° C. for 30 min. in a humidified environment. Wells are washed ×3 with PBS (+Ca,Mg)+0.5% BSA.

[1142] Then add 20 μl of diluted ExtrAvidin-Alkaline Phosphotase (1:5,000 dilution) to each well and incubated at 37° C. for 30 min. Wells are washed ×3 with PBS (+Ca,Mg)+0.5% BSA. 1 tablet of p-Nitrophenol Phosphate pNPP is dissolved in 5 ml of glycine buffer (pH 10.4). 100 μl of pNPP substrate in glycine buffer is added to each test well. Standard wells in triplicate are prepared from the working dilution of the ExtrAvidin-Alkaline Phosphotase in glycine buffer: 1:5,000 (10⁰)>10^{-0.5}>10⁻¹>10^{-1.5}. 5 μl of each dilution is added to triplicate wells and the resulting AP content in each well is 5.50 ng, 1.74 ng, 0.55 ng, 0.18 ng. 100 μl of pNNP reagent must then be added to each of the standard wells. The plate must be incubated at 37° C. for 4 h. A volume of 50 μl of 3M NaOH is added to all wells. The results are quantified on a plate reader at 405 nm. The background subtraction option is used on blank wells filled with glycine buffer only. The template is set up to indicate the concentration of AP-conjugate in each standard well [5.50 ng; 1.74 ng; 0.55 ng; 0.18 ng]. Results are indicated as amount of bound AP-conjugate in each sample.

[1143] The studies described in this example tested activity of agonists or antagonists of the invention. However, one skilled in the art could easily modify the exemplified studies to test the activity of polynucleotides or polypeptides of the invention (e.g., gene therapy).

### Example 30

### Production of Polypeptide of the Invention for High-Throughput Screening Assays

[1144] The following protocol produces a supernatant containing polypeptide of the present invention to be tested. This supernatant can then be used in the Screening Assays described in Examples 32-41.

[1145] First, dilute Poly-D-Lysine (644 587 Boehringer-Mannheim) stock solution (1 mg/ml in PBS) 1:20 in PBS (w/o calcium or magnesium 17-516F Biowhittaker) for a working solution of 50 ug/ml. Add 200 ul of this solution to each well (24 well plates) and incubate at RT for 20 minutes. Be sure to distribute the solution over each well (note: a 12-channel pipetter may be used with tips on every other channel). Aspirate off the Poly-D-Lysine solution and rinse with 1 ml PBS (Phosphate Buffered Saline). The PBS should remain in the well until just prior to plating the cells and plates may be poly-lysine coated in advance for up to two weeks.

[1146] Plate 293T cells (do not carry cells past P+20) at 2×10⁵ cells/well in 0.5 ml DMEM (Dulbecco's Modified Eagle Medium)(with 4.5 G/L glucose and L-glutamine (12-604F Biowhittaker))/10% heat inactivated FBS (14-503F Biowhittaker)/1× Penstrep (17-602E Biowhittaker). Let the cells grow overnight.

[1147] The next day, mix together in a sterile solution basin: 300 ul Lipofectamine (18324-012 Gibco/BRL) and 5 ml Optimem I (31985070 Gibco/BRL)/96-well plate. With a small volume multi-channel pipetter, aliquot approximately 2 ug of an expression vector containing a polynucleotide insert, produced by the methods described in Examples 8-10, into an appropriately labeled 96-well round bottom plate. With a multichannel pipetter, add 50 ul of the Lipofectamine/Optimem I mixture to each well. Pipette up and down gently to mix. Incubate at RT 1545 minutes. After about 20 minutes, use a multi-channel pipetter to add 150 ul Optimem I to each well. As a control, one plate of vector DNA lacking an insert should be transfected with each set of transfections.

[1148] Preferably, the transfection should be performed by tag-teaming the following tasks. By tag-teaming, hands on time is cut in half, and the cells do not spend too much time on PBS. First, person A aspirates off the media from four 24-well plates of cells, and then person B rinses each well with 0.5-1 ml PBS. Person A then aspirates off PBS rinse, and person B, using a12-channel pipetter with tips on every other channel, adds the 200 ul of DNA/Lipofectamine/Optimem I complex to the odd wells first, then to the even wells, to each row on the 24-well plates. Incubate at 37 degree C. for 6 hours.

[1149] While cells are incubating, prepare appropriate media, either 1% BSA in DMEM with 1×penstrep, or HGS CHO-5 media (116.6 mg/L of CaCl₂ (anhyd); 0.00130 mg/L CuSO₄-5H₂O; 0.050 mg/L of Fe(NO₃)₃-9H₂O; 0.417 mg/L of FeSO₄˜7H₂O; 311.80 mg/L of Kcl; 28.64 mg/L of MgCl₂; 48.84 mg/L of MgSO₄; 6995.50 mg/L of NaCl; 2400.0 mg/L of NaHCO₃; 62.50 mg/L of NaH₂PO₄—H₂0; 71.02 mg/L of Na₂HPO4; 0.4320 mg/L of ZnSO₄.7H₂O; 0.002 mg/L of Arachidonic Acid; 1.022 mg/L of Cholesterol; 0.070 mg/L of DL-alpha-Tocopherol-Acetate; 0.0520 mg/L of Linoleic Acid; 0.010 mg/L of Linolenic Acid; 0.010 mg/L of Myristic Acid; 0.010 mg/L of Oleic Acid; 0.010 mg/L of Palmitric Acid; 0.010 mg/L of Palmitic Acid; 100 mg/L of Pluronic F-68; 0.010 mg/L of Stearic Acid; 2.20 mg/L of Tween 80; 4551 mg/L of D-Glucose; 130.85 mg/ml of L-Alanine; 147.50 mg/ml of L-Arginine-HCL; 7.50 mg/ml of L-Asparagine-H₂0; 6.65 mg/ml of L-Aspartic Acid; 29.56 mg/ml of L-Cystine-2HCL-H₂0; 31.29 mg/ml of L-Cystine-2HCL; 7.35 mg/ml of L-Glutamic Acid; 365.0 mg/ml of L-Glutamine; 18.75 mg/ml of Glycine; 52.48 mg/ml of L-Histidine-HCL-H₂0; 106.97 mg/ml of L-Isoleucine; 111.45 mg/ml of L-Leucine; 163.75 mg/ml of L-Lysine HCL; 32.34 mg/ml of L-Methionine; 68.48 mg/ml of L-Phenylalainine; 40.0 mg/ml of L-Proline; 26.25 mg/ml of L-Serine; 101.05 mg/ml of L-Threonine; 19.22 mg/ml of L-Tryptophan; 91.79 mg/ml of L-Tryrosine-2Na-2H₂0; and 99.65 mg/ml of L-Valine; 0.0035 mg/L of Biotin; 3.24 mg/L of D-Ca Pantothenate; 11.78 mg/L of Choline Chloride; 4.65 mg/L of Folic Acid; 15.60 mg/L of i-Inositol; 3.02 mg/L of Niacinamide; 3.00 mg/L of Pyridoxal HCL; 0.031 mg/L of Pyridoxine HCL; 0.319 mg/L of Riboflavin; 3.17 mg/L of Thiamine HCL; 0.365 mg/L of Thymidine; 0.680 mg/L of Vitamin B₁₂; 25 mM of HEPES Buffer, 2.39 mg/L of Na Hypoxanthine; 0.105 mg/L of Lipoic Acid; 0.081 mg/L of Sodium Putrescine-2HCL; 55.0 mg/L of Sodium Pyruvate; 0.0067 mg/L of Sodium Selenite; 20 uM of Ethanolamine; 0.122 mg/L of Ferric Citrate; 41.70 mg/L of Methyl-B-Cyclodextrin complexed with Linoleic Acid; 33.33 mg/L of Methyl-B-Cyclodextrin complexed with Oleic Acid; 10 mg/L of Methyl-B-Cyclodextrin complexed with Retinal Acetate. Adjust osmolarity to 327 mOsm) with 2 mm glutamine and 1×penstrep. (BSA (81-068-3 Bayer) 100 gm dissolved in 1 L DMEM for a 10% BSA stock solution). Filter the media and collect 50 ul for endotoxin assay in 15 ml polystyrene conical.

[1150] The transfection reaction is terminated, preferably by tag-teaming, at the end of the incubation period. Person A aspirates off the transfection media, while person B adds 1.5 ml appropriate media to each well. Incubate at 37 degree C. for 45 or 72 hours depending on the media used: 1% BSA for 45 hours or CHO-5 for 72 hours.

[1151] On day four, using a 300 ul multichannel pipetter, aliquot 600 ul in one 1 ml deep well plate and the remaining supernatant into a 2 ml deep well. The supernatants from each well can then be used in the assays described in Examples 32-39.

[1152] It is specifically understood that when activity is obtained in any of the assays described below using a supernatant, the activity originates from either the polypeptide of the present invention directly (e.g., as a secreted protein) or by polypeptide of the present invention inducing expression of other proteins, which are then secreted into the supernatant. Thus, the invention further provides a method of identifying the protein in the supernatant characterized by an activity in a particular assay.

### Example 31

### Construction of GAS Reporter Construct

[1153] One signal transduction pathway involved in the differentiation and proliferation of cells is called the Jaks-STATs pathway. Activated proteins in the Jaks-STATs pathway bind to gamma activation site “GAS” elements or interferon-sensitive responsive element (“ISRE”), located in the promoter of many genes. The binding of a protein to these elements alter the expression of the associated gene.

[1154] GAS and ISRE elements are recognized by a class of transcription factors called Signal Transducers and Activators of Transcription, or “STATs.” There are six members of the STATs family. Stat1 and Stat3 are present in many cell types, as is Stat2 (as response to IFN-alpha is widespread). Stat4 is more restricted and is not in many cell types though it has been found in T helper class I, cells after treatment with IL-12. Stat5 was originally called mammary growth factor, but has been found at higher concentrations in other cells including myeloid cells. It can be activated in tissue culture cells by many cytokines.

[1155] The STATs are activated to translocate from the cytoplasm to the nucleus upon tyrosine phosphorylation by a set of kinases known as the Janus Kinase (“Jaks”) family. Jaks represent a distinct family of soluble tyrosine kinases and include Tyk2, Jak1, Jak2, and Jak3. These kinases display significant sequence similarity and are generally catalytically inactive in resting cells.

[1156] The Jaks are activated by a wide range of receptors summarized in the Table below. (Adapted from review by Schidler and Damell, Ann. Rev. Biochem. 64:621-51 (1995)). A cytokine receptor family, capable of activating Jaks, is divided into two groups: (a) Class 1 includes receptors for IL-2, IL-3, IL-4, IL-6, IL-7, IL-9, IL-11, IL-12, IL-15, Epo, PRL, GH, G-CSF, GM-CSF, LIF, CNTF, and thrombopoietin; and (b) Class 2 includes IFN-a, IFN-g, and IL-10. The Class 1 receptors share a conserved cysteine motif (a set of four conserved cysteines and one tryptophan) and a WSXWS motif (a membrane proximal region encoding Trp-Ser-Xaa-Trp-Ser (SEQ ID NO: 2)).

[1157] Thus, on binding of a ligand to a receptor, Jaks are activated, which in turn activate STATs, which then translocate and bind to GAS elements. This entire process is encompassed in the Jaks-STATs signal transduction pathway. Therefore, activation of the Jaks-STATs pathway, reflected by the binding of the GAS or the ISRE element, can be used to indicate proteins involved in the proliferation and differentiation of cells. For example, growth factors and cytokines are known to activate the Jaks-STATs pathway (See Table below). Thus, by using GAS elements linked to reporter molecules, activators of the Jaks-STATs pathway can be identified.

| | JAKs | | | | | |
|---|---|---|---|---|---|---|
| Ligand | tyk2 | Jak1 | Jak2 | Jak3 | STATS | GAS(elements) or ISRE |
| IFN family | | | | | | |
| IFN-a/B | + | + | − | − | 1, 2, 3 | ISRE |
| IFN-g | | + | + | − | 1 | GAS (IRF1 > Lys6 > IFP) |
| Il-10 | + | ? | ? | − | 1, 3 | |
| gp130 family | | | | | | |
| IL-6 (Pleiotropic) | + | + | + | ? | 1, 3 | GAS (IRF1 > Lys6 > IFP) |
| Il-11 (Pleiotropic) | ? | + | ? | ? | 1, 3 | |
| OnM (Pleiotropic) | ? | + | + | ? | 1, 3 | |
| LIF (Pleiotropic) | ? | + | + | ? | 1, 3 | |
| CNTF (Pleiotropic) | −/+ | + | + | ? | 1, 3 | |
| G-CSF (Pleiotropic) | ? | + | ? | ? | 1, 3 | |
| IL-12 (Pleiotropic) | + | − | + | + | 1, 3 | |
| g-C family | | | | | | |
| IL-2 (lymphocytes) | − | + | − | + | 1, 3, 5 | GAS |
| IL-4 (lymph/myeloid) | − | + | − | + | 6 | GAS (IRF1 = IFP >> Ly6) |
| | | | | | | (IgH) |
| IL-7 (lymphocytes) | − | + | − | + | 5 | GAS |
| IL-9 (lymphocytes) | − | + | − | + | 5 | GAS |
| IL-13 (lymphocyte) | − | + | ? | ? | 6 | GAS |
| IL-15 | ? | + | ? | + | 5 | GAS |
| gp140 family | | | | | | |
| IL-3 (myeloid) | − | − | + | − | 5 | GAS |
| | | | | | | (IRF1 > IFP >> Ly6) |
| IL-5 (myeloid) | − | − | + | − | 5 | GAS |
| GM-CSF (myeloid) | − | − | + | − | 5 | GAS |
| Growth hormone family | | | | | | |
| GH | ? | − | + | − | 5 | |
| PRL | ? | +/− | + | − | 1, 3, 5 | |
| EPO | ? | − | + | − | 5 | GAS(B- |
| | | | | | | CAS > IRF1 = IFP >> Ly6) |
| Receptor Tyrosine Kinases | | | | | | |
| EGF | ? | + | + | − | 1, 3 | GAS (IRF1) |
| PDGF | ? | + | + | − | 1, 3 | |
| CSF-1 | ? | + | + | − | 1, 3 | GAS (not IRF1) |

[1158] To construct a synthetic GAS containing promoter element, which is used in the Biological Assays described in Examples 32-33, a PCR based strategy is employed to generate a GAS-SV40 promoter sequence. The 5′ primer contains four tandem copies of the GAS binding site found in the IRF1 promoter and previously demonstrated to bind STATs upon induction with a range of cytokines (Ro an et al., Immunity 1:457-468 (1994).), although other GAS or ISRE elements can be used instead. The 5′ primer also contains 18 bp of sequence complementary to the SV40 early promoter sequence and is flanked with an XhoI site. The sequence of the 5′ primer is:

[1159] The downstream primer is complementary to the SV40 promoter and is flanked with a Hind III site: 5′:GCGGCAAGCTTTTTGCAAAGCCTAGGC:3′ (SEQ ID NO: 4)

[1160] PCR amplification is performed using the SV40 promoter template present in the B-gal:promoter plasmid obtained from Clontech. The resulting PCR fragment is digested with XhoI/Hind III and subcloned into BLSK2-. (Stratagene.) Sequencing with forward and reverse primers confirms that the insert contains the following sequence:

[1161] With this GAS promoter element linked to the SV40 promoter, a GAS:SEAP2 reporter construct is next engineered. Here, the reporter molecule is a secreted alkaline phosphatase, or “SEAP.” Clearly, however, any reporter molecule can be instead of SEAP, in this or in any of the other Examples. Well known reporter molecules that can be used instead of SEAP include chloramphenicol acetyltransferase (CAT), luciferase, alkaline phosphatase, B-galactosidase, green fluorescent protein (GFP), or any protein detectable by an antibody.

[1162] The above sequence confirmed synthetic GAS-V40 promoter element is subcloned into the pSEAP-Promoter vector obtained from Clontech using HindIII and XhoI, effectively replacing the SV40 promoter with the amplified GAS:SV40 promoter element, to create the GAS-SEAP vector. However, this vector does not contain a neomycin resistance gene, and therefore, is not preferred for mammalian expression systems.

[1163] Thus, in order to generate mammalian stable cell lines expressing the GAS-SEAP reporter, the GAS-SEAP cassette is removed from the GAS-SEAP vector using SalI and NotI, and inserted into a backbone vector containing the neomycin resistance gene, such as pGFP-1 (Clontech), using these restriction sites in the multiple cloning site, to create the GAS-SEAP/Neo vector. Once this vector is transfected into mammalian cells, this vector can then be used as a reporter molecule for GAS binding as described in Examples 32-33.

[1164] Other constructs can be made using the above description and replacing GAS with a different promoter sequence. For example, construction of reporter molecules containing EGR and NF-KB promoter sequences are described in Examples 34 and 35. However, many other promoters can be substituted using the protocols described in these Examples. For instance, SRE, IL-2, NFAT, or Osteocalcin promoters can be substituted, alone or in combination (e.g., GAS/NF-KB/EGR, GAS/NF-KB, Il-2/NFAT, or NF-KB/GAS). Similarly, other cell lines can be used to test reporter construct activity, such as HELA (epithelial), HUVEC (endothelial), Reh (B-cell), Saos-2 (osteoblast), HUVAC (aortic), or Cardiomyocyte.

### Example 32

### High-Throughout Screening Assay for T-Cell Activity

[1165] The following protocol is used to assess T-cell activity by identifying factors, and determining whether supernate containing a polypeptide of the invention proliferates and/or differentiates T-cells. T-cell activity is assessed using the GAS/SEAP/Neo construct produced in Example 31. Thus, factors that increase SEAP activity indicate the ability to activate the Jaks-STATS signal transduction pathway. The T-cell used in this assay is Jurkat T-cells (ATCC Accession No. TIB-152), although Molt-3 cells (ATCC Accession No. CRL-1552) and Molt-4 cells (ATCC Accession No. CRL-1582) cells can also be used.

[1166] Jurkat T-cells are lymphoblastic CD4+ Th1 helper cells. In order to generate stable cell lines, approximately 2 million Jurkat cells are transfected with the GAS-SEAP/neo vector using DMRIE-C (Life Technologies)(transfection procedure described below). The transfected cells are seeded to a density of approximately 20,000 cells per well and transfectants resistant to 1 mg/ml genticin selected. Resistant colonies are expanded and then tested for their response to increasing concentrations of interferon gamma. The dose response of a selected clone is demonstrated.

[1167] Specifically, the following protocol will yield sufficient cells for 75 wells containing 200 ul of cells. Thus, it is either scaled up, or performed in multiple to generate sufficient cells for multiple 96 well plates. Jurkat cells are maintained in RPMI+10% serum with 1% Pen-Strep. Combine 2.5 mls of OPTI-MEM (Life Technologies) with 10 ug of plasmid DNA in a T25 flask. Add 2.5 ml OPTI-MEM containing 50 ul of DMRIE-C and incubate at room temperature for 1545 mins.

[1168] During the incubation period, count cell concentration, spin down the required number of cells (10⁷ per transfection), and resuspend in OPTI-MEM to a final concentration of 10⁷ cells/ml. Then add 1 ml of 1×10⁷ cells in OPTI-MEM to T25 flask and incubate at 37 degree C. for 6 hrs. After the incubation, add 10 ml of RPMI+15% serum

[1169] The Jurkat:GAS-SEAP stable reporter lines are maintained in RPMI+10% serum, 1 mg/ml Genticin, and 1% Pen-Strep. These cells are treated with supernatants containing polypeptide of the present invention or polypeptide of the present invention induced polypeptides as produced by the protocol described in Example 30.

[1170] On the day of treatment with the supernatant, the cells should be washed and resuspended in fresh RPMI+10% serum to a density of 500,000 cells per ml. The exact number of cells required will depend on the number of supernatants being screened. For one 96 well plate, approximately 10 million cells (for 10 plates, 100 million cells) are required.

[1171] Transfer the cells to a triangular reservoir boat, in order to dispense the cells into a 96 well dish, using a 12 channel pipette. Using a 12 channel pipette, transfer 200 ul of cells into each well (therefore adding 100,000 cells per well).

[1172] After all the plates have been seeded, 50 ul of the supernatants are transferred directly from the 96 well plate containing the supernatants into each well using a 12 channel pipette. In addition, a dose of exogenous interferon gamma (0.1, 1.0, 10 ng) is added to wells H9, H10, and H11 to serve as additional positive controls for the assay.

[1173] The 96 well dishes containing Jurkat cells treated with supernatants are placed in an incubator for 48 hrs (note: this time is variable between 48-72 hrs). 35 ul samples from each well are then transferred to an opaque 96 well plate using a 12 channel pipette. The opaque plates should be covered (using sellophene covers) and stored at −20 degree C. until SEAP assays are performed according to Example 36. The plates containing the remaining treated cells are placed at 4 degree C. and serve as a source of material for repeating the assay on a specific well if desired.

[1174] As a positive control, 100 Unit/ml interferon gamma can be used which is known to activate Jurkat T cells. Over 30 fold induction is typically observed in the positive control wells.

[1175] The above protocol nay be used in the generation of both transient, as well as, stable transfected cells, which would be apparent to those of skill in the art.

### Example 33

### High-Throughput Screening Assay Identifying Myeloid Activity

[1176] The following protocol is used to assess myeloid activity of polypeptide of the present invention by determining whether polypeptide of the present invention proliferates and/or differentiates myeloid cells. Myeloid cell activity is assessed using the GAS/SEAP/Neo construct produced in Example 31. Thus, factors that increase SEAP activity indicate the ability to activate the Jaks-TATS signal transduction pathway. The myeloid cell used in this assay is U937, a pre-monocyte cell line, although TF-1, HL60, or KG1 can be used.

[1177] To transiently transfect U937 cells with the GAS/SEAP/Neo construct produced in Example 31, a DEAE-Dextran method (Kharbanda et. al., 1994, Cell Growth & Differentiation, 5:259-265) is used. First, harvest 2×10⁷ U937 cells and wash with PBS. The U937 cells are usually grown in RPMI 1640 medium containing 10% heat-inactivated fetal bovine serum FBS) supplemented with 100 units/ml penicillin and 100 mg/ml streptomycin.

[1178] Next, suspend the cells in 1 ml of 20 mM Tris-HCl (pH 7.4) buffer containing 0.5 mg/ml DEAE-Dextran, 8 ug GAS-SEAP2 plasmid DNA, 140 mM NaCl, 5 mM KCl, 375 uM Na₂HPO₄.7H₂O, 1 mM MgCl₂, and 675 uM CaCl₂. Incubate at 37 degrees C. for 45 min.

[1179] Wash the cells with RPMI 1640 medium containing 10% FBS and then resuspend in 10 ml complete medium and incubate at 37 degree C. for 36 hr.

[1180] The GAS-SEAP/U937 stable cells are obtained by growing the cells in 400 ug/ml G418. The G418-free medium is used for routine growth but every one to two months, the cells should be re-grown in 400 ug/ml G418 for couple of passages.

[1181] These cells are tested by harvesting 1×10⁸ cells (this is enough for ten 96-well plates assay) and wash with PBS. Suspend the cells in 200 ml above described growth medium, with a final density of 5×10⁵ cells/ml. Plate 200 ul cells per well in the 96-well plate (or 1×10⁵ cells/well).

[1182] Add 50 ul of the supernatant prepared by the protocol described in Example 30. Incubate at 37 degee C for 48 to 72 hr. As a positive control, 100 Unit/ml interferon gamma can be used which is known to activate U937 cells. Over 30 fold induction is typically observed in the positive control wells. SEAP assay the supernatant according to the protocol described in Example 36.

### Example 34

### High-Throughput Screening Assay Identifying Neuronal Activity

[1183] When cells undergo differentiation and proliferation, a group of genes are activated through many different signal transduction pathways. One of these genes, EGR1 (early growth response gene 1), is induced in various tissues and cell types upon activation. The promoter of EGR1 is responsible for such induction. Using the EGR1 promoter linked to reporter molecules, activation of cells can be assessed by polypeptide of the present invention.

[1184] Particularly, the following protocol is used to assess neuronal activity in PC12 cell lines. PC12 cells (rat phenochromocytoma cells) are known to proliferate and/or differentiate by activation with a number of mitogens, such as TPA (tetradecanoyl phorbol acetate), NGF (nerve growth factor), and EGF (epidermal growth factor). The EGR1 gene expression is activated during this treatment. Thus, by stably transfecting PC12 cells with a construct containing an EGR promoter linked to SEAP reporter, activation of PC12 cells by polypeptide of the present invention can be assessed.

[1185] The EGR/SEAP reporter construct can be assembled by the following protocol. The EGR-1 promoter sequence (−633 to +1)(Sakamoto K et al., Oncogene 6:867-871 (1991)) can be PCR amplified from human genomic DNA using the following primers:

[1186] Using the GAS:SEAP/Neo vector produced in Example 31, EGR1 amplified product can then be inserted into this vector. Linearize the GAS:SEAP/Neo vector using restriction enzymes XhoI/HindIII, removing the GAS/SV40 stuffer. Restrict the EGR1 amplified product with these same enzymes. Ligate the vector and the EGR1 promoter.

[1187] To prepare 96 well-plates for cell culture, two mls of a coating solution (1:30 dilution of collagen type I (Upstate Biotech Inc. Cat#08-115) in 30% ethanol (filter sterilized)) is added per one 10 cm plate or 50 ml per well of the 96-well plate, and allowed to air dry for 2 hr.

[1188] PC12 cells are routinely grown in RPMI-1640 medium (Bio Whittaker) containing 10% horse serum (JRH BIOSCIENCES, Cat. # 12449-78P), 5% heat-inactivated fetal bovine serum (FBS) supplemented with 100 units/ml penicillin and 100 ug/ml streptomycin on a precoated 10 cm tissue culture dish. One to four split is done every three to four days. Cells are removed from the plates by scraping and resuspended with pipetting up and down for more than 15 times.

[1189] Transfect the EGR/SEAP/Neo construct into PC12 using the Lipofectamine protocol described in Example 30. EGR-SEAP/PC12 stable cells are obtained by growing the cells in 300 ug/ml G418. The G418-free medium is used for routine growth but every one to two months, the cells should be re-grown in 300 ug/ml G418 for couple of passages.

[1190] To assay for neuronal activity, a 10 cm plate with cells around 70 to 80% confluent is screened by removing the old medium. Wash the cells once with PBS (Phosphate buffered saline). Then starve the cells in low serum medium (RPMI-1640 containing 1% horse serum and 0.5% FBS with antibiotics) overnight.

[1191] The next morning, remove the medium and wash the cells with PBS. Scrape off the cells from the plate, suspend the cells well in 2 ml low serum medium Count the cell number and add more low serum medium to reach final cell density as 5×10⁵ cells/ml.

[1192] Add 200 ul of the cell suspension to each well of 96-well plate (equivalent to 1×10⁵ cells/well). Add 50 ul supernatant produced by Example 30, 37 degree C. for 48 to 72 hr. As a positive control, a growth factor known to activate PC12 cells through EGR can be used, such as 50 ng/ul of Neuronal Growth Factor (NGF). Over fifty-fold induction of SEAP is typically seen in the positive control wells. SEAP assay the supernatant according to Example 36.

### Example 35

### High-Throughput Screening Assay for T-Cell Activity

[1193] NF-KB (Nuclear Factor KB) is a transcription factor activated by a wide variety of agents including the inflammatory cytokines IL-1 and TNF, CD30 and CD40, lymphotoxin-alpha and lymphotoxin-beta, by exposure to LPS or thrombin, and by expression of certain viral gene products. As a transcription factor, NF-KB regulates the expression of genes involved in immune cell activation, control of apoptosis (NF-KB appears to shield cells from apoptosis), B and T-cell development, anti-viral and antimicrobial responses, and multiple stress responses.

[1194] In non-stimulated conditions, NF-KB is retained in the cytoplasm with I-KB (Inhibitor KB). However, upon stimulation, I-KB is phosphorylated and degraded, causing NF-KB to shuttle to the nucleus, thereby activating transcription of target genes. Target genes activated by NF-KB include IL-2, IL-6, GM-CSF, ICAM-1 and class 1 MHC.

[1195] Due to its central role and ability to respond to a range of stimuli, reporter constructs utilizing the NF-KB promoter element are used to screen the supernatants produced in Example 30. Activators or inhibitors of NF-KB would be useful in detecting, preventing, diagnosing, prognosticating, treating, and/or ameliorating diseases. For example, inhibitors of NF-KB could be used to treat those diseases related to the acute or chronic activation of NF-KB, such as rheumatoid arthritis.

[1196] To construct a vector containing the NF-KB promoter element, a PCR based strategy is employed. The upstream primer contains four tandem copies of the NF-KB binding site (GGGGACTTTCCC) (SEQ ID NO: 8), 18 bp of sequence complementary to the 5′ end of the SV40 early promoter sequence, and is flanked with an XhoI site:

[1197] The downstream primer is complementary to the 3′ end of the SV40 promoter and is flanked with a Hind III site:

[1198] PCR amplification is performed using the SV40 promoter template present in the pB-gal:promoter plasmid obtained from Clontech. The resulting PCR fragment is digested with XhoI and Hind E11 and subcloned into BLSK2-. (Stratagene) Sequencing with the T7 and T3 primers confirms the insert contains the following sequence:

[1199] Next, replace the SV40 minimal promoter element present in the pSEAP2-promoter plasmid (Clontech) with this NF-KB/SV40 fragment using XhoI and HindIII. However, this vector does not contain a neomycin resistance gene, and therefore, is not preferred for mammalian expression systems.

[1200] In order to generate stable mammalian cell lines, the NF-KB/SV40/SEAP cassette is removed from the above NF-KB/SEAP vector using restriction enzymes Sail and NotI, and inserted into a vector containing neomycin resistance. Particularly, the NF-KB/SV40/SEAP cassette was inserted into pGFP-1 (Clontech), replacing the GFP gene, after restricting pGFP-1 with SalI and NotI.

[1201] Once NF-KB/SV40/SEAP/Neo vector is created, stable Jurkat T-cells are created and maintained according to the protocol described in Example 32. Similarly, the method for assaying supernatants with these stable Jurkat T-cells is also described in Example 32. As a positive control, exogenous TNF alpha (0.1, 1, 10 ng) is added to wells H9, H10, and H11, with a 5-10 fold activation typically observed.

### Example 36

### Assay for SEAP Activity

[1202] As a reporter molecule for the assays described in Examples 32-35, SEAP activity is assayed using the Tropix Phospho-light Kit (Cat. BP400) according to the following general procedure. The Tropix Phospho-light Kit supplies the Dilution, Assay, and Reaction Buffers used below.

[1203] Prime a dispenser with the 2.5× Dilution Buffer and dispense 15 ul of 2.5× dilution buffer into Optiplates containing 35 ul of a supernatant. Seal the plates with a plastic sealer and incubate at 65 degree C. for 30 min. Separate the Optiplates to avoid uneven heating.

[1204] Cool the samples to room temperature for 15 minutes. Empty the dispenser and prime with the Assay Buffer. Add 50 ml Assay Buffer and incubate at room temperature 5 min. Empty the dispenser and prime with the Reaction Buffer (see, the Table below). Add 50 ul Reaction Buffer and incubate at room temperature for 20 minutes. Since the intensity of the chemiluminescent signal is time dependent, and it takes about 10 minutes to read 5 plates on a luminometer, thus one should treat 5 plates at each time and start the second set 10 minutes later.

[1205] Read the relative light unit in the luminometer. Set H12 as blank, and print the results. An increase in chemiluminescence indicates reporter activity.

[1206] Reaction Buffer Formulation:

| # of plates | Rxn buffer diluent (ml) | CSPD (ml) |
|---|---|---|
| 10 | 60 | 3 |
| 11 | 65 | 3.25 |
| 12 | 70 | 3.5 |
| 13 | 75 | 3.75 |
| 14 | 80 | 4 |
| 15 | 85 | 4.25 |
| 16 | 90 | 4.5 |
| 17 | 95 | 4.75 |
| 18 | 100 | 5 |
| 19 | 105 | 5.25 |
| 20 | 110 | 5.5 |
| 21 | 115 | 5.75 |
| 22 | 120 | 6 |
| 23 | 125 | 6.25 |
| 24 | 130 | 6.5 |
| 25 | 135 | 6.75 |
| 26 | 140 | 7 |
| 27 | 145 | 7.25 |
| 28 | 150 | 7.5 |
| 29 | 155 | 7.75 |
| 30 | 160 | 8 |
| 31 | 165 | 8.25 |
| 32 | 170 | 8.5 |
| 33 | 175 | 8.75 |
| 34 | 180 | 9 |
| 35 | 185 | 9.25 |
| 36 | 190 | 9.5 |
| 37 | 195 | 9.75 |
| 38 | 200 | 10 |
| 39 | 205 | 10.25 |
| 40 | 210 | 10.5 |
| 41 | 215 | 10.75 |
| 42 | 220 | 11 |
| 43 | 225 | 11.25 |
| 44 | 230 | 11.5 |
| 45 | 235 | 11.75 |
| 46 | 240 | 12 |
| 47 | 245 | 12.25 |
| 48 | 250 | 12.5 |
| 49 | 255 | 12.75 |
| 50 | 260 | 13 |

### Example 37

### High-Throughput Screening Assay Identifying Changes in Small Molecule Concentration and Membrane Permeability

[1207] Binding of a ligand to a receptor is known to alter intracellular levels of small molecules, such as calcium, potassium, sodium, and pH, as well as alter membrane potential. These alterations can be measured in an assay to identify supernatants which bind to receptors of a particular cell. Although the following protocol describes an assay for calcium, this protocol can easily be modified to detect changes in potassium, sodium, pH, membrane potential, or any other small molecule which is detectable by a fluorescent probe.

[1208] The following assay uses Fluorometric Imaging Plate Reader (“FLIPR”) to measure changes in fluorescent molecules (Molecular Probes) that bind small molecules. Clearly, any fluorescent molecule detecting a small molecule can be used instead of the calcium fluorescent molecule, fluo-4 (Molecular Probes, Inc.; catalog no. F-14202), used here.

[1209] For adherent cells, seed the cells at 10,000 cells/well in a Co-star black 96-well plate with clear bottom. The plate is incubated in a CO₂ incubator for 20 hours. The adherent cells are washed two times in Biotek washer with 200 ul of HBSS (Hank's Balanced Salt Solution) leaving 100 ul of buffer after the final wash.

[1210] A stock solution of 1 mg/ml fluo-4 is made in 10% pluronic acid DMSO. To load the cells with fluo-4, 50 ul of 12 ug/ml fluo-4 is added to each well. The plate is incubated at 37 degrees C. in a CO₂ incubator for 60 min. The plate is washed four times in the Biotek washer with HBSS leaving 100 ul of buffer.

[1211] For non-adherent cells, the cells are spun down from culture media. Cells are resuspended to 2-5×10⁶ cells/ml with HBSS in a 50-ml conical tube. 4 ul of 1 mg/ml fluo-4 solution in 10% pluronic acid DMSO is added to each ml of cell suspension. The tube is then placed in a 37 degrees C. water bath for 30-60 min. The cells are washed twice with HBSS, resuspended to 1×10⁶ cells/ml, and dispensed into a microplate, 100 ul/well. The plate is centrifuged at 1000 rpm for 5 min. The plate is then washed once in Denley Cell Wash with 200 ul, followed by an aspiration step to 100 ul final volume.

[1212] For a non-cell based assay, each well contains a fluorescent molecule, such as fluo-4. The supernatant is added to the well, and a change in fluorescence is detected.

[1213] To measure the fluorescence of intracellular calcium, the FLIPR is set for the following parameters: (1) System gain is 300-800 mW; (2) Exposure time is 0.4 second; (3) Camera F/stop is F/2; (4) Excitation is 488 nm; (5) Emission is 530 nm; and (6) Sample addition is 50 ul. Increased emission at 530 nm indicates an extracellular signaling event caused by the a molecule, either polypeptide of the present invention or a molecule induced by polypeptide of the present invention, which has resulted in an increase in the intracellular Ca⁺⁺ concentration.

### Example 38

### High-Throughput Screening Assay Identifying Tyrosine Kinase Activity

[1214] The Protein Tyrosine Kinases (PTK represent a diverse group of transmembrane and cytoplasmic kinases. Within the Receptor Protein Tyrosine Kinase RPTK) group are receptors for a range of mitogenic and metabolic growth factors including the PDGF, FGF, EGF, NGF, HGF and Insulin receptor subfamilies. In addition there are a large family of RPTKs for which the corresponding ligand is unknown. Ligands for RPTKs include mainly secreted small proteins, but also membrane-bound and extracellular matrix proteins.

[1215] Activation of RPTK by ligands involves ligand-mediated receptor dimerization, resulting in transphosphorylation of the receptor subunits and activation of the cytoplasmic tyrosine kinases. The cytoplasmic tyrosine kinases include receptor associated tyrosine kinases of the src-family (e.g., src, yes, lck, lyn, fyn) and non-receptor linked and cytosolic protein tyrosine kinases, such as the Jak family, members of which mediate signal transduction triggered by the cytokine superfamily of receptors (e.g., the Interleukins, Interferons, GM-CSF, and Leptin).

[1216] Because of the wide range of known factors capable of stimulating tyrosine kinase activity, identifying whether polypeptide of the present invention or a molecule induced by polypeptide of the present invention is capable of activating tyrosine kinase signal transduction pathways is of interest. Therefore, the following protocol is designed to identify such molecules capable of activating the tyrosine kinase signal transduction pathways.

[1217] Seed target cells (e.g., primary keratinocytes) at a density of approximately 25,000 cells per well in a 96 well Loprodyne Silent Screen Plates purchased from Nalge Nunc (Naperville, Ill.). The plates are sterilized with two 30 minute rinses with 100% ethanol, rinsed with water and dried overnight. Some plates are coated for 2 hr with 100 ml of cell culture grade type I collagen (50 mg/ml), gelatin (2%) or polylysine (50 mg/ml), all of which can be purchased from Sigma Chemicals (St. Louis, Mo.) or 10% Matrigel purchased from Becton Dickinson (Bedford, Mass.), or calf serum, rinsed with PBS and stored at 4 degree C. Cell growth on these plates is assayed by seeding 5,000 cells/well in growth medium and indirect quantitation of cell number through use of alamarBlue as described by the manufacturer Alamar Biosciences, Inc. (Sacramento, Calif.) after 48 hr. Falcon plate covers #3071 from Becton Dickinson (Bedford, Mass.) are used to cover the Loprodyne Silent Screen Plates. Falcon Microtest III cell culture plates can also be used in some proliferation experiments.

[1218] To prepare extracts, A431 cells are seeded onto the nylon membranes of Loprodyne plates (20,000/200 ml/well) and cultured overnight in complete medium. Cells are quiesced by incubation in serum-free basal medium for 24 hr. After 5-20 minutes treatment with EGF (60 ng/ml) or 50 ul of the supernatant produced in Example 30, the medium was removed and 100 ml of extraction buffer ((20 mM HEPES pH 7.5, 0.15 M NaCl, 1% Triton X-100, 0.1% SDS, 2 mM Na3VO4, 2 mM Na4P2O7 and a cocktail of protease inhibitors (# 1836170) obtained from Boeheringer Mannheim (Indianapolis, Ind.)) is added to each well and the plate is shaken on a rotating shaker for 5 minutes at 4° C. The plate is then placed in a vacuum transfer manifold and the extract filtered through the 0.45 mm membrane bottoms of each well using house vacuum. Extracts are collected in a 96-well catch/assay plate in the bottom of the vacuum manifold and immediately placed on ice. To obtain extracts clarified by centrifugation, the content of each well, after detergent solubilization for 5 minutes, is removed and centrifuged for 15 minutes at 4 degree C at 16,000×g.

[1219] Test the filtered extracts for levels of tyrosine kinase activity. Although many methods of detecting tyrosine kinase activity are known, one method is described here.

[1220] Generally, the tyrosine kinase activity of a supernatant is evaluated by determining its ability to phosphorylate a tyrosine residue on a specific substrate (a biotinylated peptide). Biotinylated peptides that can be used for this purpose include PSK1 (corresponding to amino acids 6-20 of the cell division kinase cdc2-p34) and PSK2 (corresponding to amino acids 1-17 of gastrin). Both peptides are substrates for a range of tyrosine kinases and are available from Boehringer Mannheim.

[1221] The tyrosine kinase reaction is set up by adding the following components in order. First, add 10 ul of 5 uM Biotinylated Peptide, then 10 ul ATP/Mg₂₊ (5 mM ATP/50 mM MgCl₂), then 10 ul of 5× Assay Buffer (40 mM imidazole hydrochloride, pH7.3, 40 mM beta-glycerophosphate, 1 mM EGTA, 100 mM MgCl₂, 5 mM MnCl₂, 0.5 mg/ml BSA), then 5 ul of Sodium Vanadate (1 mM), and then 5 ul of water. Mix the components gently and preincubate the reaction mix at 30 degree C. for 2 min. Initial the reaction by adding 10 ul of the control enzyme or the filtered supernatant.

[1222] The tyrosine kinase assay reaction is then terminated by adding 10 ul of 120 mm EDTA and place the reactions on ice.

[1223] Tyrosine kinase activity is determined by transferring 50 ul aliquot of reaction mixture to a microtiter plate (MTP) module and incubating at 37 degree C. for 20 min. This allows the streptavidin coated 96 well plate to associate with the biotinylated peptide. Wash the MTP module with 300 ul/well of PBS four times. Next add 75 ul of anti-phospotyrosine antibody conjugated to horse radish peroxidase (anti-P-Tyr-POD (0.5 u/ml)) to each well and incubate at 37 degree C. for one hour. Wash the well as above.

[1224] Next add 100 ul of peroxidase substrate solution (Boehringer Mannheim) and incubate at room temperature for at least 5 mins (up to 30 min). Measure the absorbance of the sample at 405 nm by using ELISA reader. The level of bound peroxidase activity is quantitated using an ELISA reader and reflects the level of tyrosine kinase activity.

### Example 39

### High-Throughput Screening Assay Identifying Phosphorylation Activity

[1225] As a potential alternative and/or complement to the assay of protein tyrosine kinase activity described in Example 38, an assay which detects activation (phosphorylation) of major intracellular signal transduction intermediates can also be used. For example, as described below one particular assay can detect tyrosine phosphorylation of the Erk-1 and Erk-2 kinases. However, phosphorylation of other molecules, such as Raf, JNK, p38 MAP, Map kinase kinase (MEK), MEK kinase, Src, Muscle specific kinase (MuSK), IRAK, Tec, and Janus, as well as any other phosphoserine, phosphotyrosine, or phosphothreonine molecule, can be detected by substituting these molecules for Erk-1 or Erk-2 in the following assay.

[1226] Specifically, assay plates are made by coating the wells of a 96-well ELISA plate with 0.1 ml of protein G (1 ug/ml) for 2 hr at room temp, (RT). The plates are then rinsed with PBS and blocked with 3% BSA/PBS for 1 hr at RT. The protein G plates are then treated with 2 commercial monoclonal antibodies (100 ng/well) against Erk-1 and Erk-2 (1 hr at RT) (Santa Cruz Biotechnology). (To detect other molecules, this step can easily be modified by substituting a monoclonal antibody detecting any of the above described molecules.) After 3-5 rinses with PBS, the plates are stored at 4 degree C. until use.

[1227] A431 cells are seeded at 20,000/well in a 96-well Loprodyne filterplate and cultured overnight in growth medium. The cells are then starved for 48 hr in basal medium (DMEM) and then treated with EGF (6 ng/well) or 50 ul of the supernatants obtained in Example 30 for 5-20 minutes. The cells are then solubilized and extracts filtered directly into the assay plate.

[1228] After incubation with the extract for 1 hr at RT, the wells are again rinsed. As a positive control, a commercial preparation of MAP kinase (10 ng/well) is used in place of A431 extract. Plates are then treated with a commercial polyclonal (rabbit) antibody (1 ug/ml) which specifically recognizes the phosphorylated epitope of the Erk-1 and Erk-2 kinases (1 hr at RT). This antibody is biotinylated by standard procedures. The bound polyclonal antibody is then quantitated by successive incubations with Europium-streptavidin and Europium fluorescence enhancing reagent in the Wallac DELFIA instrument (time-resolved fluorescence). An increased fluorescent signal over background indicates a phosphorylation by polypeptide of the present invention or a molecule induced by polypeptide of the present invention.

### Example 40

### Assay for the Stimulation of Bone Marrow CD34+ Cell Proliferation

[1229] This assay is based on the ability of human CD34+ to proliferate in the presence of hematopoietic growth factors and evaluates the ability of isolated polypeptides expressed in mammalian cells to stimulate proliferation of CD34+ cells.

[1230] It has been previously shown that most mature precursors will respond to only a single signal. More immature precursors require at least two signals to respond. Therefore, to test the effect of polypeptides on hematopoietic activity of a wide range of progenitor cells, the assay contains a given polypeptide in the presence or absence of other hematopoietic growth factors. Isolated cells are cultured for 5 days in the presence of Stem Cell Factor (SCF) in combination with tested sample. SCF alone has a very limited effect on the proliferation of bone marrow (BM) cells, acting in such conditions only as a “survival” factor. However, combined with any factor exhibiting stimulatory effect on these cells (e.g., IL-3), SCP will cause a synergistic effect. Therefore, if the tested polypeptide has a stimulatory effect on hematopoietic progenitors, such activity can be easily detected. Since normal BM cells have a low level of cycling cells, it is likely that any inhibitory effect of a given polypeptide, or agonists or antagonists thereof, might not be detected. Accordingly, assays for an inhibitory effect on progenitors is preferably tested in cells that are first subjected to in vitro stimulation with SCF+IL+3, and then contacted with the compound that is being evaluated for inhibition of such induced proliferation.

[1231] Briefly, CD34+ cells are isolated using methods known in the art. The cells are thawed and resuspended in medium (QBSF 60 serum-free medium with 1% L-glutamine (500 ml) Quality Biological, Inc., Gaithersburg, Md. Cat# 160-204-101). After several gentle centrifugation steps at 200×g, cells are allowed to rest for one hour. The cell count is adjusted to 2.5×10⁵ cells/ml. During this time, 100 μl of sterile water is added to the peripheral wells of a 96-well plate. The cytokines that can be tested with a given polypeptide in this assay is rhSCF (R&D Systems, Minneapolis, Minn., Cat# 255-SC) at 50 ng/ml alone and in combination with rhSCF and rhIL-3 (R&D Systems, Minneapolis, Minn., Cat# 203-ML) at 30 ng/ml. After one hour, 10 μl of prepared cytokines, 50 μl of the supernatants prepared in Example 30 (supernatants at 1:2 dilution=50 μl) and 20 μl of diluted cells are added to the media which is already present in the wells to allow for a final total volume of 100 μl. The plates are then placed in a 37° C./5% CO₂ incubator for five days.

[1232] Eighteen hours before the assay is harvested, 0.5 μCi/well of [3H] Thymidine is added in a 10 μl volume to each well to determine the proliferation rate. The experiment is terminated by harvesting the cells from each 96-well plate to a filtermat using the Tomtec Harvester 96. After harvesting, the filtermats are dried, trimmed and placed into OmniFilter assemblies consisting of one OmniFilter plate and one OmniFilter Tray. 60 μl Microscint is added to each well and the plate sealed with TopSeal-A press-on sealing film A bar code 15 sticker is affixed to the first plate for counting. The sealed plates are then loaded and the level of radioactivity determined via the Packard Top Count and the printed data collected for analysis. The level of radioactivity reflects the amount of cell proliferation.

[1233] The studies described in this example test the activity of a given polypeptide to stimulate bone marrow CD34+ cell proliferation. One skilled in the art could easily modify the exemplified studies to test the activity of polynucleotides (e.g., gene therapy), antibodies, agonists, and/or antagonists and fragments and variants thereof. As a nonlimiting example, potential antagonists tested in this assay would be expected to inhibit cell proliferation in the presence of cytokines and/or to increase the inhibition of cell proliferation in the presence of cytokines and a given polypeptide. In contrast, potential agonists tested in this assay would be expected to enhance cell proliferation and/or to decrease the inhibition of cell proliferation in the presence of cytokines and a given polypeptide.

[1234] The ability of a gene to stimulate the proliferation of bone marrow CD34+ cells indicates that polynucleotides and polypeptides corresponding to the gene are useful for the detection, prevention, diagnosis, prognostication, treatment, and/or amelioration of disorders affecting the immune system and hematopoiesis. Representative uses are described in the “Immune Activity” and “Infectious Disease” sections above, and elsewhere herein.

### Example 41

### Assay for Extracellular Matrix Enhanced Cell Response (EMECR)

[1235] The objective of the Extracellular Matrix Enhanced Cell Response (EMECR) assay is to identify gene products (e.g., isolated polypeptides) that act on the hematopoietic stem cells in the context of the extracellular matrix (ECM) induced signal.

[1236] Cells respond to the regulatory factors in the context of signal(s) received from the surrounding microenvironment. For example, fibroblasts, and endothelial and epithelial stem cells fail to replicate in the absence of signals from the ECM. Hematopoietic stem cells can undergo self-renewal in the bone marrow, but not in in vitro suspension culture. The ability of stem cells to undergo self-renewal in vitro is dependent upon their interaction with the stromal cells and the ECM protein fibronectin (fn). Adhesion of cells to fn is mediated by the α₅.β₁ and α₄.β₁ integrin receptors, which are expressed by human and mouse hematopoietic stem cells. The factor(s) which integrate with the ECM environment and are responsible for stimulating stem cell self-renewal havea not yet been identified. Discovery of such factors should be of great interest in gene therapy and bone marrow transplant applications

[1237] Briefly, polystyrene, non tissue culture treated, 96-well plates are coated with fn fragment at a coating concentration of 0.2 μg/cm². Mouse bone marrow cells are plated (1,000 cells/well) in 0.2 ml of serum-free medium. Cells cultured in the presence of IL-3 (5 ng/ml)+SCF (50 ng/ml) would serve as the positive control, conditions under which little self-renewal but pronounced differentiation of the stem cells is to be expected. Gene products of the invention (e.g., including, but not limited to, polynucleotides and polypeptides of the present invention, and supernatants produced in Example 30), are tested with appropriate negative controls in the presence and absence of SCF (5.0 ng/ml), where test factor supernatants represent 10% of the total assay volume. The plated cells are then allowed to grow by incubating in a low oxygen environment (5% CO₂, 7% O₂, and 88% N₂) tissue culture incubator for 7 days. The number of proliferating cells within the wells is then quantitated by measuring thymidine incorporation into cellular DNA. Verification of the positive hits in the assay will require phenotypic characterization of the cells, which can be accomplished by scaling up of the culture system and using appropriate antibody reagents against cell surface antigens and FACScan.

[1238] One skilled in the art could easily modify the exemplified studies to test the activity of polynucleotides (e.g., gene therapy), antibodies, agonists, and/or antagonists and fragments and variants thereof.

[1239] If a particular polypeptide of the present invention is found to be a stimulator of hematopoietic progenitors, polynucleotides and polypeptides corresponding to the gene encoding said polypeptide may be useful for the detection, prevention, diagnosis, prognostication, treatment, and/or amelioration of disorders affecting the immune system and hematopoiesis. Representative uses are described in the “Immune Activity” and “Infectious Disease” sections above, and elsewhere herein. The gene product may also be useful in the expansion of stem cells and committed progenitors of various blood lineages, and in the differentiation and/or proliferation of various cell types.

[1240] Additionally, the polynucleotides and/or polypeptides of the gene of interest and/or agonists and/or antagonists thereof, may also be employed to inhibit the proliferation and differentiation of hematopoietic cells and therefore may be employed to protect bone marrow stem cells from chemotherapeutic agents during chemotherapy. This antiproliferative effect may allow administration of higher doses of chemotherapeutic agents and, therefore, more effective chemotherapeutic treatment.

[1241] Moreover, polynucleotides and polypeptides corresponding to the gene of interest may also be useful for the detection, prevention, diagnosis, prognostication, treat, and/or amelioration of hematopoietic related disorders such as, for example, anemia, pancytopenia, leukopenia, thrombocytopenia or leukemia since stromal cells are important in the production of cells of hematopoietic lineages. The uses include bone marrow cell ex-vivo culture, bone marrow transplantation, bone marrow reconstitution, radiotherapy or chemotherapy of neoplasia.

### Example 42

### Human Dermal Fibroblast and Aortic Smooth Muscle Cell Proliferation

[1242] The polypeptide of interest is added to cultures of normal human dermal fibroblasts (NHDF) and human aortic smooth muscle cells (AoSMC) and two co-assays are performed with each sample. The first assay examines the effect of the polypeptide of interest on the proliferation of normal human dermal fibroblasts (NHDF) or aortic smooth muscle cells (AoSMC). Aberrant growth of fibroblasts or smooth muscle cells is a part of several pathological processes, including fibrosis, and restenosis. The second assay examines IL6 production by both NHDF and SMC. IL6 production is an indication of functional activation. Activated cells will have increased production of a number of cytokines and other factors, which can result in a proinflammatory or immunomodulatory outcome. Assays are run with and without co-TNFa stimulation, in order to check for costimulatory or inhibitory activity.

[1243] Briefly, on day 1, 96-well black plates are set up with 1000 cells/well (NHDF) or 2000 cells/well (AoSMC) in 100 μl culture media. NHDF culture media contains: Clonetics FB basal media, 1 mg/ml hFGF, 5 mg/ml insulin, 50 mg/ml gentamycin, 2% PBS, while AoSMC culture media contains Clonetics SM basal media, 0.5 μg/ml hEGF, 5 mg/ml insulin, 1 μg/ml hFGF, 50 mg/ml gentamycin, 50 μg/ml Amphotericin B, 5% FBS. After incubation at 37° C. for at least 4-5 hours culture media is aspirated and replaced with growth arrest media. Growth arrest media for NHDF contains fibroblast basal media, 50 mg/ml gentamycin, 2% FBS, while growth arrest media for AoSMC contains SM basal media, 50 mg/ml gentamycin, 50 μg/ml Amphotericin B, 0.4% PBS. Incubate at 37-C until day 2.

[1244] On day 2, serial dilutions and templates of the polypeptide of interest are designed such that they always include media controls and known-protein controls. For both stimulation and inhibition experiments, proteins are diluted in growth arrest media. For inhibition experiments, TNFa is added to a final concentration of 2 ng/ml (NHDF) or 5 ng/ml (AoSMC). Add ⅓ vol media containing controls or polypeptides of the present invention and incubate at 37 degrees C./5% CO₂ until day 5.

[1245] Transfer 60 μl from each well to another labeled 96-well plate, cover with a plate-sealer, and store at 4 degrees C. until Day 6 (for IL6 ELISA). To the remaining 100 μl in the cell culture plate, aseptically add Alamar Blue in an amount equal to 10% of the culture volume (10 L). Return plates to incubator for 3 to 4 hours. Then measure fluorescence with excitation at 530 nm and emission at 590 nm using the CytoFluor. This yields the growth stimulation/inhibition data.

[1246] On day 5, the IL6 ELISA is performed by coating a 96 well plate with 50-100 ul/well of Anti-Human IL6 Monoclonal antibody diluted in PBS, pH 7.4, incubate ON at room temperature.

[1247] On day 6, empty the plates into the sink and blot on paper towels. Prepare Assay Buffer containing PBS with 4% BSA. Block the plates with 200 μl/well of Pierce Super Block blocking 1129′ buffer in PBS for 1-2 hr and then wash plates with wash buffer (PBS, 0.05% Tween-20). Blot plates on paper towels. Then add 50 μl/well of diluted Anti-Human IL-6 Monoclonal, Biotin-labeled antibody at 0.50 mg/ml. Make dilutions of IL-6 stock in media (30, 10, 3, 1, 0.3, 0 ng/ml). Add duplicate samples to top row of plate. Cover the plates and incubate for 2 hours at RT on shaker.

[1248] Plates are washed with wash buffer and blotted on paper towels. Dilute EU-labeled Streptavidin 1:1000 in Assay buffer, and add 100 μl/well. Cover the plate and incubate 1 h at RT. Plates are again washed with wash buffer and blotted on paper towels.

[1249] Add 100 μl/well of Enhancement Solution. Shake for 5 minutes. Read the plate on the Wallac DELFIA Fluorometer. Readings from triplicate samples in each assay were tabulated and averaged.

[1250] A positive result in this assay suggests AoSMC cell proliferation and that the polypeptide of the present invention may be involved in dermal fibroblast proliferation and/or smooth muscle cell proliferation. A positive result also suggests many potential uses of polypeptides, polynucleotides, agonists and/or antagonists of the polynucleotide/polypeptide of the present invention which gives a positive result. For example, inflammation and immune responses, wound healing, and angiogenesis, as detailed throughout this specification. Particularly, polypeptides of the present invention and polynucleotides of the present invention may be used in wound healing and dermal regeneration, as well as the promotion of vasculogenesis, both of the blood vessels and lymphatics. The growth of vessels can be used in the treatment of, for example, cardiovascular diseases. Additionally, antagonists of polypeptides and polynucleotides of the invention may be useful in treating diseases, disorders, and/or conditions which involve angiogenesis by acting as an anti-vascular agent (e.g., anti-angiogenesis). These diseases, disorders, and/or conditions are known in the art and/or are described herein, such as, for example, malignancies, solid tumors, benign tumors, for example hemangiomas, acoustic neuromas, neurofibromas, trachomas, and pyogenic granulomas; artheroscleric plaques; ocular angiogenic diseases, for example, diabetic retinopathy, retinopathy of prematurity, macular degeneration, corneal graft rejection, neovascular glaucoma, retrolental fibroplasia, rubeosis, retinoblastoma, uvietis and Pterygia (abnormal blood vessel growth) of the eye; rheumatoid arthritis; psoriasis; delayed wound healing; endometriosis; vasculogenesis; granulations; hypertrophic scars (keloids); nonunion fractures; scleroderma; trachoma; vascular adhesions; myocardial angiogenesis; coronary collaterals; cerebral collaterals; arteriovenous malformations; ischemic limb angiogenesis; Osler-Webber Syndrome; plaque neovascularization; telangiectasia; hemophiliac joints; angiofibroma; fibromuscular dysplasia; wound granulation; Crohn's disease; and atherosclerosis. Moreover, antagonists of polypeptides and polynucleotides of the invention may be useful in treating anti-hyperproliferative diseases and/or anti-inflammatory known in the art and/or described herein.

[1251] One skilled in the art could easily modify the exemplified studies to test the activity of polynucleotides (e.g., gene therapy), antibodies, agonists, and/or antagonists and fragments and variants thereof.

### Example 43

### Cellular Adhesion Molecule (CAM) Expression on Endothelial Cells

[1252] The recruitment of lymphocytes to areas of inflammation and angiogenesis involves specific receptor-ligand interactions between cell surface adhesion molecules (CAMs) on lymphocytes and the vascular endothelium. The adhesion process, in both normal and pathological settings, follows a multi-step cascade that involves intercellular adhesion molecule-1 (ICAM-1), vascular cell adhesion molecule-1 (VCAM-1), and endothelial leukocyte adhesion molecule-1 (E-selectin) expression on endothelial cells (EC). The expression of these molecules and others on the vascular endothelium determines the efficiency with which leukocytes may adhere to the local vasculature and extravasate into the local tissue during the development of an inflammatory response. The local concentration of cytokines and growth factor participate in the modulation of the expression of these CAMs.

[1253] Briefly, endothelial cells (e.g., Human Umbilical Vein Endothelial cells (HUVECs)) are grown in a standard 96 well plate to confluence, growth medium is removed from the cells and replaced with 100 μl of 199 Medium (10% fetal bovine serum (FBS)). Samples for testing and positive or negative controls are added to the plate in triplicate (in 10 μl volumes). Plates are then incubated at 37° C. for either 5 h (selectin and integrin expression) or 24 h (integrin expression only). Plates are aspirated to remove medium and 100 μl of 0.1% paraformaldehyde-PBS (with Ca++ and Mg++) is added to each well. Plates are held at 4° C. for 30 min. Fixative is removed from the wells and wells are washed 1× with PBS (+Ca,Mg)+0.5% BSA and drained. 10 μl of diluted primary antibody is added to the test and control wells. Anti-ICAM-1-Biotin, Anti-VCAM-1-Biotin and Anti-E-selectin-Biotin are used at a concentration of 10 μg/ml (1:10 dilution of 0.1 mg/ml stock antibody). Cells are incubated at 37° C. for 30 min. in a humidified environment. Wells are washed three times with PBS (+Ca,Mg)+0.5% BSA. 20 μl of diluted ExtrAvidin-Alkaline Phosphatase (1:5,000 dilution, referred to herein as the working dilution) are added to each well and incubated at 37° C. for 30 min. Wells are washed three times with PBS (+Ca,Mg)+0.5% BSA. Dissolve 1 tablet of p-Nitrophenol Phosphate pNPP per 5 ml of glycine buffer (pH 10.4). 100 μl of pNPP substrate in glycine buffer is added to each test well. Standard wells in triplicate are prepared from the working dilution of the ExtrAvidin-Alkaline Phosphotase in glycine buffer: 1:5,000 (10⁰)>10^{-0.5}>10⁻¹>10^{-1.5}. 5 μl of each dilution is added to triplicate wells and the resulting AP content in each well is 5.50 ng, 1.74 ng, 0.55 ng, 0.18 ng. 100 μl of pNNP reagent is then added to each of the standard wells. The plate is incubated at 37° C. for 4 h. A volume of 50 μl of 3M NaOH is added to all wells. The plate is read on a plate reader at 405 nm using the background subtraction option on blank wells filled with glycine buffer only. Additionally, the template is set up to indicate the concentration of AP-conjugate in each standard well [5.50 ng; 1.74 ng; 0.55 ng; 0.18 ng]. Results are indicated as amount of bound AP-conjugate in each sample.

### Example 44

### Alamar Blue Endothelial Cells Proliferation Assay

[1254] This assay may be used to quantitatively determine protein mediated inhibition of bFGF-induced proliferation of Bovine Lymphatic Endothelial Cells (LECs), Bovine Aortic Endothelial Cells (BAECs) or Human Microvascular Uterine Myometrial Cells (UTMECs). This assay incorporates a fluorometric growth indicator based on detection of metabolic activity. A standard Alamar Blue Proliferation Assay is prepared in EGM-2MV with 10 ng/ml of bFGF added as a source of endothelial cell stimulation. This assay may be used with a variety of endothelial cells with slight changes in growth medium and cell concentration. Dilutions of the protein batches to be tested are diluted as appropriate. Serum-free medium (GIBCO SFM) without bFGF is used as a non-stimulated control and Angiostatin or TSP-1 are included as a known inhibitory controls.

[1255] Briefly, LEC, BAECs or UTMECs are seeded in growth media at a density of 5000 to 2000 cells/well in a 96 well plate and placed at 37 degreesC. overnight After the overnight incubation of the cells, the growth media is removed and replaced with GIBCO EC-SFM. The cells are treated with the appropriate dilutions of the protein of interest or control protein sample(s) (prepared in SFM) in triplicate wells with additional bFGF to a concentration of 10 ng/ml. Once the cells have been treated with the samples, the plate(s) is/are placed back in the 37° C. incubator for three days. After three days 10 ml of stock alamar blue (Biosource Cat# DAL1100) is added to each well and the plate(s) is/are placed back in the 37° C. incubator for four hours. The plate(s) are then read at 530 nm excitation and 590 nm emission using the CytoFluor fluorescence reader. Direct output is recorded in relative fluorescence units.

[1256] Alamar blue is an oxidation-reduction indicator that both fluoresces and changes color in response to chemical reduction of growth medium resulting from cell growth. As cells grow in culture, innate metabolic activity results in a chemical reduction of the immediate surrounding environment. Reduction related to growth causes the indicator to change from oxidized (non-fluorescent blue) form to reduced (fluorescent red) form (i.e., stimulated proliferation will produce a stronger signal and inhibited proliferation will produce a weaker signal and the total signal is proportional to the total number of cells as well as their metabolic activity). The background level of activity is observed with the starvation medium alone. This is compared to the output observed from the positive control samples (bFGF in growth medium) and protein dilutions.

### Example 45

### Detection of Inhibition of a Mixed Lymphocyte Reaction

[1257] This assay can be used to detect and evaluate inhibition of a Mixed Lymphocyte Reaction (MLR) by gene products (e.g., isolated polypeptides). Inhibition of a MLR may be due to a direct effect on cell proliferation and viability, modulation of costimulatory molecules on interacting cells, modulation of adhesiveness between lymphocytes and accessory cells, or modulation of cytokine production by accessory cells. Multiple cells may be targeted by these polypeptides since the peripheral blood mononuclear fraction used in this assay includes T, B and natural killer lymphocytes, as well as monocytes and dendritic cells.

[1258] Polypeptides of interest found to inhibit the MLR may find application in diseases associated with lymphocyte and monocyte activation or proliferation. These include, but are not limited to, diseases such as asthma, arthritis, diabetes, inflammatory skin conditions, psoriasis, eczema, systemic lupus erythematosus, multiple sclerosis, glomerulonephritis, inflammatory bowel disease, crohn's disease, ulcerative colitis, arteriosclerosis, cirrhosis, graft vs. host disease, host vs. graft disease, hepatitis, leukemia and lymphoma.

[1259] Briefly, PBMCs from human donors are purified by density gradient centrifugation using Lymphocyte Separation Medium (LSM°, density 1.0770 g/ml, Organon Teknika Corporation, West Chester, Pa.). PBMCs from two donors are adjusted to 2×10⁶ cells/ml in RPMI-1640 (Life Technologies, Grand Island, N.Y.) supplemented with 10% FCS and 2 mM glutamine. PBMCs from a third donor is adjusted to 2×10⁵ cells/ml. Fifty microliters of PBMCs from each donor is added to wells of a 96-well round bottom microtiter plate. Dilutions of test materials (50 μl) is added in triplicate to microtiter wells. Test samples (of the protein of interest) are added for final dilution of 1:4; rhuIL-2 (R&D Systems, Minneapolis, Minn., catalog number 202-IL) is added to a final concentration of 1 μg/ml; anti-CD4 mAb (R&D Systems, clone 34930.11, catalog number MAB379) is added to a final concentration of 10 μg/ml. Cells are cultured for 7-8 days at 37° C. in 5% CO₂, and 1 μC of [³H] thymidine is added to wells for the last 16 hrs of culture. Cells are harvested and thymidine incorporation determined using a Packard TopCount. Data is expressed as the mean and standard deviation of triplicate determinations.

[1260] Samples of the protein of interest are screened in separate experiments and compared to the negative control treatment, anti-M4 mAb, which inhibits proliferation of lymphocytes and the positive control treatment, IL-2 (either as recombinant material or supernatant), which enhances proliferation of lymphocytes.

[1261] One skilled in the art could easily modify the exemplified studies to test the activity of polynucleotides (e.g., gene therapy), antibodies, agonists, and/or antagonists and fragments and variants thereof.

### Example 46

### Assays for Protease Activity

[1262] The following assay may be used to assess protease activity of the polypeptides of the invention.

[1263] Gelatin and casein zymography are performed essentially as described (Heusen et al., Anal. Biochem., 102:196-202 (1980); Wilson et al., Journal of Urology, 149:653-658 (1993)). Samples are ran on 10% polyacryamide/0.1% SDS gels containing 1% gelain orcasein, soaked in 2.5% triton at room temperature for 1 hour, and in 0.1M glycine, pH 8.3 at 37° C. 5 to 16 hours. After staining in amido black areas of proteolysis apear as clear areas agains the blue-black background. Trypsin (Sigma T8642) is used as a positive control.

[1264] Protease activity is also determined by monitoring the cleavage of n-a-benzoyl-L-arginine ethyl ester (BAEE) (Sigma B-4500. Reactions are set up in (25 mMNaPO₄, 1 mM EDTA, and 1 mM BAEE), pH 7.5. Samples are added and the change in adsorbance at 260 nm is monitored on the Beckman DU-6 spectrophotometer in the time-drive mode. Trypsin is used as a positive control.

[1265] Additional assays based upon the release of acid-soluble peptides from casein or hemoglobin measured as adsorbance at 280 nm or calorimetrically using the Folin method are performed as described in Bergmeyer, et al., Methods of Enzymatic Analysis, 5 (1984). Other assays involve the solubilization of chromogenic substrates (Ward, Applied Science, 251-317 (1983)).

### Example 47

### Identifying Serine Protease Substrate Specificity

[1266] Methods known in the art or described herein may be used to determine the substrate specificity of the polypeptides of the present invention having serine protease activity. A preferred method of determining substrate specificity is by the use of positional scanning synthetic combinatorial libraries as described in GB 2 324 529 (incorporated herein in its entirety).

### Example 48

### Ligand Binding Assays

[1267] The following assay may be used to assess ligand binding activity of the polypeptides of the invention.

[1268] Ligand binding assays provide a direct method for ascertaining receptor pharmacology and are adaptable to a high throughput format. The purified ligand for a polypeptide is radiolabeled to high specific activity (50-2000 Ci/mmol) for binding studies. A determination is then made that the process of radiolabeling does not diminish the activity of the ligand towards its polypeptide. Assay conditions for buffers, ions, pH and other modulators such as nucleotides are optimized to establish a workable signal to noise ratio for both membrane and whole cell polypeptide sources. For these assays, specific polypeptide binding is defined as total associated radioactivity minus the radioactivity measured in the presence of an excess of unlabeled competing ligand. Where possible, more than one competing ligand is used to define residual nonspecific binding.

### Example 49

### Functional Assay in Xenopus Oocytes

[1269] Capped RNA transcripts from linearized plasmid templates encoding the polypeptides of the invention are synthesized in vitro with RNA polymerases in accordance with standard procedures. In vitro transcripts are suspended in water at a final concentration of 0.2 mg/ml. Ovarian lobes are removed from adult female toads, Stage V defolliculated oocytes are obtained, and RNA transcripts (10 ng/oocytc) are injected in a 50 nl bolus using a microinjection apparatus. Two electrode voltage clamps are used to measure the currents from individual Xenopus oocytes in response polypeptides and polypeptide agonist exposure. Recordings are made in Ca2+ free Barth's medium at room temperature. The Xenopus system can be used to screen known ligands and tissue/cell extracts for activating ligands.

### Example 50

### Microphysiometric Assays

[1270] Activation of a wide variety of secondary messenger systems results in extrusion of small amounts of acid from a cell. The acid formed is largely as a result of the increased metabolic activity required to fuel the intracellular signaling process. The pH changes in the media surrounding the cell are very small but are detectable by the CYTOSENSOR microphysiometer (Molecular Devices Ltd., Menlo Park, Calif.). The CYTOSENSOR is thus capable of detecting the activation of polypeptide which is coupled to an energy utilizing intracellular signaling pathway.

### Example 51

### Extract/Cell Supernatant Screening

[1271] A large number of mammalian receptors exist for which there remains, as yet, no cognate activating ligand (agonist). Thus, active ligands for these receptors may not be included within the ligands banks as identified to date. Accordingly, the polypeptides of the invention can also be functionally screened (using calcium, cAMP, microphysiometer, oocyte electrophysiology, etc., functional screens) against tissue extracts to identify its natural ligands. Extracts that produce positive functional responses can be sequentially subfractionated until an activating ligand is isolated and identified.

### Example 52

### Calcium and cAMP Functional Assays

[1272] Seven transmembrane receptors which are expressed in HEK 293 cells have been shown to be coupled functionally to activation of PLC and calcium mobilization and/or cAMP stimulation or inhibition. Basal calcium levels in the HEK 293 cells in receptor-transfected or vector control cells were observed to be in the normal, 100 nM to 200 nM, range. HEK 293 cells expressing recombinant receptors are loaded with fura 2 and in a single day >150 selected ligands or tissue/cell extracts are evaluated for agonist induced calcium mobilization. Similarly, HEK 293 cells expressing recombinant receptors are evaluated for the stimulation or inhibition of cAMP production using standard cAMP quantitation assays. Agonists presenting a calcium transient or cAMP fluctuation are tested in vector control cells to determine if the response is unique to the transfected cells expressing receptor.

### Example 53

### ATP-Binding Assay

[1273] The following assay may be used to assess ATP-binding activity of polypeptides of the invention.

[1274] ATP-binding activity of the polypeptides of the invention may be detected using the ATP-binding assay described in U.S. Pat. No. 5,858,719, which is herein incorporated by reference in its entirety. Briefly, ATP-binding to polypeptides of the invention is measured via photoaffinity labeling with 8-azido-ATP in a competition assay. Reaction mixtures containing 1 mg/ml of the ABC transport protein of the present invention are incubated with varying concentrations of ATP, or the non-hydrolyzable ATP analog adenyl-5′-imidodiphosphate for 10 minutes at 4° C. A mixture of 8-azido-ATP (Sigma Chem. Corp., St Louis, Mo.) plus 8-azido-ATP (³²P-ATP) (5 mCi/μmol, ICN, Irvine Calif.) is added to a final concentration of 100 μM and 0.5 ml aliquots are placed in the wells of a porcelain spot plate on ice. The plate is irradiated using a short wave 254 nm UV lamp at a distance of 2.5 cm from the plate for two one-minute intervals with a one-minute cooling interval in between. The reaction is stopped by addition of dithiothreitol to a final concentration of 2 mM. The incubations are subjected to SDS-PAGE electrophoresis, dried, and autoradiographed. Protein bands corresponding to the particular polypeptides of the invention are excised, and the radioactivity quantified. A decrease in radioactivity with increasing ATP or adenly-5′-imidodiphosphate provides a measure of ATP affinity to the polypeptides.

### Example 54

### Small Molecule Screening

[1275] This invention is particularly useful for screening therapeutic compounds by using the polypeptides of the invention, or binding fragments thereof, in any of a variety of drug screening techniques. The polypeptide or fragment employed in such a test may be affixed to a solid support, expressed on a cell surface, free in solution, or located intracellularly. One method of drug screening utilizes eukaryotic or prokaryotic host cells which are stably transformed with recombinant nucleic acids expressing the polypeptide or fragment. Drugs are screened against such transformed cells in competitive binding assays. One may measure, for example, the formulation of complexes between the agent being tested and polypeptide of the invention.

[1276] Thus, the present invention provides methods of screening for drugs or any other agents which affect activities mediated by the polypeptides of the invention. These methods comprise contacting such an agent with a polypeptide of the invention or fragment thereof and assaying for the presence of a complex between the agent and the polypeptide or fragment thereof, by methods well known in the art. In such a competitive binding assay, the agents to screen are typically labeled. Following incubation, free agent is separated from that present in bound form, and the amount of free or uncomplexed label is a measure of the ability of a particular agent to bind to the polypeptides of the invention.

[1277] Another technique for drug screening provides high throughput screening for compounds having suitable binding affinity to the polypeptides of the invention, and is described in great detail in European Patent Application 84/03564, published on Sep. 13, 1984, which is herein incorporated by reference in its entirety. Briefly stated, large numbers of different small molecule test compounds are synthesized on a solid substrate, such as plastic pins or some other surface. The test compounds are reacted with polypeptides of the invention and washed. Bound polypeptides are then detected by methods well known in the art. Purified polypeptides are coated directly onto plates for use in the aforementioned drug screening techniques. In addition, non-neutralizing antibodies may be used to capture the peptide and immobilize it on the solid support.

[1278] This invention also contemplates the use of competitive drug screening assays in which neutralizing antibodies capable of binding polypeptides of the invention specifically compete with a test compound for binding to the polypeptides or fragments thereof. In this manner, the antibodies are used to detect the presence of any peptide which shares one or more antigenic epitopes with a polypeptide of the invention.

### Example 55

### Phosphorylation Assay

[1279] In order to assay for phosphorylation activity of the polypeptides of the invention, a phosphorylation assay as described in U.S. Pat. No. 5,958,405 (which is herein incorporated by reference) is utilized. Briefly, phosphorylation activity may be measured by phosphorylation of a protein substrate using gamma-labeled ³²P-ATP and quantitation of the incorporated radioactivity using a gamma radioisotope counter. The polypeptides of the invention are incubated with the protein substrate, ³²P-ATP, and a kinase buffer. The ³²P incorporated into the substrate is then separated from free ³²P-ATP by electrophoresis, and the incorporated ³²P is counted and compared to a negative control. Radioactivity counts above the negative control are indicative of phosphorylation activity of the polypeptides of the invention.

### Example 56

### Detection of Phosphorylation Activity (Activation) of the Polypeptides of the Invention in the Presence of Polypeptide Ligands

[1280] Methods known in the art or described herein may be used to determine the phosphorylation activity of the polypeptides of the invention. A preferred method of determining phosphorylation activity is by the use of the tyrosine phosphorylation assay as described in U.S. Pat. No. 5,817,471 (incorporated herein by reference).

### Example 57

### Identification of Signal Transduction Proteins that Interact with Polypeptides of the Present Invention

[1281] The purified polypeptides of the invention are research tools for the identification, characterization and purification of additional signal transduction pathway proteins or receptor proteins. Briefly, labeled polypeptides of the invention are useful as reagents for the purification of molecules with which it interacts. In one embodiment of affinity purification, polypeptides of the invention are covalently coupled to a chromatography column. Cell-free extract derived from putative target cells, such as carcinoma tissues, is passed over the column, and molecules with appropriate affinity bind to the polypeptides of the invention. The protein complex is recovered from the column, dissociated, and the recovered molecule subjected to N-terminal protein sequencing. This amino acid sequence is then used to identify the captured molecule or to design degenerate oligonucleotide probes for cloning the relevant gene from an appropriate cDNA library.

### Example 58

### IL-6 Bioassay

[1282] To test the proliferative effects of the polypeptides of the invention, the IL-6 Bioassay as described by Marz et al. is utilized (Proc. Natl. Acad. Sci., U.S.A., 95:3251-56 (1998), which is herein incorporated by reference). Briefly, IL-6 dependent B9 murine cells are washed three times in IL-6 free medium and plated at a concentration of 5,000 cells per well in 50 μl, and 50 μl of the IL-6-like polypeptide is added. After 68 hrs. at 37° C., the number of viable cells is measured by adding the tetrazolium salt thiazolyl blue (MTT) and incubating for a further 4 hrs. at 37° C. B9 cells are lysed by SDS and optical density is measured at 570 nm. Controls containing IL-6 (positive) and no cytoline (negative) are utilized. Enhanced proliferation in the test sample(s) relative to the negative control is indicative of proliferative effects mediated by polypeptides of the invention.

### Example 59

### Support of Chicken Embryo Neuron Survival

[1283] To test whether sympathetic neuronal cell viability is supported by polypeptides of the invention, the chicken embryo neuronal survival assay of Senaldi et al is utilized (Proc. Natl. Acad. Sci., U.S.A., 96:11458-63 (1998), which is herein incorporated by reference). Briefly, motor and sympathetic neurons are isolated from chicken embryos, resuspended in L15 medium (with 10% FCS, glucose, sodium selenite, progesterone, conalbumin, putrescine, and insulin; Life Technologies, Rockville, Md.) and Dulbecco's modified Eagles medium [with 10% FCS, glutamine, penicillin, and 25 mM Hepes buffer (pH 7.2); Life Technologies, Rockville, Md.], respectively, and incubated at 37° C. in 5% CO₂ in the presence of different concentrations of the purified IL-6-like polypeptide, as well as a negative control lacking any cytokine. After 3 days, neuron survival is determined by evaluation of cellular morphology, and through the use of the colorimetric assay of Mosmann (Mosmann, T., J. Immunol. Methods, 65:55-63 (1983)). Enhanced neuronal cell viability as compared to the controls lacking cytokine is indicative of the ability of the inventive purified IL-6-like polypeptide(s) to enhance the survival of neuronal cells.

### Example 60

### Assay for Phosphatase Activity

[1284] The following assay may be used to assess serine/threonine phosphatase (PTPase) activity of the polypeptides of the invention.

[1285] In order to assay for serine/threonine phosphatase (PTPase) activity, assays can be utilized which are widely known to those skilled in the art. For example, the serine/threonine phosphatase (PSPase) activity is measured using a PSPase assay kit from New England Biolabs, Inc. Myelin basic protein (MyBP), a substrate for PSPase, is phosphorylated on serine and threonine residues with cAMP-dependent Protein Kinase in the presence of [³²P]ATP. Protein serine/threonine phosphatase activity is then determined by measuring the release of inorganic phosphate from 32P-labeled MyBP.

### Example 61

### Interaction of Serine/Threonine Phosphatases with Other Proteins

[1286] The polypeptides of the invention with serine/threonine phosphatase activity as determined in Example 60 are research tools for the identification, characterization and purification of additional interacting proteins or receptor proteins, or other signal transduction pathway proteins. Briefly, labeled polypeptide(s) of the invention is useful as a reagent for the purification of molecules with which it interacts. In one embodiment of affinity purification, polypeptide of the invention is covalently coupled to a chromatography column. Cell-free extract derived from putative target cells, such as neural or liver cells, is passed over the column, and molecules with appropriate affinity bind to the polypeptides of the invention. The polypeptides of the invention—complex is recovered from the column, dissociated, and the recovered molecule subjected to N-terminal protein sequencing. This amino acid sequence is then used to identify the captured molecule or to design degenerate oligonucleotide probes for cloning the relevant gene from an appropriate cDNA library.

### Example 62

### Assaying for Heparanase Activity

[1287] In order to assay for heparanase activity of the polypeptides of the invention, the heparanase assay described by Vlodavsky et al is utilized (Vlodavsky, I., et al., Nat. Med., 5:793-802 (1999)). Briefly, cell lysates, conditioned media or intact cells (1×10⁶ cells per 35-mm dish) are incubated for 18 hrs at 37° C., pH 6.2-6.6, with ³⁵S-labeled ECM or soluble ECM derived peak I proteoglycans. The incubation medium is centrifuged and the supernatant is analyzed by gel filtration on a Sepharose CL-6B column (0.9×30 cm). Fractions are eluted with PBS and their radioactivity is measured. Degradation fragments of heparan sulfate side chains are eluted from Sepharose 6B at 0.5<Kₐᵥ<0.8 (peak II). Each experiment is done at least three times. Degradation fragments corresponding to “peak II,” as described by Vlodavsky et al., is indicative of the activity of the polypeptides of the invention in cleaving heparan sulfate.

### Example 63

### Immobilization of Biomolecules

[1288] This example provides a method for the stabilization of polypeptides of the invention in non-host cell lipid bilayer constucts (see, e.g., Bieri et al., Nature Biotech 17:1105-1108 (1999), hereby incorporated by reference in its entirety herein) which can be adapted for the study of polypeptides of the invention in the various functional assays described above. Briefly, carbohydrate-specific chemistry for biotinylation is used to confine a biotin tag to the extracellular domain of the polypeptides of the invention, thus allowing uniform orientation upon immobilization. A 50 uM solution of polypeptides of the invention in washed membranes is incubated with 20 mM NaIO4 and 1.5 mg/ml (4 mM) BACH or 2 mg/ml (7.5 mM) biotin-hydrazide for 1 hr at room temperature (reaction volume, 150 ul). Then the sample is dialyzed (Pierce Slidealizer Cassett, 10 kDa cutoff; Pierce Chemical Co., Rockford Ill.) at 4 C first for 5 h, exchanging the buffer after each hour, and finally for 12 h against 500 ml buffer R (0.15 M NaCl, 1 mM MgCl2, 10 mM sodium phosphate, pH7). Just before addition into a cuvette, the sample is diluted 1:5 in buffer ROG50 (Buffer R supplemented with 50 mM octylglucoside).

### Example 64

### TAQMAN

[1289] Quantitative PCR (QPCR). Total RNA from cells in culture are extracted by Trizol separation as recommended by the supplier (LifeTechnologies). (Total RNA is treated with DNase I (Life Technologies) to remove any contaminating genomic DNA before reverse transcription.) Total RNA (50 ng) is used in a one-step, 50 ul, RT-QPCR, consisting of Taqman Buffer A (Perkin-Elmer; 50 mM KCl/10 mM Tris, pH 8.3), 5.5 mM MgCl₂, 240 μM each dNTP, 0.4 units RNase inhibitor (Promega), 8% glycerol, 0.012% Tween-20, 0.05% gelatin, 0.3 uM primers, 0.1 uM probe, 0.025 units Amplitaq Gold (Perkin-Elmer) and 2.5 units Superscript II reverse transcriptase (Life Technologies). As a control for genomic contamination, parallel reactions are setup without reverse transcriptase. The relative abundance of (unknown) and 18S RNAs are assessed by using the Applied Biosystems Prism 7700 Sequence Detection System (Livak, K. J., Flood, S. J., Marmaro, J., Giusti, W. & Deetz, K (1995) PCR Methods Appl. 4, 357-362). Reactions are carried out at 48° C. for 30 min, 95° C. for 10 min, followed by 40 cycles of 95° C. for 15 s, 60° C. for 1 min. Reactions are performed in triplicate.

[1290] Primers (f & r) and FRET probes sets are designed using Primer Express Software (Perkin-Elmer). Probes are labeled at the 5′-end with the reporter dye 6-FAM and on the 3′-end with the quencher dye TAMRA (Biosource International, Camarillo, Calif. or Perkin-Elmer).

### Example 65

### Assays for Metalloproteinase Activity

[1291] Metalloproteinases (EC 3.4.24.-) are peptide hydrolases which use metal ions, such as Zn²⁺, as the catalytic mechanism. Metalloproteinase activity of polypeptides of the present invention can be assayed according to the following methods.

[1292] Proteolysis of Alpha-2-Macroglobulin

[1293] To confirm protease activity, purified polypeptides of the invention are mixed with the substrate alpha-2-macroglobulin (0.2 unit/ml; Boehringer Mannheim, Germany) in 1× assay buffer (50 mM HEPES, pH 7.5, 0.2 M NaCl, 10 mM CaCl₂, 25 μM ZnCl₂ and 0.05% Brij-35) and incubated at 37° C. for 1-5 days. Trypsin is used as positive control. Negative controls contain only alpha-2-macroglobulin in assay buffer. The samples are collected and boiled in SDS-PAGE sample buffer containing 5% 2-mercaptoethanol for 5-min, then loaded onto 8% SDS-polyacrylamide gel. After electrophoresis the proteins are visualized by silver staining. Proteolysis is evident by the appearance of lower molecular weight bands as compared to the negative control.

[1294] Inhibition of Alpha-2-Macroglobulin Proteolysis by Inhibitors of Metalloproteinases

[1295] Known metalloproteinase inhibitors (metal chelators (EDTA, EGTA, AND HgCl₂), peptide metalloproteinase inhibitors (TIMP-1 and TIMP-2), and commercial small molecule MMP inhibitors) are used to characterize the proteolytic activity of polypeptides of the invention. The three synthetic MMP inhibitors used are: MMP inhibitor I, [IC₅₀=1.0 μM against MMP-1 and MMP-8; IC₅₀=30 μM against MMP-9; IC₅₀=150 μM against MMP-3]; MMP-3 (stromelysin-1) inhibitor I [IC₅₀=5 μM against MMP-3], and MMP-3 inhibitor If [Kᵢ=130 nM against MMP-3]; inhibitors available through Calbiochem, catalog # 444250, 444218, and 444225, respectively). Briefly, different concentrations of the small molecule MMP inhibitors are mixed with purified polypeptides of the invention (50 μg/ml) in 22.9 μl of 1×HEPES buffer (50 mM HEPES, pH 7.5, 0.2 M NaCl, 10 mM CaCl₂, 25 μM ZnCl₂ and 0.05% Brij-35) and incubated at room temperature (24° C.) for 2-hr, then 7.1 μl of substrate alpha-2-macroglobulin (0.2 unit/ml) is added and incubated at 37° C. for 20-hr. The reactions are stopped by adding 4× sample buffer and boiled immediately for 5 minutes. After SDS-PAGE, the protein bands are visualized by silver stain.

[1296] Synthetic Fluorogenic Peptide Substrates Cleavage Assay

[1297] The substrate specificity for polypeptides of the invention with demonstrated metalloproteinase activity can be determined using synthetic fluorogenic peptide substrates (purchased from BACHEM Bioscience Inc). Test substrates include, M-1985, M-2225, M-2105, M-2110, and M-2255. The first four are MMP substrates and the last one is a substrate of tumor necrosis factor-α (TNF-α) converting enzyme (TACE). AR the substrates are prepared in 1:1 dimethyl sulfoxide (DMSO) and water. The stock solutions are 50-500 μM. Fluorescent assays are performed by using a Perkin Elmer LS 50B luminescence spectrometer equipped with a constant temperature water bath. The excitation λ is 328 nm and the emission λ is 393 nm. Briefly, the assay is carried out by incubating 176 μl 1×HEPES buffer (0.2 M NaCl, 10 mM CaCl₂, 0.05% Brij-35 and 50 mM HEPES, pH 7.5) with 4 μl of substrate solution (50 μM) at 25. ° C. for 15 minutes, and then adding 20 μl of a purified polypeptide of the invention into the assay cuvett. The final concentration of substrate is 1 μM. Initial hydrolysis rates are monitored for 30-min.

### Example 66

### Characterization of the cDNA Contained in a Deposited Plasmid

[1298] The size of the cDNA insert contained in a deposited plasmid may be routinely determined using techniques known in the art, such as PCR amplification using synthetic primers hybridizable to the 3′ and 5′ ends of the cDNA sequence. For example, two primers of 17-30 nucleotides derived from each end of the cDNA (i.e., hybridizable to the absolute 5′ nucleotide or the 3′ nucleotide end of the sequence of SEQ ID NO:X, respectively) are synthesized and used to amplify the cDNA using the deposited cDNA plasmid as a template. The polymerase chain reaction is carried out under routine conditions, for instance, in 25 ul of reaction mixture with 0.5 ug of the above cDNA template. A convenient reaction mixture is 1.5-5 mM MgCl₂, 0.01% (w/v) gelatin, 20 uM each of DATP, dCTP, dGTP, dTTP, 25 pmol of each primer and 0.25 Unit of Taq polymerase. Thirty five cycles of PCR (denaturation at 94 degree C. for 1 min; annealing at 55 degree C. for 1 min; elongation at 72 degree C. for 1 min) are performed with a Perkin-Elmer Cetus automated thermal cycler. The amplified product is analyzed by agarose gel electrophoresis. The PCR product is verified to be the selected sequence by subcloning and sequencing the DNA product. It will be clear that the invention may be practiced otherwise than as particularly described in the foregoing description and examples. Numerous modifications and variations of the present invention are possible in light of the above teachings and, therefore, are within the scope of the appended claims.

### INCORPORATION BY REFERENCE

[1299] The entire disclosure of each document cited (including patents, patent applications, journal articles, abstracts, laboratory manuals, books, or other disclosures) in the Background of the Invention, Detailed Description, and Examples is hereby incorporated herein by reference. In addition, the sequence listing submitted herewith is incorporated herein by reference in its entirety. The specification and sequence listing of each of the following U.S. and PCT applications are herein incorporated by reference in their entirety (filing dates shown in format “year-month-day” (yyyy-mm-dd)): Application No. 60/278,650 filed on 2001-03-27, application Ser. No. 09/950,082 filed on 2001-09-12, application Ser. No. 09/950,083 filed on 2001-09-12, Application No. 60/306,171 filed on 19-07-2001, application Ser. No. 09/833,245 filed on 2001-0412, Application No. PCT/US01/11988 filed on 2001-04-12, Application No. 60/331,287 filed on 2001-11-13, Application No. 60/277,340 filed on 2001-03-21, Application No. PCT/US00/06043 filed on 2000-03-09, Application No. PCT/US00/06012 filed on 2000-03-09, Application No. PCT/US00/06058 filed on 2000-03-09, Application No. PCT/US00/06044 filed on 2000-03-09, Application No. PCT/US00/06059 filed on 2000-03-09, Application No. PCT/US00/06042, filed on 2000-03-09, Application No. PCT/US00/06014 filed on 2000-03-09, Application No. PCT/US00/06013 filed on 2000-03-09, Application No. PCT/US00/06049 filed on 2000-03-09, Application No. PCT/US00/06057 filed on 2000-03-09, Application No. PCT/US00/06824 filed on 2000-03-16, Application No. PCT/US00/06765 filed on 2000-03-16, Application No. PCT/US00/06792 filed on 2000-03-16, Application No. PCT/US00/06830 filed on 2000-03-16, Application No. PCT/US00/06782 filed on 2000-03-16, Application No. PCT/US00/06822 filed on 2000-03-16, Application No. PCT/US00/06791 filed on 2000-03-16, Application No. PCT/US00/06828 filed on 2000-03-16, Application No. PCT/US00/06823 filed on 2000-03-16, Application No. PCT/US00/06781 filed on 2000-03-16, Application No. PCT/US00/07505 filed on 2000-03-22, Application No. PCT/US00/07440 filed on 2000-03-22, Application No. PCT/US00/07506 filed on 2000-03-22, Application No. PCT/US00/07507 filed on 2000-03-22, Application No. PCT/US00/07535 filed on 2000-03-22, Application No. PCT/US00/07525 filed on 2000-03-22, Application No. PCT/US00/07534 filed on 2000-03-22, Application No. PCT/US00/07483 filed on 2000-03-22, Application No. PCT/US00/07526 filed on 2000-03-22, Application No. PCT/US00/07527 filed on 2000-03-22, Application No. PCT/US00/07661 filed on 2000-03-23, Application No. PCT/US00/07579 filed on 2000-03-23, Application No. PCT/US00/07723 filed on 2000-03-23, Application No. PCT/US00/07724 filed on 2000-03-23, Application No. PCT/US00/14929 filed on 2000-06-01, Application No. PCT/US00/07722 filed on 2000-03-23, Application No. PCT/US00/07578 filed on 2000-03-23, Application No. PCT/US00/07726 filed on 2000-03-23, Application No. PCT/US00/07677 filed on 2000-03-23, Application No. PCT/US00/07725 filed on 2000-03-23, Application No. PCT/US00/09070 filed on 2000-04-06, Application No. PCT/US00/08982 filed on 2000-04-06, Application No. PCT/US00/08983 filed on 2000-04-06, Application No. PCT/US00/09067 filed on 2000-04-06, Application No. PCT/US00/09066 filed on 2000-04-06, Application No. PCT/US00/09068 filed on 2000-04-06, Application No. PCT/US00/08981 filed on 2000-04-06, Application No. PCT/US00/08980 filed on 2000-04-06, Application No. PCT/US00/09071 filed on 2000-04-06, Application No. PCT/US00/09069 filed on 2000-04-06, Application No. PCT/US00/15136 filed on 2000-06-01, Application No. PCT/US00/14926 filed on 2000-06-01, Application No. PCT/US00/14963 filed on 2000-06-01, Application No. PCT/US00/15135 filed on 2000-06-01, Application No. PCT/US00/14934 filed on 2000-06-01, Application No. PCT/US00/14933 filed on 2000-06-01, Application No. PCT/US00/15137 filed on 2000-06-01, Application No. PCT/US00/14928 filed on 2000-06-01, Application No. PCT/US00/14973 filed on 2000-06-01, Application No. PCT/US00/14964 filed on 2000-06-01, Application No. PCT/US00/26376 filed on 2000-09-26, Application No. PCT/US00/26371 filed on 2000-09-26, Application No. PCT/US00/26324 filed on 2000-09-26, Application No. PCT/US00/26323 filed on 2000-09-26, Application No. PCT/US00/26337 filed on 2000-09-26, Application No. PCT/US01/13318 filed on 2001-04-27, Application No. U.S. 60/124,146 filed on 1999-03-12, Application No. U.S. 60/167,061 filed on 1999-11-23, Application No. U.S. 60/124,093 filed on 1999-03-12, Application No. U.S. 60/166,989 filed on 1999-11-23, Application No. U.S. 60/124,145 filed on 1999-03-12, Application No. U.S. 60/168,654 filed on 1999-12-03, Application No. U.S. 60/124,099 filed on 1999-03-12, Application No. U.S. 60/168,661 filed on 1999-12-03, Application No. U.S. 60/124,096 filed on 1999-03-12, Application No. U.S. 60/168,622 filed on 1999-12-03, Application No. U.S. 60/124,143 filed on 1999-03-12, Application No. U.S. 60/168,663 filed on 1999-12-03, Application No. U.S. 60/124,095 filed on 1999-03-12, Application No. U.S. 60/138,598 filed on 1999-06-11, Application No. U.S. 60/168,665 filed on 1999-12-03, Application No. U.S. 60/125,360 filed on 1999-03-19, Application No. U.S. 60/138,626 filed on 1999-06-11, Application No. U.S. 60/168,662 filed on 1999-12-03, Application No. U.S. 60/124,144 filed on 1999-03-12, Application No. U.S. 60/138,574 filed on 1999-06-11, Application No. U.S. 60/168,667 filed on 1999-12-03, Application No. U.S. 60/124,142 filed on 1999-03-12, Application No. U.S. 60/138,597 filed on 1999-06-11, Application No. U.S. 60/168,666 filed on 1999-12-03, Application No. U.S. 60/125,359 filed on 1999-03-19, Application No. U.S. 60/168,664 filed on 1999-12-03, Application No. U.S. 60/126,051 filed on 1999-03-23, Application No. U.S. 60/169,906 filed on 1999-12-10, Application No. U.S. 60/125,362 filed on 1999-03-19, Application No. U.S. 60/169,980 filed on 1999-12-10, Application No. U.S. 60/125,361 filed on 1999-03-19, Application No. U.S. 60/169,910 filed on 1999-12-10, Application No. U.S. 60/125,812 filed on 1999-03-23, Application No. U.S. 60/169,936 filed on 1999-12-10, Application No. U.S. 60/126,054 filed on 1999-03-23, Application No. U.S. 60/169,916 filed on 1999-12-10, Application No. U.S. 60/125,815 filed on 1999-03-23, Application No. U.S. 60/169,946 filed on 1999-12-10, Application No. U.S. 60/125,358 filed on 1999-03-19, Application No. U.S. 60/169,616 filed on 1999-12-08, Application No. U.S. 60/125,364 filed on 1999-03-19, Application No. U.S. 60/169,623 filed on 1999-12-08, Application No. U.S. 60/125,363 filed on 1999-03-19, Application No. U.S. 60/169,617 filed on 1999-12-08, Application No. U.S. 60/126,502 filed on 1999-03-26, Application No. U.S. 60/172,410 filed on 1999-12-17, Application No. U.S. 60/126,503 filed on 1999-03-26, Application No. U.S. 60/172,409 filed on 1999-12-17, Application No. U.S. 60/126,505 filed on 1999-03-26, Application No. U.S. 60/172,412 filed on 1999-12-17, Application No. U.S. 60/126,594 filed on 1999-03-26, Application No. U.S. 60/172,408 filed on 1999-12-17, Application No. U.S. 60/126,511 filed on 1999-03-26, Application No. U.S. 60/172,413 filed on 1999-12-17, Application No. U.S. 60/126,595 filed on 1999-03-26, Application No. U.S. 60/171,549 filed on 1999-12-22, Application No. U.S. 60/126,598 filed on 1999-03-26, Application No. U.S. 60/171,504 filed on 1999-12-22, Application No. U.S. 60/126,596 filed on 1999-03-26, Application No. U.S. 60/171,552 filed on 1999-12-22, Application No. U.S. 60/126,600 filed on 1999-03-26, Application No. U.S. 60/171,550 filed on 1999-12-22, Application No. U.S. 60/126,501 filed on 1999-03-26, Application No. U.S. 60/171,551 filed on 1999-12-22, Application No. U.S. 60/126,504 filed on 1999-03-26, Application No. U.S. 60/174,847 filed on 2000-01-07, Application No. U.S. 60/126,509 filed on 1999-03-26, Application No. U.S. 60/174,853 filed on 2000-01-07, Application No. U.S. 60/126,506 filed on 1999-03-26, Application No. U.S. 60/174,852 filed on 2000-01-07, Application No. U.S. 60/242,710 filed on 2000-10-25, Application No. U.S. 60/126,510 filed on 1999-03-26, Application No. U.S. 60/174,850 filed on 2000-01-07, Application No. U.S. 60/138,573 filed on 1999-06-11, Application No. U.S. 60/174,851 filed on 2000-01-07, Application No. U.S. 60/126,508 filed on 1999-03-26, Application No. U.S. 60/174,871 filed on 2000-01-07, Application No. U.S. 60/126,507 filed on 1999403-26, Application No. U.S. 60/174,872 filed on 2000-01-07, Application No. U.S. 60/126,597 filed on 1999-03-26, Application No. U.S. 60/174,877 filed on 2000-01-07, Application No. U.S. 60/126,601 filed on 1999-03-26, Application No. U.S. 60/154,373 filed on 1999-09-17, Application No. U.S. 60/176,064 filed on 2000-01-14, Application No. U.S. 60/126,602 filed on 19994-03-26, Application No. U.S. 60/176,063 filed on 2000-01-14, Application No. U.S. 60/128,695 filed on 1999-04-09, Application No. U.S. 60/176,052 filed on 2000-01-14, Application No. U.S. 60/128,696 filed on 1999-04-09, Application No. U.S. 60/176,069 filed on 2000-01-14, Application No. U.S. 60/128,703 filed on 1999-04-09, Application No. U.S. 60/176,068 filed on 2000-01-14, Application No. U.S. 60/128,697 filed on 1999449, Application No. U.S. 60/176,929 filed on 2000-01-20, Application No. U.S. 60/128,698 filed on 1999-04-09, Application No. U.S. 60/176,926 filed on 2000-01-20, Application No. U.S. 60/128,699 filed on 1999-04-09, Application No. U.S. 60/177,050 filed on 2000-01-20, Application No. U.S. 60/128,701 filed on 1999-04-09, Application No. U.S. 60/177,166 filed on 2000-01-20, Application No. U.S. 60/128,700 filed on 1999-04-09, Application No. U.S. 60/176,930 filed on 2000-01-20, Application No. U.S. 60/128,694 filed on 1999×04-09, Application No. U.S. 60/176,931 filed on 2000-01-20, Application No. U.S. 60/128,702 filed on 1999-04-09, Application No. U.S. 60/177,049 filed on 2000-01-20, Application No. U.S. 60/138,629 filed on 1999-06-11, Application No. U.S. 60/138,628 filed on 1999-06-11, Application No. U.S. 60/138,631 filed on 1999-06-11, Application No. U.S. 60/138,632 filed on 1999-06-11, Application No. U.S. 60/138,599 filed on 1999-06-11, Application No. U.S. 60/138,572 filed on 1999-06-11, Application No. U.S. 60/138,625 filed on 1999-06-11, Application No. U.S. 60/138,633 filed on 1999-06-11, Application No. U.S. 60/138,630 filed on 1999-06-11, Application No. U.S. 60/138,627 filed on 1999-06-11, Application No. U.S. 60/155,808 filed on 1999-09-27, Application No. U.S. 60/155,804 filed on 1999-09-27, Application No. U.S. 60/155,807 filed on 1999-09-27, Application No. U.S. 60/155,805 filed on 1999-09-27, Application No. U.S. 60/155,806 filed on 1999-09-27, Application No. U.S. 60/201,194 filed on 2000-05-02, Application No. U.S. 60/212,142 filed on 2000-06-16.

LENGTHY TABLE
The patent application contains a lengthy table section. A copy of the table is available in electronic form from the USPTO web site (http://seqdata.uspto.gov/?pageRequest=docDetail&DocID=US20070042361A1). An electronic copy of the table will also be available from the USPTO upon request and payment of the fee set forth in 37 CFR 1.19(b)(3).

1-32. (canceled)

33. An isolated nucleic acid molecule comprising a first polynucleotide sequence at least 95% identical to a second polynucleotide sequence selected from the group consisting of:
(a) a polynucleotide fragment of SEQ ID NO:X as referenced in Table 1A;
(b) a polynucleotide encoding a full length polypeptide of SEQ ID NO:Y or a full length polypeptide encoded by the cDNA Clone ID in ATCC Deposit No:Z corresponding to SEQ ID NO:Y as referenced in Table 1A;
(c) a polynucleotide encoding a polypeptide fragment of SEQ ID NO:Y or a polypeptide fragment encoded by the cDNA Clone ID in ATCC Deposit No:Z corresponding to SEQ ID NO:Y as referenced in Table 1A;
(d) a polynucleotide encoding a polypeptide fragment of SEQ ID NO:Y or a polypeptide fragment encoded by the cDNA Clone ID in ATCC Deposit No:Z corresponding to SEQ ID NO:Y as referenced in Table 1A, wherein said fragment has biological activity;
(e) a polynucleotide encoding a polypeptide domain of SEQ ID NO:Y as referenced in Table 1B;
(f) a polynucleotide encoding a polypeptide domain of SEQ ID NO:Y as referenced in Table 2;
(g) a polynucleotide encoding a predicted epitope of SEQ ID NO:Y as referenced in Table 1B; and
(h) a polynucleotide capable of hybridizing under stringent conditions to any one of the polynucleotides specified in (a)-(g), wherein said polynucleotide does not hybridize under stringent conditions to a nucleic acid molecule having a nucleotide sequence of only A residues or of only T residues.

34. The isolated nucleic acid molecule of claim 33, wherein the polynucleotide fragment comprises a nucleotide sequence encoding a secreted form of SEQ ID NO:Y or a secreted form of the polypeptide encoded by the cDNA Clone ID in ATCC Deposit No:Z corresponding to SEQ ID NO:Y, as referenced in Table 1A.

35. The isolated nucleic acid molecule of claim 33, wherein the polynucleotide fragment comprises a nucleotide sequence encoding the sequence identified as SEQ ID NO:Y or the polypeptide encoded by the cDNA sequence included in ATCC Deposit No:Z, which is hybridizable to SEQ ID NO:X, as referenced in Table 1A.

36. The isolated nucleic acid molecule of claim 33, wherein the polynucleotide fragment comprises the entire nucleotide sequence of SEQ ID NO:X or the cDNA sequence included in ATCC Deposit No:Z, which is hybridizable to SEQ ID NO:X, as referenced in Table 1A.

37. The isolated nucleic acid molecule of claim 34, wherein the nucleotide sequence comprises sequential nucleotide deletions from either the C-terminus or the N-terminus.

38. The isolated nucleic acid molecule of claim 35, wherein the nucleotide sequence comprises sequential nucleotide deletions from either the C-terminus or the N-terminus.

39. A recombinant vector comprising the isolated nucleic acid molecule of claim 33.

40. A method of making a recombinant host cell comprising the isolated nucleic acid molecule of claim 33.

41. A recombinant host cell produced by the method of claim 40.

42. The recombinant host cell of claim 41 comprising vector sequences.

43. A polypeptide comprising a first amino acid sequence at least 95% identical to a second amino acid sequence selected from the group consisting of:
(a) a full length polypeptide of SEQ ID NO:Y or a full length polypeptide encoded by the cDNA Clone ID in ATCC Deposit No:Z corresponding to SEQ ID NO:Y as referenced in Table 1A;
(b) a secreted form of SEQ ID NO:Y or a secreted form of the polypeptide encoded by the cDNA Clone ID in ATCC Deposit No:Z corresponding to SEQ ID NO:Y as referenced in Table 1A;
(c) a polypeptide fragment of SEQ ID NO:Y or a polypeptide fragment encoded by the cDNA Clone ID in ATCC Deposit No:Z corresponding to SEQ ID NO:Y as referenced in Table 1A;
(d) a polypeptide fragment of SEQ ID NO:Y or a polypeptide fragment encoded by the cDNA Clone ID in ATCC Deposit No:Z corresponding to SEQ ID NO:Y as referenced in Table 1A, wherein said fragment has biological activity;
(e) a polypeptide domain of SEQ ID NO:Y as referenced in Table 1B;
(f) a polypeptide domain of SEQ ID NO:Y as referenced in Table 2; and
(g) a predicted epitope of SEQ ID NO:Y as referenced in Table 1B.

44. The polypeptide of claim 43, wherein said polypeptide comprises a heterologous amino acid sequence.

45. The isolated polypeptide of claim 43, wherein the secreted form or the full length protein comprises sequential amino acid deletions from either the C-terminus or the N-terminus.

46. An isolated antibody that binds specifically to the isolated polypeptide of claim 43.

47. A recombinant host cell that expresses the isolated polypeptide of claim 43.

48. A method of making an isolated polypeptide comprising:
(a) culturing the recombinant host cell of claim 47 under conditions such that said polypeptide is expressed; and
(b) recovering said polypeptide.

49. The polypeptide produced by claim 48.

50. A method for preventing, treating, or ameliorating cancer or other hyperproliferative disorder, comprising administering to a mammalian subject a therapeutically effective amount of the polypeptide of claim 43.

51. A method of diagnosing cancer or other hyperproliferative disorder in a subject comprising:
(a) determining the presence or absence of a mutation in the polynucleotide of claim 33; and
(b) diagnosing the cancer or other hyperproliferative disorder based on the presence or absence of said mutation.

52. A method of diagnosing cancer or other hyperproliferative disorder in a subject comprising:
(a) determining the presence or amount of expression of the polypeptide of claim 43 in a biological sample; and
(b) diagnosing the cancer or other hyperproliferative disorder based on the presence or amount of expression of the polypeptide.

53. A method for identifying a binding partner to the polypeptide of claim 43 comprising:
(a) contacting the polypeptide of claim 43 with a binding partner; and
(b) determining whether the binding partner effects an activity of the polypeptide.

54. The gene corresponding to the cDNA sequence of SEQ ID NO:X.

55. A method of identifying an activity in a biological assay, wherein the method comprises:
(a) expressing SEQ ID NO:X in a cell;
(b) isolating the supernatant;
(c) detecting an activity in a biological assay; and
(d) identifying the protein in the supernatant having the activity.

56. The product produced by the method of claim 53.

The application's sequence listing, which the Patent Office published only in electronic form, follows.

SEQUENCE LISTING (1834 sequences)

SEQ ID NO: 1 - DNA, 733 bp, Homo sapiens
gggatccggagcccaaatcttctgacaaaactcacacatgcccaccgtgcccagcacctgaattcgagggtgcaccgtcagtcttcctcttccccccaaaacccaaggacaccctcatgatctcccggactcctgaggtcacatgcgtggtggtggacgtaagccacgaagaccctgaggtcaagttcaactggtacgtggacggcgtggaggtgcataatgccaagacaaagccgcgggaggagcagtacaacagcacgtaccgtgtggtcagcgtcctcaccgtcctgcaccaggactggctgaatggcaaggagtacaagtgcaaggtctccaacaaagccctcccaacccccatcgagaaaaccatctccaaagccaaagggcagccccgagaaccacaggtgtacaccctgcccccatcccgggatgagctgaccaagaaccaggtcagcctgacctgcctggtcaaaggcttctatccaagcgacatcgccgtggagtgggagagcaatgggcagccggagaacaactacaagaccacgcctcccgtgctggactccgacggctccttcttcctctacagcaagctcaccgtggacaagagcaggtggcagcaggggaacgtcttctcatgctccgtgatgcatgaggctctgcacaaccactacacgcagaagagcctctccctgtctccgggtaaatgagtgcgacggccgcgactctagaggat

SEQ ID NO: 2 - protein, 5 aa, Homo sapiens
  Site (3): Xaa equals any amino acid
WSXWS

SEQ ID NO: 3 - DNA, 86 bp, Artificial Sequence
  Primer_Bind: Synthetic sequence with 4 tandem copies of the GAS binding site found in the IRF1 promoter (Rothman et al., Immunity 1:457-468 (1994)), 18 nucleotides complementary to the SV40 early promoter, and a Xho I restriction site.
gcgcctcgagatttccccgaaatctagatttccccgaaatgatttccccgaaatgatttccccgaaatatctgccatctcaattag

SEQ ID NO: 4 - DNA, 27 bp, Artificial Sequence
  Primer_Bind: Synthetic sequence complementary to the SV40 promoter; includes a Hind III restriction site.
gcggcaagctttttgcaaagcctaggc

SEQ ID NO: 5 - DNA, 271 bp, Artificial Sequence
  Protein_Bind: Synthetic promoter for use in biological assays; includes GAS binding sites found in the IRF1 promoter (Rothman et al., Immunity 1:457-468 (1994)).
ctcgagatttccccgaaatctagatttccccgaaatgatttccccgaaatgatttccccgaaatatctgccatctcaattagtcagcaaccatagtcccgcccctaactccgcccatcccgcccctaactccgcccagttccgcccattctccgccccatggctgactaattttttttatttatgcagaggccgaggccgcctcggcctctgagctattccagaagtagtgaggaggcttttttggaggcctaggcttttgcaaaaagctt

SEQ ID NO: 6 - DNA, 32 bp, Artificial Sequence
  Primer_Bind: Synthetic primer complementary to human genomic EGR-1 promoter sequence (Sakamoto et al., Oncogene 6:867-871 (1991)); includes a Xho I restriction site.
gcgctcgagggatgacagcgatagaaccccgg

SEQ ID NO: 7 - DNA, 31 bp, Artificial Sequence
  Primer_Bind: Synthetic primer complementary to human genomic EGR-1 promoter sequence (Sakamoto et al., Oncogene 6:867-871 (1991)); includes a Hind III restriction site.
gcgaagcttcgcgactccccggatccgcctc

SEQ ID NO: 8 - DNA, 12 bp, Homo sapiens
ggggactttccc

SEQ ID NO: 9 - DNA, 73 bp, Artificial Sequence
  Primer_Bind: Synthetic primer with 4 tandem copies of the NF-KB binding site (GGGGACTTTCCC), 18 nucleotides complementary to the 5' end of the SV40 early promoter sequence, and a XhoI restriction site.
gcggcctcgaggggactttcccggggactttccggggactttccgggactttccatcctgccatctcaattag

SEQ ID NO: 10 - DNA, 256 bp, Artificial Sequence
  Protein_Bind: Synthetic promoter for use in biological assays; includes NF-KB binding sites.
ctcgaggggactttcccggggactttccggggactttccgggactttccatctgccatctcaattagtcagcaaccatagtcccgcccctaactccgcccatcccgcccctaactccgcccagttccgcccattctccgccccatggctgactaattttttttatttatgcagaggccgaggccgcctcggcctctgagctattccagaagtagtgaggaggcttttttggaggcctaggcttttgcaaaaagctt

SEQ ID NO: 11 - DNA, 605 bp, Homo sapiens
ggcacgaggttggttggagcgagcatgtgggtctgcagtacccggcacgaggcgaacccccgcccggcagtggcgggggctgctcccagcttctggctgtcacggacctgccgcctcctcctactccgcatccgccgagcctgcccgggtccgggcgcttgtctatgggcaccacggggatccagccaaggtcgtcgaactcaagaacctggagctagctgctgtgagaggatcagatgtccgtgtgaagatgctggcggcccctatcaatccatctgacataaatatgatccaaggaaactacggactccttcctgaactgcctgctgttggagggaacgaaggtgttgcacaggtggtagcggtgggcagcaatgtgaccgggctgaagccaggagactgggtgattccagcaaatgctggtttagagtctcgctctgttgcccaggctggtgcaatcttggctcactgcaacctgcaacctccacctcacaggagaatggcgtgaaccccggaggcagagcttgcggtgggccgagattgcgccactgcactccagcctgggcgacagagggagactccgtctcaaaaaaaaaaaaaaaaaa

SEQ ID NO: 12 - DNA, 1493 bp, Homo sapiens
ggcacgagttttttttcatataaaactatttattcataaatattttccaaaatgaaaataggtttaccaaaaaatgtccctcactggggagggggatcagcatgcgggggaagggggtgggtagagggaggggccggtgtcactggaggtcccggtcctccaggtagcggtactcaaaggtgaagccttccttcttccgctggccccacttctcgtagtcaaagtagatgtaggtgccctgctcaaactcgtcagtgatggtcttgggctcctcgtgcctctggaaccacatcatgtacttggtgtggaatcgccatgactgcttctttagggccttggctgccagatactgtgccttagtgccctccagatagtagaagatgaagaagagagtctcggtcgacaggcgctggtagaattccacagtgtccgagtgtgggggtggcatctggtggtggtaggggggcgtcggacaggggttccgggggaggtactgccgaatacgctcagagtcagaggggtgaggcatgtggtgccaggcggcctcttccatggcctgctgatagagctgctccttggtgaggggcacagggcccagtggacagacacccagcgacagcggtatgttcacctctgacagctgcaggggcggctgggctgaggccggaggtgctgatgtactgctcaggatgatgtctcgctcggtcaggtgcagcgttggcacagggtcctcaatgccagagctgatggctgcccgttccgccatggacttcaaggagctcagaggctcagggccttgatttctgggcggtgctgaactgtggaggcccattgagcagggcaccggctgccttggcatcactgaagctgggcgttggggagctgggaggattcacaggcagtggcaccaggaggctgggtccccctgagttgttccctgagcctggggccacgcccccagcccccgttggggctgccgcactgggttccttcgaggtgctgggaggtgggttgtgggggccggaaggggggcccaaggcctggctgctggcattgttgcccccactgctgctcaaagccacctctgccgggctgtctgccacaactgagctgtaactggtggcgccattctgcttgccagcccctccaccggcactgctgttactactgctgctgctccctccgcctccgctgccgccggaggggtaggtgggcggcacagctggggactgagggtgctggttgctgtggacaggcttggagccgtttttggctggagactggctgacttcactgtctgtggaacgtcccctcttcttatcatcttcagagttttccgtggtacagttggctgggctgggcgggatgggagagctggaggtggttgaggtgggcgtgctgctggactggttgaagatctcatcctccatgtggctgtggctggggggggaggtggcgaccagcgcctgtggaatgtcctcgagggggggccc

SEQ ID NO: 13 - DNA, 1300 bp, Homo sapiens
ggcacgagagcaaacttgcaggccctaatagcaacaggaggcgacatcaatgcagccattgaaaggctgctgggctcccagccatcgtaatcacatttctgtacctggaaaaaaaatgtatcttatttttgataatggctcttaaatctttaaacacacacacaaaatcgttctttactttcattttgattcttttaaatctgtctagttgtaagtctaatatgatgcattttaagatggagtccctccctcctacttccctcactccctttctcctttgcttatttttcctaccttcccttcctcttgtctccccactccctccctctttgtttccttccttccttatttcctttagtttccttccttagccgttttgagtggtgggaatcaatgctgtttcactcaaaagtgttgcatgcaaacacttctctttatcctgcatttattgtgattttgggaaacaggtatcaaccttcacagttgggtgaacaagtgttgtcctacagatgtccaatttatttgcatttttaaacattagcctatgatagtaatttaatgtagaatgaagatattaaaaacagaagcaaattatttgaagctctctaatttgtggtacgatattgcttattgtgactttggcatgtatttttgctagcaaaatgctgtaagatttataccattgatcttttttgctatatttgtatacagtacagtaagcacaattggcactgtacatctaaaaatattacagtagaatctgagtgtaatatgtgtaaccaaaatgagaaagaatacaagaaatgtttctggagctagttatgtctcacaattttgtagaatcttacagcatcttgtgataaacttctcagtgaaaatgttggctaggcaagttcagttaaaatatagtagaaatgtttatcctggtatctctaagtatacatttaattgtacagaaaatttacagtgtaacattgtgtcaacatttgcagattgactgtatatgaccttaatctttgtgcagcctgaaggatcagtgtagtaatgccaggaaagtgctttttacctaagacttccttctcagcttctcccataaagagaccctaatatgcattttgatttgtaattggaaatgtaactttcactgaaagtgtcatgtgatgtttgcattacttttaactgctatgtataaaggaaagtgtgtcttttgacttcatcagttatttctcttgtgcacagagaaaaatgcattaaaaatgactaaaaaaaataaaaaattaaaaaatgaaaaaaaaaaaaa

SEQ ID NO: 14 - DNA, 3239 bp, Homo sapiens
ggcacgagctgtcttctgcctgcagtgcccaggagcttgtgaagctgctcaacgagctctttgcccgctttgacaagctggcagctaaataccaccagctgcggattaagatcctgggcgactgctactactgcatctgcggcttgcccgactaccgggaggaccacgccgtctgctccatcctcatggggctggccatggtggaggccatctcgtatgtgcgggagaagaccaagactggggtggacatgcgtgtgggggtgcacacgggcaccgtgctggggggcgtcctgggccagaagcgctggcagtacgacgtgtggtcgactgatgtcactgtagccaacaagatggaggccggcggcatccctgggcgcgtgcacatctcccagagcaccatggactgcctgaaagggagtttgatgtggagccaggcgatgggggcagccgctgtgattacctagaagagaagggtattgaaacctacctcatcattgcctccaagccagaggtgaagaaaacagccacccagaatggcctcaatggctcggccctgcccaatggagcaccagcttcctcaaagtccagctcccctgccctcattgagaccaaggagcccaacgggagtgcccacagcagtgggtccacgtcggagaagcccgaggagcaggatgcccaggccgacaacccctcattccccaacccacgccggaggctgcgcctgcaggacctggctgaccgagtggtggatgcctctgaagatgagcacgagctcaaccagctgctcaacgaggccctgcttgagcgagagtccgcccaagtagtaaagaagagaaacaccttcctcttgtccatgcggttcatggaccccgagatggaaacccgctactcggtggagaaggagaagcagagtggggctgccttcagctgctcctgcgtcgtcctgctctgcacggccctggtcgagatactcatcgacccctggctaatgacaaactatgtgaccttcatggtgggggagattctgctcctcatcctgaccatctgctccctggctgccatctttccccgggcctttcctaagaagcttgtggccttctcaacttggattgaccggacccgctgggccaggaacacctgggccatgctcgccatcttcatcctggtgatggcaaatgtcgtggacatgctcagctgtctccagtactacacgggacccagcaatgcaacggcagggatggaaacggagggcagctgcctggagaaccccaagtattacaactatgtggccgtgctgtccctcatcgccaccatcatgctggtgcaggtcagccacatggtgaagctcacgctcatgctgctcgtcgcaggcgccgtggccaccatcaacctctatgcctggcgtcccgtctttgatgaatacgaccacaagcgttttcgggagcacgacttacctatggtggccttagagcagatgcaaggattcaaccctgggctcaatggcactgacaggctgcccctggtgccttccaagtactctatgacggtgatggtgttcctcatgatgctcagcttctactacttctcccgccacgtagaaaaactggcacggacacttttcttgtggaagattgaggtccacgaccagaaggaacgtgtctatgagatgcgacgctggaacgaggccttggtcaccaacatgttgcctgagcacgtggcacgccatttcctggggtccaagaagagagatgaggagctgtatagccagacgtatgatgagattggagtcatgtttgcctccctgcccaactttgctgacttctacacagaggagagcatcaacaatggtggtattgagtgtctgcgtttcctcaatgaaatcatctcagattttgactctctcctggacaatcccaagttccgggtgatcaccaagatcaaaaccattggcagcacgtatatggcggcttcaggagtcacccccgatgtcaacaccaatggctttgccagctccaacaaggaagacaagtccgagagagagcgctggcagcacctggctgacctggccgacttcgcgctggccatgaaggatacgctcaccaacatcaacaaccagtccttcaataacttcatgctgcgcataggcatgaacaaaggcggggttctggctggggtcatcggagcccggaaaccacactacgacatctggggcaatacagtcaatgtagccagcaggatggagtccacgggggtcatgggcaacattcaggtggtagaagaaacccaagtcatcctccgagagtacggcttccgctttgtgaggcgaggccccatctttgtgaaggggaagggggagctgctgaccttcttcttgaaggggcgggataagctagccaccttccccaatggcccctctgtcacactgccccaccaggtggtggacaactcctgaatggcctcgagcctgcaacagtccaaaccggaagggagaatttattttttgaaactgaaggaagtcccgaccttcctggattgaagtgcacactcatggactttaggtttagaaacctcctcagccttcatttgttcgtggatgtgtgagctctgagggtggccctgctattcctgtgtgtgcctgtagtgtccccagcataggggtcttaggcatagggctgaacagtccttccagagccctcgttccaatccctgccgtccttgcccctgaggggccctgaccactgtgagcaggagggtggcagagctgggacaaagctgcctttgccgctgggctttccgggactgtggagggagcacaggcggggaagctccacttcagacagggcttggtggggcaggacatggctcccattttgaagggaggtctccatgtggtccgagtgaggtgagacggccctcgtcctggtgttcctgatcatcttgaaaggttcttctggaactcctgtccccttagtcatgagaacagaaagtgcaatatttcctttcacctggcaggggaggggggatttatttctgaaagaaaaatatataaacagatcttctacatttatatttttaatcttctgttaaatacactttccgatattgccttgccttttgagctcttgctacagtcgcctttgctactgctttaagagaatttacaggtattgataaagaacaagactgttttattaaaagctttattcaacttgaaaaaaaaaaaaaaaaaaaaaaaaaaa

SEQ ID NO: 15 - DNA, 667 bp, Homo sapiens
aattcccgggtcgacccacgcgtccgcgcagtccgaggcacgcagtccgaggcacgcacaggagtcccacagcactgcgtgtgtcggcgggacgcaggcacacgtgggtgtgtgtgcatgtgtgtttgtgtgagggcagcgtgtcctccagtgtgcatggtgtgtgggcttgggccccatccctggcccgagcatttcatcctgtgggggaggggtgctgacctagtgggaggagccccactgtgatccatgagctgccctgcccacgcctcccctccctgtagcaacacctctgggtgtttggagtttagcttttgtgggtttgctctccctatcccatctcctgtactacacagttcatggcagggtggggaggggtggggttggttcgggtgggtgaggggctttttcctctgcgtgcgatgttgttatctgacagttctccgtccctactggcctttctcctcgtcttcatatttgtacggtacaagcaataaagacactcatttcagaccaggaaaaaaaaaaaaaaaaaaaaaaaaaaaaaagaaaaaaaaaaaaaaaaaaaaaaaaaaaaaaaaaaaaaaaaaaaaaaaaaaaaaaaaaaaaaaaaaaaaaaaaaaaaaaaaaaaaaaaaaaaaaaaaaaaaaaaaaaaaaaaaaaaaaa

SEQ ID NO: 16 - DNA, 2318 bp, Homo sapiens
ccacgcgtccgcccaaagttctggggtgacaggcgtgagtcactgtgcctggccacttcctggttcttagatgctgtctttttccctgtgtcctcccatagtaaaggggcagacaagctcccctgggtgtcttataaaggcactgatgtcactcacaaggcttctatgcccaataactaatcacctcccaaaagcctcctaataaaaccactttgggggttaggatttcaacataggaattttggggagggacacgaacatttagtccttaacagtgatgtatttatttcccatgttgtaaaggattgggcatggcttattttttgtcacatttgttccttattacatgctaatgatgggaaccctggtgttgatattactacatgatgttattgtcacatttactgagttttataatgctcagaatttaaaatggtgattaatatttttgcaggtaattcatgaatattgtactttttttctgaacccttattcagaaaaggggctctgccaagtggaaaaaaattatttttcatcattaaattttgaggtagtacttttgtgaatgtatggttttaataagtaggactatagacatacagcccccctttttttaacctttacagctggtaggtattttcctattttggttaatattggctttgttgcttgattatagcacactgctttgccgtgtttaactttgagggtgtgttgtgttgttgaacagaaactgaccttttcagatatttcttctttggtgaagatcagacagttgaagttgaagtattcttcccatcaaattatcctgagggaggactacagagccagtttagtgaggattaaaaaggaaaaaaaaaataggtgaacctttgtaaatgccatcctggactctgccaactgcttttccggggaatactgtggtggtctgtggccttgtcacaatcagggatattggtgaaaggcattccctgaactgggggccgacagcaggctgacttttgagcagtcctgccaccactttgattttttatcttcttcctgtgccatgacttttatgcattgtttatccagctccaaccagggggagacccactcgaaagggtcctccagaatgaatggagactttccatgaggagtccctgtcatgacagtgacctggtgtgtgcaagctctccccacttactgatggctggaaggcagtagtgcctgcaggtttgcccttgccgaacagtatgatgtcagtgtgaatcgggaccaggcctcatccaggctttaatcttttttttttttttttttttttttgagactgagcctgggtgacagagtgagactccatctcaaaaaaaaaaaaaaaaaaaaaaagtaaatagctttattgagatagaaatcgagtcacacacttgtgtatccatcaccacaatcaatttcagaatattttcagcaccccaagggaagaagcctttagcgatcgcaatccctccctattctctccttccccaacccccggcaaccactactgtattggactctctgtctccatgggttcacctattccggatatttcatatgagtggaatcatacaacatgtgttcatttcttatccggcttctttcactgaggatgttttcaaggatcatccatgttgcagcacgtgtcggttctttttatggccaaataatatttcattgtatggctagaccacattttcctgattgatgcatcagctgatagacatttgaactggttccaccttttggctagtatgaagaatgctgctgtgaacagtcaggcacacatttttgtgtggccatcggttttcgcttatcttggttctataactagtggtgaaattgctcagtcccatgggaattctgtttgttgagtggacaaggattccacttgtttctaggatttggagtgtgaggaaattgggagaaaaggcacattgttaaaaggtacataaatgtgttctgtgaaggagggctttgttgagctaggtcctaatgataactgctttccattactattttttctttattttctttttagaaggaagagattgttgtgactctcttaccagctggtcactgtccgggatcagttatgtaagggggtcatttattttgtcattttattatatgtagacacatattgtatttgtagaaataaatttttagggtctaaaattaatagggggctgggtgcagtggcacatgtctgtaatcccagtgctttgggaggctgacgcgggaggattgcttgagcttgggagttggaggctgcagtgagtttttttttaaaaaaaaaaaaaaaa

SEQ ID NO: 17 - DNA, 1913 bp, Homo sapiens
  misc_feature (12)..(12): n equals a,t,g, or c
  misc_feature (14)..(14): n equals a,t,g, or c
  misc_feature (398)..(398): n equals a,t,g, or c
ctcgcaagagantntttgtgtttctaatacaggatctggaagtagtgctttctaatcctcatttcctgtaggatgttcctgcactataacaagattatgttttcttccttctgcagcagctttctgcttcttgggtactactagctattgttcaattcaggtgaggcctgtgatgacatatatgtagcatgtgctctgcgctccctgcaagctgagcagatacaaccaatgcatcactgtatactcttgctgagaatgtggatgcagcctcacagatctttgcaacactccaaccagccaggaccagttgatcagaactgatcttattggtctgataaccaatcttatttgtgaactgattcatatctgtctttccactcttggttctcttgccgtangaacaaaaacagtttaggaagcataattacgaacatttaggaaccaatatgtataagtaattcggagactccaattcacctgcccctcccccatcccaggttgtggaggctcgaggaagctgacttcttaggctaaaggacaaaaaaatctctttacctccttggccattttcatgttctctgccaattactataggcagtcttcattttgcagaggtgaggtaagacttcatcttattcttcatgtaatcccaccttctaacaaaaaataaataaatatttaaattccaaggagaagtgttctttgtgtatttctagcagaaaacagatgcttaagcctaagaaggaagatccgtccatgacaaaggaaagtggaaaactgaaccagttatctgaatacttcatgccaggacagttgctattagcaactgttttgcaccttcagggctttaaaatgggctctgcagacagcatttgcatatgcaagactcagtagccaagcctccactgccaattgttgaaggcagtttcagatcgccaccttttgaggtacatttctttaagcacaagagaagtagaaatggcctttgccttgtctccagtggtttgtccctctggtgcctcagcagataccagagcttattcttatgaccatttggaagtagtcctcaaagtaaagatcaagaaaaaattggattctttttccattttctcataatagtagcctagtcaacacaagactcccataaaatatgactcactattgggagccatactattttataagcttacttcctgctgacaaaactagctttcctcaaggaaatataaaggaggggaaagtcacatagtgttaggaaaacattcctgtgttttgaatacgatgaatccataggatagagaaaaatctgcttgttctattctgagagttctctgagatatcccttcactctgcttggcatttggccattgatattcaacaggtcactgaccaagcttttctaaatttttcagagagagttacttaccaataaggtctgttcttaaacctacctagttgattttcatatctttccataaagtgtcatgattctatcatagaccctgacttaacattgtaaggactatgagtcctcccattttttaattaatttttttttagcaaattaggacttcggcaggttttcctctcctaaactcattctttcctccacaggattgctttgtccatctcctgctttcatttcaagtgcataaacaaaacctcaaagggcctgggaaggtgaggcaggccagagtctgtgttctgtgttgagtgtcaagctatttgttaagaaggtctgcaacaggcctttggtgtggctctgccagagactgttctgaacactttgcttgagatccgtgccctgtaaaatggatatgatgttttactgatgtctgtaatacatttgtaaacttccaataaaatttgaataaaaaaaaaaaaaaaaaaaaaaaaaaaaaaaaaaactcgag

SEQ ID NO: 18 - DNA, 330 bp, Homo sapiens
ggcacgagccagcaccagcgtcctagatggccccagcaccagctccaccatccggaccagaaatgctgccagagctggcgccagcttcttctcctggatccagcaccgttgacgaactgcagcgatcttactggccaagccagagcgcctcctctcagattccttctcgacacagcaccctaggcggcttcttcctgtcagtcggaggtggcatgcaagatgaagctctctttgctcttcctgctttcattttgtgcttttccttgtgttttcatgttttgggtatcagtgttacattaaagttgcaaaattaaaaaaaaaaaaaaaaaa

SEQ ID NO: 19 - DNA, 743 bp, Homo sapiens
gattggtcagatttgccttttttcagaatctgaagtcattccgtactgtatgtacacatttgtgtctggcttggctccagataaagtttttgggattcatgaatgttgttgcacgtattaggagagactcctttgtattgctgagtagtattcccctctgtggttagaccatgatttatttatccatctacctgttggtgaacattttggctgtttctaattcttggccatcatgaataaaactgctgtgaatgttcctacaataataattgtctaaacatatgtttttatttcttttgtgtcttagtccgtcgggctgctataactaagaaccacagcctgggtggcttataaacaacagaaatttatttttcatggttctggaggctgggaagtccaagatcaaggtgccagtggattcagtgtctgttgagggcccatgtcttgattcatagatggcggtcttcttgctgtgttctcctagacatggcagaaggggcaagggagctctctggggtctcttttataagggcaccaatcccattcatgcaggctctgccctcatgacctaatcacctccgaggaggcccaaaggccctacctccaagtaccatcatatgagggattaggtttcaaggtatgaacctggggaggacataaacagtcagtctagctttttgggtaaatgaattgctgggcttaataataaatgtatatttaactgtaaaaaaaaaaaaaaaaaa

SEQ ID NO: 20 - DNA, 5684 bp, Homo sapiens
  misc_feature (706)..(706): n equals a,t,g, or c
  misc_feature (755)..(755): n equals a,t,g, or c
aattttgggactgttgaccttgctgtgagaaaagagacaacgactgagcaagcactaccaccagcactgttactgggaattagaagacctgagtttctgtccagaccctcagtgcaaactgaggatgctccatccaaagtgaattatggtacttgccattttccaaaatgccttatcctttaccatctctgcacttttgttcatactctcattctactttggaactgctgctctgtggcttttcatctgtcaaaactgccattttctcagtatccaactcttatgccctcttttccatgagtctcctaactagccagaatagagctttaaagttttatgacatttcgttatgtatcctctatctgtatacaaaatcctgtaaaatagttacttgcctgcatttactgtctttgcagatagcagactccttgaaagcagggtccttgtttagtgcatctttgcccacatacaccacaacttatcaagatgcatttattaggaaggaggagtttagagagcaggctatcagaataaccactcagtaagtgttttcttaattgctatgtgataacttacattactcttaatgaggagaaaagtcgctagatatggatcatgtttatgttttaatgttttttaattctaaatttkgatctagggagccctcagacataaggagaaaccaatatgttgaakgatggggtantacatacagaaggaccaagaccttattttctccyacttaagaggaatcntgkyaagatgmmmggacagctttttaaaaggagaaggtcataagacagtttgaggaaggcattggaagaggaagargggcaatgtctcctttgktttattgttggtatataaacttaaaatctcagttctttttatggcacttgtggagccacttcctctcctcaccaaaaaatgcccagtaccctgaatccgatcaaattactctcctaaagtataaggcttagtttctgtgtgctgcttcgcgagacagttcccacaaatcgagagtgttaatcagacttttgtgttttcttttttggattgctgttgtttgttttcatttatcatttgtctttgcctaagccaggctcatcaagaattaacagccatcaggctgccgatgtgctgacagcagacccacttagagtcctgtgtttgtaattccatgcattkgttattttacctgttttgkccctgccccttctagtcctgtgcctcctgattgctgagtgttcacctggaccttctgactaccttccctgtgctattccatcagcctacagacctggtacctggatttttgcccgagatgattcctaccaccttactactgacgaagacacccattccagtggaccactgtgacccaggaggcattcagccatcatgatgtggcctttacctccactcctgtcttgttctacccagattcagcacagccctttatagtgaagtcagagtcctcaagccaaatagctaaagctgttttatcacaacaaaggcctagtttgttccatgagtgtgcatttcatttcttcagttaaagccttcagagacacacaataaatttggaccaggggattttttagttattaatgctctctgaagaaaggcaacatctttttgagagcagcattggaccacaccccacaatctcaaatgattgaaattcatgaacatctaggatcccatgaaggtcactggaccctgttttttctacttcaaatcctgtagtagcctactgaatgagaaaacatattctgacccattgggatcaaatcaaaggcacagtgaactcctcatagcatcttctttggaattactcaggaaccagaactttttacacaaatgtaagaaattctaccaaggagtccccttacctaacagcatctcacaaggctgcaccagattccagaaaaggcttctcttgatacatcaaggtagaaccwctatgcattttgtgaccgacttattcttagatcattggttttccaaaggctttgtggccatgaagccctttgagtgaaaactgtgcagaagcccagagtaaaagtgaagctgctctggatgaagtagtgaagcaagagtaggggcctgaatcctgctacaactatcttcctttaccaccgtggtgacacctaaggggacttccttacaacaccttgaactcttccgaacacagtttgaaaaccactgccccagacagcaatatgtttgacctgaatggcattccaatcttttctgtacctccactcagcacagttcatgttcagtagatgctgaacattcttagaaatactgtgtgtgaacttagaaaagtgcaagaagacaggcatgtctttgaccccaggaatgatcatttgctgaagatggtgtcaagtgaacctagattaacagccctccactccagatggatatccagtgattcctagaatgggatatagccagagaacaattctatgcaccctacactgacagactcccttaagcaacaccagatgctctactggtacttgaagtacatgactttgaagtcttgaccctccatgaatacctgaattatcagcaagcgggttttgaagctggtgcctcattgaggccatattagagcaacttgtacatttgacctcttgttatcagccatggtactctacttcgtgtgcaagagataactatgaaagccaaattcaaatactggcaacatttcctaaaggggctcaatatctatcattcgtcttcttttccaaactacacatcactgtatgactcaaccagtagcagttatattgccccttggtttttattcagtttaactactgtttccaagataaatgagctaataagctttaaaaaaaaaaaaaaaaaaggctgaattcttttttcttcatcactggcatatctgcctattctccagaattattatgactattcagctcactttaacagttgaacttcaagcgacaatctttgaacaccccttctcatgtgatttaaaatgaaaccatttggaaaagtttcttctagccagtaatagattttttttttaattgctctgccttgtgccgagagatgttcttttaagatgaatcttttgatgtctgataccaccaaatataggtggtagggagagttggaggctggccctttgagcaggccattagcttacttgctgggcatttccgatagcttattgcctacctttttgctggaaacaaactgatttgaaaaacaaaatctatgaagactgcagctaaggattttatcggtagacttaagagcttttgtccttgtggatattttagtggaaccacatcagtctcaatactgtcattttacactgactcagagcagctgacttcattccttgccatgatatatatttaaggcaggcattgtaacagacataaagacaacttatctgtttcagcaggaaggattcagtttatgaactctcagaccagatcatgttgaacaaggagactttgatgtgtgtcatgagaaaactcattctttacttcccagtcaatttaaaggccagctatcctgagctactcgaatgaatgcactggttaaacattggaaatagtttgtttatatccttgtctctctctaggccaattgtgattacatgactcgactctacatctcgtcaaacaaggcctaggtctggttgctgtagactgctcgccctcaacaaataaaatctggttgactagcctccttgtatatacaactattatttgttaagaagaaattatcgtcaattttctactaccttccaattgtcagctctttttttcctctctggtttttcctatactttacagaaaaagacattgatctatactgccattccctctaatcctgccatactcagtcaaaaggaatgacttaagatgaagatgatcatctgctcgagtctaaaatatacattgtatataagaattggtgattagaaaagcaaaaaacctaaaacttaaatctaggagtctgtatactgtctccatgtctccatgcctcagatctcatctaaatctttgaacagcaccattcaaccaatctgaggccttgacttgcttgtaagatgattctcagagatcggctgagttaaaaaagatgacgacttgattaccaaagaaagtagggccaactttgacaaatctggctctgctgaccctgtcactcccagatgtagcatagactcctaaacagaacctcaagtctgattgaggataaggccttctcctgagctgaaagttctttggcagatgagcaagaaactgaaagctgatgtacctgactggctctgtaagatcagaaaactgtatccagaataagccctatggattaacccctgagtacccagagtaaaaactaatttacagaacttccttattgatctgctggttcttccagatcatattctggctattggtatggctggcctttctgaaggtaccctgcttgtctattttcctgactcagctcttgcctgcctttttcacatgttgctgcaattagactcaccgtgaggactacagtcaatttcagtctatcttgtgcccaatacaacaaggatttttaatagtaacaacccacacctcacccactaggactcaatgttcacaacaggaaggaccattgctgcatactccttgaccagcaacttttttgaagatatttttaagtgcagagtaggcctctattcctgtatgtaattgttcattttcagcacctggaacctcatctatcgggtctggaaggaatacagcagttcgaaagccgcgtccatttctctccttcagtagtgcagaaatgagtccgattcaccagtacacacagaactgtaccagttcaacctagcaaaagaagaaaagtttccactgtacttaaaatttacagctgactcaaattgcctcacagaattatttgatgtagaaggctagttgtcttacttcagatcagcaggacagttgggctctcagactcatgaccactgagtttgcttgtgttgaaactgtggtttcatccaacatatgctattggacatgattattattccattcaaatggattacagacttcttgaggacaggacaaacttatctctcatggtgtttttttagaatacttttataaccaaggaagaaaccatgccagctgttaccattcaacttcttaagcagagattaagctttttcatatctgttcttatcctggacatcagtagtttttaattgcccagcatccgttccatcttgtaacaactccctgatgtttcttaaaaccacctcttcctattttcagtctgtggtttggacagtctgacccaaccttgagctttgtgggtgaacatgtaattcagacctcatcaatcagcaaatccatctgaactgtggaggagaagctctctttactgagggtgctttagctttgtaggatgaaaacctcaaactaacagggcctaccatgtagagaatgaagccagtgcaggggaaagcagagccaaaatatggagagacttgaatcctgatgacagcgtttgtgcccctggatccaaccgtgcctgaagctagaatatcccctggacttttcagttatgtgaaccaataaatacccttttttgcttaaaaaaaaaaaaaaaaaaaaaaawaaaaaaaaaaaaaaaaa

SEQ ID NO: 21 - DNA, 785 bp, Homo sapiens
  misc_feature (9)..(9): n equals a,t,g, or c
  misc_feature (22)..(22): n equals a,t,g, or c
  misc_feature (39)..(39): n equals a,t,g, or c
  misc_feature (44)..(44): n equals a,t,g, or c
  misc_feature (774)..(774): n equals a,t,g, or c
caattggancgcaaccggcaanttaaatggtggagttancccantcaattaggcaccccaggctttacactttatgcttcccggctcgtatgttgtgtggaattgtgagcggataacaatttcaccacaggaaacagctatgaccatgattacgccaagctcgaaattaaccctcactaaagggaacaaaagctggagctccaccgcggtggcggccgctctagaactagtggatcccccgggctgcaggaattcggcacgagtgtgagctaggtcttcaagatttatagaatgttacttatgaacaaaatataattatttatggtacaattcttgtactttagcaaatctggagttagttcatagtcaaagtcagttaatatttcttagaggaaagttttgctttttgtggcaacatttttatagcttgtgtgagttcttttttatttaatgatttgaaagcatttttgcacagtcgtgaccgtgtgtggtggcgtcactgtaaccaaagtatatgcaccagcccttgtgcatttattgtttctcctgattttgtggatttaaatgtccaaatgcaaacctttgtgacttcctttggaggacttggcagcacagcatgcccccgtgacctgcctgctgtggtatgagctatgaccaagagcaggcttcctgctccatggagtcctgagttgctctggggcaggggattacgttatgaaaactaaccatgtgtaacaataaatctaccttagcagaaaaaaaaaaaaaaaaaanaaaaactcgag

SEQ ID NO: 22 - DNA, 2122 bp, Homo sapiens
ggcacgagggagatcagtgtgaagggcattgccaaagtggaatcagtaaggcttggcagttgaccttgtttgttggagagaagggataagattttaaagctacatgtctgaaagaatgatgctgctgattgaaataaaggaagaaaggatgcatttcgggctccaacctgtcctaggaaggcctagacctcaaacaccaacacctccatgcatttcctctttggctactatgtcttttccctgacttctgcctctccagctctctgggctgctgcttccacctgttcatctgacttagacsctccctgctgggtccttgttcacctactcatttggtgcttcgtctgccatcagtacctccattgcagctggtgggatgtcagtcaccatctcttatatttgcttcccactagaaagatcaagagaagttatttctttcccttgcgctccaatttttctctagacagttggtatccacaattttaaaaaatgttccatgttgtataaacaagcattcgctgagaggggctgttaatacacatcgtgccccttttataaaaattcatgcatggaatcctacattattatgcatcaaaatctccagaaatgtcttaggatttttgcagggagwwtwttaaatgcattgttttgctttgttttgaagagactagatgtgcagaggaagagaggtggcatggtgggagggtacatttgagttgtcaacagtctctgcagtgtcaggtcaattacatcagcacttggactggaccagggaaaggaatgattctgcttcctgggaatgtcagaaggacctgatgattatatttggcaaagccaggaggagtggctttgaatgtcattgctaagaattacactttgagtagcatttctggatgtctgagcttttcaaatgatacttcttttctgctgtggctttcctttctgttggactggttcccagagggtcctcttgtttgtccttgccctcgcttttatatcagttcatgttttctcttctgtcatcttccttcccagcgctgtttctccaccccctcctgctgcactcacaacagcttcccctctcctgtttagaggtggaagcatgtaagaatgcgtttgagggggatgcttgccaaaggacagcatattcaacatctggtatcaacaaggtaatgtttaaccttagactagccaaactagtgatgacctgcttccatgctgcatctgctgctttttgtgttgatgggactcagaaatcatgagaaaggtcttcagtgatccatgactgcaacaaattcttttcctaattgtgccgtatattatgcccctcaatacaacttactaatctctgcctcagtttctccatctgtgaaagtggtgtaatacttatctacctcccttgaatgttgtgaagattagtatatgttggtaaagcacttttaaaataaagaatgatataaagcaaaaaaaaaaaaaaaaaaaactcgagactagttctcctcgtgccgaattcggcacgagtgtcatcgggctcacagctcagagacatctgcatgtgatcatctgcatagtcctctcctctaacgggaaacacctcagatttgcatataaaaaagcaccctggtgctgaaatgaacccctttcttgaacatcaaagctgtctcccacagccttgggcagcagggtgcctcttagtggatgtgctgggtccaccctgagccctgacatgtggtggcagcattgccagttggtctgtgtgtctgtgtagcagggacgatttcccagaaagcaattttccttttgaaatacgtaattgttgagactaggcagtttcaaagtcagctgcatatagtagcaagtacaggactgtcttgtttttggtgtccttggaggtgctggggtgagggtttcagtgggatcatttactctcacatgttgtctgccttctgcttctgtggacactgctttgtacttaattcagacagactgtgaatacaccttttttataaatacctttcaaattcttggtaagatataattttgatagctgattgcagattttctgtatttgtcagattaataaagactgcatgaatccaaaaaaaaaaaaaaaaaactcgag

SEQ ID NO: 23 - DNA, 874 bp, Homo sapiens
ggcacgagtttattagatatattttcactaagaaaagaaagcagagtgaggttgaagctgatctgggctatccaggtggaaaggcgaaagtcatccataaggaatctgatatgatcatggcattttctgttaataaggcaaattgtaatgaaattgttttggcttcaacacatgatgttcaagaacttgatgttacttctctactggcctgtcagtcatacatatggatcggagaagaatatgacagagaatccaaaagttcagatgatgttgattatcgtggttccactacaactctttatcaacccagtgcaacatcctattcagcaagtcaggtgcatccaccttcatctctgccatggctgggcactggacagactagcactggagctagtgtgcttatgaaaaggaatctacataatggtaagagaatgacttcacacccagtccatcaatactatcttacaggtgctcaggacggcagtgtacgtatgtttgaatggacgcggcctcagcaacttgtctgctttcgtcaagctggcaatgcaagagttactagattatattttaattcacaaggcaacaagtgtggtgttgcggatggagagggttttctgagtatctggcaagttaaccaaactgcatcaaatcctaaaccttatatgagttggcagtgccacagtaaagccacaagtgactttgcatttattacctcttcaagtctagttgccacatctggacactccaatgacaatagaaatgtttgcctctgggacacattaatatcacccggaaacagcctcattcatggtttcacgtgccacgatcatggtgccacggtactgcagtatgcacccaaacagcaactcctaat

SEQ ID NO: 24 - DNA, 2440 bp, Homo sapiens
tacggctgcgagacgacagaaggggccttctagcagaaatggcggctgcggcggctcgagtggtgttgtcatccgcggcgcgcggcggctctggggtttcagcgagagtcttctaatccgaggcgctgcgggacggtcattatattttggagagaacagattaagaagtacacaggctgctacccaagttgttctgaatgttcctgaaacaagagtaacatgtttagaaagtggactcagagtagcttcggaagactctgggctctcaacatgcacagttggactctggattgatgctggaagtagatacgaaaatgagaagaacaatggaacagcacactttctggagcatatggctttcaagggcaccaagaagagatcccagttagatctggaacttgagattgaaaatatgggtgctcatctcaatgcctatacctccagagagcagactgtatactatgccaaagcattctctaaagacttgccaagagctgtagaaattcttgctgatataatacaaaacagcacattgggagaagcagagattgaacgtgagcgtggagtaatccttagagagatgcaggaagttgaaaccaatttacaagaagttgtttttgattatcttcatgccacagcttatcaaaatactgcacttggacggacaattttgggaccaactgaaaatatcaaatctataagtcgtaaggacttagtggattatataaccacacattataaggggccaagaatagtgcttgctgctgctggaggtgtttcccatgatgaattgcttgacttagcaaagtttcatttcggtgactctttatgcacacacaaaggagaaataccagctctgcctccctgcaaattcacaggaagtgagattcgtgtgagggatgacaagatgcctttggcgcaccttgcaatagctgttgaagctgttggttgggcacatccagatacaatctgtctcatggttgcaaacacgctgattggcaactgggatcgctcttttgggggaggaatgaatttatctagcaagctggcccagctcacttgtcatggcaatctttgccatagctttcagtctttcaacacttcctacacagatacaggattatggggactgtatatggtttgtgaatcatccactgttgcagacatgctacatgttgttcaaaaagaatggatgcgactctgtacaagtgtcacagaaagtgaggttgcacgagccagaaatcttctgaaaacaaacatgttgttgcagcttgatggttcaactccaatttgtgaagatattggtaggcaaatgttatgctataatagaaggattcccatccctgagcttgaagcaagaattgatgctgtgaatgctgagmcaattcgagaagtatgtaccaaatacatttataataggagtccagctattgctgctgttggattctttcttcttaggatataatcacagaagtgaacttcatgaatggaaatggaacaagttattttccaaaaggcaaactatttcatactcctacgtgaacatccttttaccacagcctcagccacagtacgtctaattatttaaaatttgtgattatcgctggtggtcaacaatttttttgtttttcatcctttaactggaaaaaggaggggctgtctcagtttttcttctgactctgtgtgtcacttacaattaataatgctagctgttaacatctacatagcagttgacatgtgccaggcctgtttaccagttaatcttctccatgatcctatgaggaaagtgctattgctgtctccatttcatagatgaggaaaatgaggcacagaggagacgttatgtagccactaccactgcaacttgctcaaacttccggccaagtcggctctagtccagacagcctgactcctcagcctgcgtctgtatgctgcctctcctaattcattatgtttattaataatttttccccgttttgttaacacttatgtttcaaaaacagtcatctttatttacattgactgatcatttcttttgtaatttcttctagtacttacaatagttctagtttcattaacatttcctatagactgaaaaaattttttaatctttttggaattttaatatagtcaagaaagtatctaaacttctcatttttcaaaatcttactgtcatttaataatccttcccttttccactgawwwgtgacactataatagtaaattttacaagggcttgttttggttacttattcttgccctggggttatctttaaactgaccacagytttctaatatatttgatcgtaacttccaaaaactgtgtaatttttgcttatttgtcttgcatctagtcacttaactctcttttgcttttctaggcagatcctatattatctacaaataatatatttatttccttctttccaaaaaaaaaaaa

SEQ ID NO: 25 - DNA, 1237 bp, Homo sapiens
tcgacccacgcgtccgggcagccatggagtctctgggatatttatgaaatatgatctcagttctcttatggtgacagttactgaggagcacatgccattctggcagttttttgtaagactctgtggtattgttggaggaatcttttcaacaacaggttaacaaccatttcctttttgtctaatttctgaaagtgttgcttatacttaagttgcttcttctcaaaggggcaagaagtatacagattttcatgtttcggtgtttaatagcttttgctttaattacaaaactccaaaattatatggactaaccagtaaacataactaatttcattgtattcaatgatgtaaggtagattatataatggtgagttggaaagatcctgggtgttaacatcagattgaagtagaattgaatgtaagttctgtcatttacttggtggtagcttggaatagatcacctaccttttctgaggttttctaatcagtaaaaatagcaataataatacctaatttgcaagtgtgctataggattaaatatgaaaatgcctagaaggcatttaagacatttttaactgtacagtatgtaaaatcatatgttatagtactttgaattatgcaatacatgaaactagatttgtaatcagtaacatgtttatgatttttgtcctgagatcctggaattcgctaagattatttgtcgaattgtaatgatgaaaattgggagttaagtccatagagaaaaaggaaacaatcctattttcaccttcagtccttattcagtattaatggagctggggtatttattatacttagaatcatatttttaaatgaatgaatagctttcttcgaaattcttgttagtgctcatttcatctatttaaatttgtgtggttgactcattattccaaatgtttgggtggaactgaaaagattgtgtttaggcccggtgcagtggctcatgcctatatcccaacactttgggaggccaaggctggcggatcaacttgaggccagaagttccagatcagcctggccaacatggctaaaccccgtctctactaaaaatacaaaaattacccggttatggtgtgcgcatttgtactgttagctactcgggaggctgaggttggggaatcgcttgaacctgggaggtagagattgcagtgagccaagatcatgccactgtactccagcctgggcaacagggtgagactctgtctcaaaaaaaaaaaaaaaa

SEQ ID NO: 26 - DNA, 2345 bp, Homo sapiens
  misc_feature (1088)..(1088): n equals a,t,g, or c
  misc_feature (1909)..(1909): n equals a,t,g, or c
  misc_feature (1913)..(1913): n equals a,t,g, or c
ggaactcctcgatgaggaccatctacagtgcttttttttttctatctctctgtctctcagttctgctttcttctacagtatttgatgactggcatcccatttctataagctgggtccagaactttgggctcacaccttcctttgacgtgcaagtgccacagaccctgagatgtttcttcagatcagggtgccgctggcatccactgaacttgcttcagtttaagctgagcaccttcctgagaatcatttcattttatctttcattctgtagtgagaagaggcttcagcatgaatagtctagggacatgcaagatgtataaaatagaatggagttgtgaattaggktatatgagggrgaaatttataaaaaatataaagcattgtaaagacaaatgcatgttacacaaaaccaggrgaccacttcattttaagaggtacctgctggtctcagaagctttaagtgatttataatctagtcaacaataagtggcagatgaactgaaaatatatttgcatgaagttcttagttcagaggtaaagctagggatgctatgcatggcaacactggaagggaaagagcttttgawatccaggtctgggcatttgcyctaatcagaggtcaacatcttctctgccctcataacccamtccccgccaggggtcctgtctcctagaccacacattagcagatataatayckgkcawtctggkttctcattctctttccagaaaaatccagacatgattttattgcaagatggagagaaaaggagacagcatcacatgtcttatattagtcacaaaaactggatgggttttatttcaggcgctaattcttttgagaacacaagggaaactttgatcttaatctatttgatgtggttttaagtaaaggagcatcttgtgcttactttgaaagtgtttttttacttcgggcttggtcaaatattacattttgttccagagaaaaactcatttggaaggcagcatggagtatagaattagacatccctgggcttgaagcccatctcagccatgaactacctttatgactttcagctagttacttttcctcactcagcttcagnttcttcatttataaagyaagtgcctcaacatcgctttttgactttcttaatcttgtctacgcatctacaagtagcccttttattactgatttttaactactcctggccattggaatgaccgagaagcccatgtctcattctcagacgggggattttgattctaatgacagtcatggttgagagtccactgtgttaaagtctcttcatttgaagcatctgatgtgaattctattttctgcttaaaccccagacatagatgttaagtttcaaaattatgtcgtacattcactcccactacatactcattgaatgcttaccatgtacagactctgtgatagactatggaaatacatagaaagaaattccctgtttttaagaactttacctagtgtttagaaattgcatttaaaactgataattaaaatactatagaccttggcttaaaggatgcaccttgtaatctgtaatcatatttgtagttatatattgctttgaaaatacactgtagacagtaagacaaaaaaggaaataaaaagtacatgaattgcgaaggagaaaataaaattggctttggtcacagatgacatgattggctatgtagaaaatcccgaggaactgacaaaacaaacaaacaaacaaatctagaactaattagttctagattatagcaaggktgcaggatcaagcttaatacctgaaagwaaattcctttcctatataccagccmtgaaccattggaatttgaaatcaaaatacmacaccattaatawtattaccaaaagagagagagggagamaatatgtattatgctaacaaaagangtanaaaaggtatgtgagaaaaactacaaatctctgatgaaataaatcaaaggagatctaaattaatggaaagacaaactatgctaatggataagaaaactcaatcttgttatgtgtcagttcattccaatttgatccatagattcaatgcaatcctagaaagctactttgtggacatctgcaaactgattctaaggtttacacgaaaaggcaaaaagatgcaatagtcgaaacaatattgaagaagaacaaagaagtcggactcttcttgacttcaagtctttctataaagctacaataatcaaaatagtgtggcattggtgaaagaatagatagatcaaaaccaattcaatggagaaagggaaaagacagtctttttaacaaatggtgctggaactggagttccttatgaaaaaaaaaaaaaaagggcggccgc

SEQ ID NO: 27 - DNA, 2182 bp, Homo sapiens
ccacgcgtccgaaagaaggcccctggctgtggcgccatgtgaaaaggatgaagacctccaggcccttctccctctgagtctccctccccctgatgaccctctggaagcctgctggctcctcctcaccctcactcacacttcaactcccagttggattggcctgtggacctacctgctgcgtctcagtaggagagaaataatccagacctcaggaacttgacctcacagctccagggaattcaccacgtgggcgaacgggtagagtagaagatgctcagtgaacatgcgcactgaggtgggcgcccaaagagcatgcgcagtgagatgtgtgcttgccttaggggctgtggtgtccctccttgttccccctacccctgctctttcctccatcccttcctaggaccccactaaggactttggaatccatcctcccttgtgtgttttttttatgcctctgagactcaaatatctcaatatcaccgttcaaaactcactctgtgttcacctgaccctcctgccctctatggcccttgtcctcccttgtctgggcccctcaagggagcaagtgcatggtggtgttgctgacttctagtagaaggatgaggatctctatcaggccgtggaccaagtggcccaacccatcgaagtctgctcactttccctcatgttcactcacactcaacttctgggaggactgatctatggacctatctgatgtgttatagttagcaagaaagaagtcacaacatttcctcccacagctctgcagggacagaaggcagagagcatggcccacagggaacaggaatttgcataggaagggacatgcacattgagccagggactttcagggaatgccagagttttccctctgtcaccatgatagcagcagccactgccatcatactggctgcagcagggaagcccagccagagctgcatgctctgtggagccagcaaaagccagggacaagtgggatccccaccttttacaagttggggagggagcccctgggtgcccctgcagccacccaaactgcagttgaagacccagacttctggctctatggagcaggcaggatccctgccctcctgggtgcagctgtagccactggatccatggctgcagacccaggagctggggacaagtgggagccccaacccttcagagttggcgggtcaggagctccttgggtgcagctgcaacttcccttcaaggtgcaggacccaggtgtgtctgtagcctgcaatctctgaagcctgggaaggcccccactgtccctggggagcagggaacaggggacactgtccctggggagcaggctcagaggtgtctgctcccactacctggtctctccctgctcccagcacccactatgatttcagagcaggttgtgggctgagcccctgcactctcacagctcagatgggcttgcacatgggcaggtcagccctggaatgccagccccctgccacctcagacccctccagaatttgggtgccaagaaacatgagaggggaagccaagggggtgctgagggcagctgggtagtgctctgcaggtccgagcagcctgggcaccatggactgcagtgggaggcagacagggtccagagcagaagggggtggtcctaggtaaggtcccaccttcaggccagggatgggccaggctgccaatcccagagaccagagtatggacttgtggtgccttttctaggcccacccatggactaatgtacatgcactttctcccctctgaggtccgtaaatgcctgggactcagccagagcagggcagaggatgggagcaatgggacaaccagctgcagagaggagctaccctctccagggcctcctctctgctgagagctgcagatgttggaaagacctgcctgcagagaggagacacactcttcagggcctcctctctgctgagagctgaacacttgacctgacgacctgcctaaagaggagctactgactgtggatctcctctgagctgttctaacactcaataaagctccacttgtttgcataccttattcttcccagatgcattaacaagaacttgaacaaaggtgccaccagacacagaggtttccagccagaaaattgactgcccaaagatcccatataacccgtacccacatccacagggcattttttagtaaaaaaaaaaaaaaa

SEQ ID NO: 28 - DNA, 5143 bp, Homo sapiens
ggcacgagtggaactccccttcgtcactcacctgttcttgcccctggtgttcctgacaggtctctgctccccctttaacctggatgaacatcacccacgcctattcccagggccaccagaagctgaatttggatacagtgtcttacaacatgttgggggtggacagcgatggatgctggtgggcgccccctgggatgggccttcaggcgaccggaggggggacgtttatcgctgccctgtagggggggcccacaatgccccatgtgccaagggccacttaggtgactaccaactgggaaattcatctcatcctgctgtgaatatgcacctggggatgtctctgttagagacagatggtgatgggggattcatggcctgtgcccctctctggtctcgtgcttgtggcagctctgtcttcagttctgggatatgtgcccgtgtggatgcttcattccagcctcagggaagcctggcacccactgcccaacgctgcccaacatacatggatgttgtcattgtcttggatggctccaacagcatctacccctggtctgaagttcagaccttcctacgaagactggtagggaaactgtttattgacccagaacagatacaggtgggactggtacagtatggggagagccctgtacatgagtggtccctgggagatttccgaacgaaggaagaagtggtgagagcagcaaagaacctcagtcggcgggagggacgagaaacaaagactgcccaagcaataatggtggcctgcacagaagggttcagtcagtcccatgggggccgacccgaggctgccaggctactggtggttgtcactgatggagagtcccatgatggagaggagcttcctgcagcactaaaggcctgtgaggctggaagagtgacacgctatgggattgcagtccttggtcactacctccggcggcagcgagatcccagctctttcctgagagaaattagaactattgccagtgatccagatgagcgattcttcttcaatgtcacagatgaggctgctctgactgacattgtggatgcactaggagatcggatttttggccttgaagggtcccatgcagaaaacgaaagctcctttgggctggaaatgtctcagattggtttctccactcatcggctaaaggatgggattctttttgggatggtgggggcctatgactggggaggctctgtgctatggcttgaaggaggccaccgscttttccccccacgaatggcactggaagacgagttcccccctgcactgcagaaccatgcagsctacctgggttactctgkttcttycatgcttttgcggggtggacsccgcctgkttctctctggggctyctcgatttagacatcgaggaaaagtcatcgccttccagcttaagaaagatggggctgtgagggttgcccagagcctccagggggagcagattggttcatactttggcagtgagctctgcccattggatacagatagggatggaacaactgatgtcttacttgtggctgcccccatgttcctgggaccccagaacaaggaaacaggacgtgtttatgtgtatctggtaggccagcagtccttgctgaccctccaaggaacacttcagccagaacccccccaggatgctcggtttggctttgccatgggagctcttcctgatctgaaccaagatggttttgctgatgtggctgtgggggcgcctctggaagatgggcaccagggagcactgtacctgtaccatggaaccsagagtggagtcaggccccatcctgcccagaggattgctgctgcctccatgccacatgccctcagctactttggccgaagtgtggatggtcggctagatctggatggagatgatctggtcgatgtggctgtgggtgcccagggggcagccatcctgctcagctcccggcccattgtccatctgaccccatcactggaggtgaccccacaggccatcagtgtggttcagagggactgtaggcggcgaggccaagaggcagtctgtctgactgcagccctttgcttccaagtgacctcccgtactcctggtcgctgggatcaccaattctacatgaggttcaccgcatcactggatgaatggactgctggggcacgtgcagcatttgatggctctggccagaggttgtcccctcggaggctccggctcagtgtggggaatgtcacttgtgagcagctacacttccatgtgctggatacatcagattacctccggccagtggccttgactgtgacctttgccttggacaatactacaaagccagggcctgtgctgaatgagggctcacccacctctatacaaaagctggtccccttctcaaaggattgtggccctgacaatgaatgtgtcacagacctggtgcttcaagtgaatatggacatcagaggctccaggaaggccccatttgtggttcgaggtggccggcggaaagtgctggtatctacaactctggagamcagaaaggaaaatgcttacaatacgagcctgagtctcatcttctctagaaacctccacctggccagtctcactcctcagagagagagcccaataaaggtggaatgtgccgccccttctgctcatgcccggctctgcagtgtggggcatcctgtcttccagactggagccaaggtgacctttctgctagagtttgagtttagctgctcctctctcctgagccaggtcttcgtgaagctgactgccagcagtgacagcctggagagaaatgggacccttcaagataacacagcccagacctcagcctacatccaatatgagccccacctcctgttctctagtgagtctaccctgcaccgctatgaggttcacccatatgggaccctcccagtgggtcctggcccagaattcaaaaccactctcagggttcagaacctaggctgctatgtggtcagtggcctcatcatctcagccctccttccagctgtggcccatgggggcaattacttcctatcactgtctcaagtcatcactaacaatgcaagctgcatagtgcagaacctgactgaacccccaggcccacctgtgcatccagaggagcttcaacacacaaacagactgaatgggagcaatactcagtgtcaggtggtgaggtgccaccttgggcagctggcaaaggggactgaggtctctgttggactattgaggctggttcacaatgaatttttccgaagagccaagttcaagtccctgacggtggtcagcacctttgagctgggaaccgaagagggcagtgtcctacagctgactgaagcctcccgttggagtgagagcctcttggaggtggttcagacccggcctatcctcatctccctgtggatcctcataggcagtgtcctgggagggttgctcctgcttgctctccttgtcttctgcctgtggaagcttggcttctttgcccataagaaaatccctgaggaagaaaaaagagaagagaagttggagcaatgaatgtagaataagggtctagaaagtcctccctggcagcttcttcaagagacttgcataaaagcagaggtttgggggctcagatgggacaagaagccgcctctggactatctccccagaccagcagcctgacttgacttttgagtcctagggatgctgctggctagagatgaggctttacctcagacaagaagagctggcaccaaaactagccatgctcccaccctctgcttccctcctcctcgtgatcctggttccatagccaacactggggcttttgtttggggtccttttatccccaggaatcaataatttttttgcctaggtgcctgactcctttcagattccctctttatcttccctcacagtttggaaaggatgagggttatcttcctcgattcttccaccctctcactttcctgcctgttccccactccacaggagggagctgacgttggcttgaaaggagtaaagtcaacatctgctgctttcctgtggactctggtgattcatagagccggatggggagagtcaacaggaaaaaaggagggaggaggaaaagccacaagagacattctgtacaattccaaggaacagagaagcctttagacaggcaactgccatcccccctgaaacctgagacctgtagtgcactcgaccgccctcaggtgttggtgaaacagagctgcccccaggctcgctgggcataggcttcctgattccaagccttttctgggagcaaagccagggcctggtgcctgattttctgaagccaggagccctcaggtggctggagctggaatagcagggaggactgggtgtacctaggcagtattttctctacttctctcaagtcttatactcactcttgagccctccttggggcctgcttagaaagcagacaggagagagagtactgctacttgatgatgggaaatgctttcactttaccagctttgggaagcagcagccccatgggatctaaaagtgtggagtctgcattaagaaacctacatgggtggcatggggctctggggagcaagcccttacttgctcagcactggttatgtagcacaaatagctcctaggaaaatgtttctggggcaaccctagaaccctggtcatattttgcagggtttctctggtggaatcagtttgccagcccttgcttgatgcttactggaaatctccaggttaatttctatctctgatccctccccaacccactccatatttgggtcatggacagtaaaggcagttggattctcatagacaactgggtaacttatatttctttgtaatcaagacttgagatatcgaagtcagttattggtctccagagtgcagctctgggagccttttgaagaatcagcactcattaagagctgagaagagagaagacctgattgggtggttgactagcagtcacagaacctgtcctcccaggctgttcctgaggcctgaccacagtatttattttggcatgtctctggccttctgcagaggcccaccctcatgggcattgtctctgtttcccagtggggtggacagtatatcagatggtcagaacaaataaagttcagtgtcwaatgaaaaaaaaaaaaaaaaaaaaaaaaaaaaaaaaaaggggggggg

SEQ ID NO: 29 - DNA, 607 bp, Homo sapiens
ggcacgagtgggcctggaattcgccacaggacggatcttacagaggcaagtggtccctggacctctcttgcatccattctctagacggccgtgtcagaggctccaccctgttgtgaacttggtatggaggcaaaggcttagaggctggaccagcattcttgggcaaggactgactctcgaagggttttgttcttggctttggacacctgagaaccccctcctcccctcccccaatacaaggtttttgacatgagtgtactcctgcttagttcctcttgtggggctgcatttgcggtgctttgccctccccactgtgagtgaggggccaagggatctcctcaatcctgtctccccagcggctctgtttcctccttctttccttggcctctgtcctttgctgacttcctcttccttacccagcagaactcaccctggggtcggggcagtggggaggggcctatccactgctcttcctagtccttggcagctggcctaggtgggcagactataggagggactggttaggagtctgcattgctttgacttccctctccttggttaataaacacaaatgcttgtttctcaaaaaaaaaaaaaaaaaaaaaaa

SEQ ID NO: 30 - DNA, 1245 bp, Homo sapiens
gtagaatgccatggagttaatagcttctgtgatcctacatgttccaagataactgcagcagtccaaaaagccagtttcctttctggtgtttgtgggcatacactttgttctgctcctgagtaagtcacactttgtcttccaggtcctctaggatccctgcaatgttccatttgttgcctgggcattggagtaatagcagtgcttggtgctacagaaatagatggatggaagttgtggttactgtgacaccaaaaacttgtcccctgagctccctactcctctttctcctatattttttggtaattggctctgtcattcacctcactgcaggattcagaatcctggtactgggtcttgtatttctctttttcccttaccctccttatccaaattgtcaccaagttctgcttcatgctctcatgatttctcacctgagttaccctagtagcttccaaatagggccctctgatttcaaccttggacactcccactatcttttatattatggaaagatctaatcatgttaccccccatttaaaatccctcagagagcactgcagatacaattcaagccagttagcttagtgttaaggttttacatgcatttctgcagccatctgcccctattcttgcaccctaataatgccaaacttcttttaggccttaatttcatcatctgcaaaatgaggataataaatagtacctacttcatatgattgtaataaggsccctcaaaactgtttcatgcctcttttgcccactgcattaggctgttctcacattgctataaagaaatacctgaggctgcgtaatttataaagaaaagaagtttaattgactcacatttmtacaggctatacaggaagcatgatggtggcatctgcttggctgctggggagggctcagaaaacttacagtcagccgggcacagtggctcactcctgtaatcccagcacttggggaggccgaggtgggcagatcacctaaggtcagaagttcgagaccagcctgtccaacatggtgaaacctcatccctactaaaaatacaaaaattagccgggtgtggtggggcggcacctgtaactccagctactcagaaggytgaggcaggagaatcacttgaacccaggaggtggaggttgcagtgagccaagattgcgccactgcactccagcctggacaacagagtgggactctgtctcaaaaaaaaaaaaaaaaaaaaaaaaaaaaaaaaaaaaaactcga

SEQ ID NO: 31 - DNA, 1380 bp, Homo sapiens
gagtagatattcaacacatggacaagtgtttaattattctttgtatattcctgttgtttgtaaaacagcttataatttttaaaactattttaaagggaatgaaagtaggaattacagggaggcagttatcaattagatataaggatgaattctctagtagagttagatgtaataaagatattgccacactctatccatatgtttatacatcaaatttttactgagtacatacatcatgagacaaaataaacttcctgtcacaaaaggtgcttgaccaaaactcaagaatcacctttcagggatactgttaaaagtgttcccacatcagctaggagttagctctagagggcttttaagagctttggccatcccgaaattctatgcttgaaacacgttttctcatagaaacgctcctaccaaaggccagtgagagaactatcactttgtgaagaatttcagaatgcccactagctctcctgtagccctaaaaggtaatgagagtctacctgttcagactgagagctccggctgccttgtgctacagaagcagtaagtgcatgtaaaggacgccatatttctaagacaaaagcagtaacaatgactcaaggatgatgcctaatagacgatttaacctataactttgctaattgtcatattttcaaaacagccctatgggaagggtacacaaatgtctggggagtatttcctgctttttagcacccagggaactacaaccaggagcccagcttattttggattggggatggggatagacaagaagagatggggcagggagaagagacggctggtttattttacatacacatattttatttataatacatctctgtgtctaggaggctctatgctggtctcataaaatctgaattatacaaataaaagtttaattcctggctgtttttgaatgacttgggcctgtattacaaaattaatcagatacaattatactatcttcacaacaacaatcatctacattggggtttgacaatgtacaaagtacttccatgtgtattatttcgtttatctttaccacaacctttgaagtaggaagacatgatgatccccattttactgcctaggacagagagacatcaggaggttaactgacttgttcactgagaaagcggaggagcacagactataactccaacagtttgaccccatactgcatacgcatcagggccttaatcatgagactgtatgacccttctgagcctgggattcacttgcaactgggtattccctcttctacctcaggccccctataccttttcaaaaagtgtccttcactgtaaataatcttcctggtggtgaccctaaaggatctgacaacctggatctacgtaaaaaaaaaaaaaa

SEQ ID NO: 32 - DNA, 903 bp, Homo sapiens
agctcaaaacaaacaaacaaacaaaaaaacctaagtcccttcgctgtcaaatccttaggggagtaaattctgtcatctctgggtacctgttttcctgacttttcaaggtgttgaaaagagccttatgattcagccaaactttccaacagctctgatgggcagtttatcctcactcccactctacccagctctgttcctttcttctcttccactgtgtctgaatttgacagggtcccagtctcagtggtactgttcaaagtgtttataatgttactcttctgggcaatttttgcttcatacgtctccatccaatcaatgcatttcaggtgttgtggcagagagatttttgggggtgctggtacaagcaagacaggaatamcccttaagtcacaataaaggcctctgcagggagtttttacattcacttcattttagacatcctcatttccctttcctacatcatgtaatttgtgtgattttttttttttagatggctattcatatgaaaaggaagcaatggaaaattggatcagcaaaaagaaacgtacaagtcccatgacaaatcttgttcttccttcagcggtacttacaccaaataggactctgaaaatggccatcaatagatggctggagacacaccaaaagtaaaattgttgatattgtattatttatattttcagtgatctcatttgaatgatttataggtaaatactaatcagacattattaaaagcaaaacaggaaaaaggtaaacttcttaaatttagttacctataaaaattgtcaattttcattctttaaaaacacatggacttactataaaagcctttttgtactagtgaaaagaatcttcagctatatagaaataaagttatactttaaaaaaaaaaaaaaaaaactcgag

SEQ ID NO: 33 - DNA, 934 bp, Homo sapiens
ggcacgaggttgtctaccctcattagtttatttttgacaaaaagttgcttttagaaatactttacttgttgaagttgttttactatcaaagcatacctattagcttttgaagggagtcctcctgtaaaatttataggattaaaagttttcatgtgcttgtgactaattatgaggtttatagtggtttacattttgagatagttatatatataatatgcccttttcttttgtgacattatacgtatttttttatattgcatttaaaattaaatgacttgcttttgccagattaaatacagataccattggggttttctgttttgattcctaatgataatatggattgatttcaggtgtaattattgaaacagatataattggttcagaccttttgaagaactctgacccagagacacagtccagcatgcctgatgtaccatatgaaccagatttggatatcgaaatagattttcccagaggtactcaaaacctttatgactatggaatttagttatggagtcaactgtggttatgatcatttaccatttgatgtttgtgtcattgccttttagcagtgttcatattttttattcttgttattttttaaactcaccttaagagttaacttcatattttgttgttgtttttttttaaaaacccaccttaacagttaacttctggaatgagatcacttgagtccaggagttcaagaccagcctgggcaatgtggtgaaacactgtctctactgaaaatataaaaattggccaggcgtggtggtgcatgcctgtaatcccagctactcgggaggctgaggcaggaggattgcttgagaccaggaggtagaggttgcagtgagccgagattgtgctgctgcactccagcttgggcagcagagtgagaccctgtctttaaaaaaaaaaaaaaaaaaaaaaa

SEQ ID NO: 34 - DNA, 850 bp, Homo sapiens
gggctgcaggaattcggcacgagaaaatagtcctcccttcaacatggctatcttttttcaagttttatatgcatagctctctcagcacttgaatggaaaaactgttacagcatttgggagttgtttttcttttagacatttgcagatcttatctcaaggtgactaggaacccagagctaagtatctgtgaggcaatctctgcgaacgctgaacttacctagttggtttctatgaaatatgtagaatgcactgcagtagccattgtaagaaggtactataccggttttttggggcttgttgttgttgtttggtctgagaatgtactgccaacccctcttttataagagagaactgattttgatacatattttaaaatatgatagtacagagttaatggatgttaaaattttatttctttgttttggtaagtagattaaatcgagaatcatataatcagtacatttgagaattatataaccagtatataataatactggacacaaccatttgccatcttttcctgttatcatcccatagagtgggtggggagaatgaatagacataaacctagaataatgataaatggtttttaaaactctatattgaatacattccagctgataatgacttttctttttcaccttggtgatatcagcctcagggtaaaaaaaaaagtttcataaatcttttagttataaacaggaaagttttatattagtgtgtcatttcatttctagactgttgatggtgatgatgataaagaatttggagccaattttgatatatgaatgtattgcttttacatgtgatgattaaagctctccattagcaaaaaaaaaaaaaaaaaaac

SEQ ID NO: 35 - DNA, 1713 bp, Homo sapiens
gtctcaatggacacttagaagaatttgatgatcttactgtcataaaatcagtaatgaaattctcagcaaaactatttggtaaacattgcaccctgtatttttacccaacatcttgttatgaaaattatcaaatacattaaaaagttaataattttatagtgtactcactacctagatgctaattagcattacctatgcttgctttgtcacatatccattcatcatttcatattattatttgatgcattttaaattgcatatcattaactagagttcattgttggcttttttacataaaattagcatgcaatgaagtgcatagaaatatgtgttcactgaggtttggcaaatgcatatagtgctatggaaataggaaacgttatcaccaccctagaaagtttccacactgccctttccagtcaattcctgtccctacttgaccctcaaaggcaaccactgttcctttttctaccataagatttttctgttctaaaactttatataaatagagtcacgcaacatgtacgcttttctacaaggcttcatttttttattgctgttcttttttattgctgagtagtattccactgtatgacaatattacagtttgttttcttaatttcctattattgatagatacctgggctgtttccaggattggccattataaataaagctgctatgaccattcttacgtaagtctttgtgaacataggttttcatttctttgcagtaaattccttggattagaattgctgggtcacagggtagttttaaaagaaactgccatacctttttccagttcagttttattgtgccctgtattttgtattttgatgtgcataaaggtgtaaactatttttatgatccatattgaagtattagaagaagtgagtttggaataacaatggcattgttcatggtcaaggatgacaattggaactatctgaggaaagcaaagacctgtctgccccagacagctcctcaaggggttcctatgcctgaaactttagcaatatttcactccttgaaaggttaaagcccaaccatggtgatatgttagctagaagaaacagcactggtttgtttatgttactaactttcaccacccgttttcagtaggtaaagtaagactgatcattgaacagaaaaggttatttctgtgatgaggttgagggggtagtggaaagcatgtattgctagtaagccccaggtacagctatgtgagagagagtcacctggacagggaagtcccccaaatggtggccagaagagcagaaaacggggtgggaaaaattctacctcacagttttgcataggggatagctatgcttttacgggacattttagcgtttaaaaatattttcaatattgtctctttattcaataccacccagctgtagttttttcacactctgatgactctcttatccactcttttacctctcccagctgttctattacatacagcattcacctgtattagtctatagaattataatcatctgtgtgtttctaatgctcattttcaaaaatatgtatggtttattcgatttttcctattaaaattttaagggctgggaaatttggcttctactgtaaatccttataatgttccacacattgtaaatatgcaataaaaatgttaacaactawaaaaaaaaaaaaaaaaaaaactcgactcgtgccgaattcggcacgagcggcacgagc

SEQ ID NO: 36 - DNA, 720 bp, Homo sapiens
ccacgcgtccggggaaatggcagatactgcatgtgattctgatgtcctgcttcagctggtgcttgtctggctgggtgaagtgctaggtgtcattggggactgtccagagctagttcagcgctccttcctggtggctagtgttctgcctggccccgatggcaacattaactcacctacaagaaatgctgacatgcaggaggagctaattgcctccctagaggagcaactgaagctgagtggggaacattctgagtcttccactccacgacccagatcatctcctgaagagacaattgagcctgaaagtcttcaccagctctttgagggtgaaagtgagaccgagtctttctatggctttgaagaagctgacctagatctgatggagatttgagtgttggggtcatgagggggtgtggagtgggggtgggaacatgtgagggagggtaaaggggcttagggaaaagggggcataccaggtggggtatttggtttctattttttaattttataccaccactcccccctgaagttgacttacacttccctgtggatttgtggattaattaggaaaaccaatagtaatcacgtctgagccaaggagctggcccattggtcattcacttctgctaaaaacaggtttttgtgactttttttttttttaaatttaaatcactgtgtttggtatttttctgacaaaaaaaaaaaaaaaaaaaaaaaaaa

SEQ ID NO: 37 - DNA, 1856 bp, Homo sapiens
ctgactttccacctttcctacaaattccgattactgttgctgttgactttgtgcctgacagtggttgggtgggccaccatgtaactacttcgtgggtgccattcaagagattcctaaagcaaaggagttcatggctaatttccataagaccctcattttggggaagggaaaaactctgactaatgaagcatccacgaagaaggtagaacttgacaactgyccttctgtgtctccttacctcagaggccagagcaagctcattttcaaaccagatctcactttggaagaggtacaggcagaaaatcccaaagtgtccagaggccggtatcgccctcaggaatgtaaagctttacagagggtcgccatcctcgttccccaccggaacagagagaaacacctgatgtacctgctggaacatctgcatcccttcctgcagaggcagcagctggattatggcatctacgtcatccaccaggctgaaggtaaaaagtttaatcgagccaaactcttgaatgtgggctatctagaagccctcaaggaagaaaattgggactgctttatattccacgatgtggacctggtacccgagaatgactttaacctttacaagtgtgaggagcatcccaagcatctggtggttggcaggamcagcactgggtacaggttacgttacagtggatattttgggggtgttactgccctaagcagagagcagtttttcaaggtgaatggattctctaacaactactggggatggggaggcgaagacgatgacctcagactcagggttgagctccaaagaatgaaaatttcccggcccctgcctgaagtgggtaaatatacaatggtcttccacactagagacaaaggcaatgaggtgaacgcagaacggatgaagctcttacaccaagtgtcacgagtctggagaacagatgggttgagtagttgttcttataaattagtatctgtggaacacaatcctttatatatcaacatcacagtggatttctggtttggtgcatgaccctggatcttttggtgatgtttggaagaactgattctttgtttgcaataattttggcctagagacttcaaatagtagcacacattaagaacctgttacagctcattgttgagctgaatttttcctttttgtattttcttagcagagctcctggtgatgtagagtataaaacagttgtaacaagacagctttcttagtcattttgatcatgagggttaaatattgtaatatggatacttgaaggactttatataaaaggatgactcaaaggataaaatgaacgctatttgaggactctggttgaaggagatttatttaaatttgaagtaatatattatgggataaaaggccacaggaaataagactgctgaatgtctgagagaaccagagttgttctcgtccaaggtagaaaggtacgaagatacaatactgttattcatttatcctgtacaatcatctgtgaagtggtggtgtcaggtgagaaggcgtccacaaaagaggggagaaaaggcgacgaatcaggacacagtgaacttgggaatgaagaggtagcaggagggtggagtgtcggctgcaaaggcagcagtagctgagctggttgcagstgctgatagccttcaggggaggacctgcccaggtatgccttccagtgatgcccaccagagaatacattctctattagtttttaaagagtttttgtaaaatgattttgtacaagtaggatatgaattagcagtttacaagtttacatattaactaataataaatatgtctatcaaatacctctgtagtaaaatgtgaaaaagcaaaaaaaaaaaaaaaaaaaaaaaac

SEQ ID NO: 38 - DNA, 802 bp, Homo sapiens
ggcacgagagccagcagaggcgagggaaggcgtcactgccccggcggggagacgggcaggacgccctgccccgcaccagcagcctccgccggggcgccctcagctccctgcttggctctgtctctccacacccggcagggccgcgggctgccccagccctgggggtcgtgggcagctgctactcagtgccaaccccgtggggcacagagccatatacctcgctgtccggcccccaccccagcctcgccttcccaccccatcgtctccacttcaggaaaagccgcactttacacccccacctgcctcttccccctccatccctgctccccgatcctgagcggttggggtggggtccctcagcaaccccaggcgtgggtttgaggagacaggtgatttacatcccctttgctgtcctcccccggtaccaaggcagggagcctccggaggagccggccctgctggccacgcaggggccagactccagcctgtttccccagccctgcaggtcttccttctgtgggaagcttcctagcaagatggcttggagtcctggtccccctcctccctggccctctcgttcgtttctgtttctgtttacacgttggagtggggtcctccgtgggcggcggcgcgccctgccccgggtgtcgtccggcctcttgtgctcgagcccctttccgagttggactcgaccatccctcaccccaccaaggaccacactgtgaagtgataactgccttgaacccccctttgctgttttatttattaaacttgatttgaagccaaaaaaaaaaaaaaaaaa

SEQ ID NO: 39 - DNA, 1647 bp, Homo sapiens
ggcacgagatgaagccctgtccaggctatgggcatcaagacagcattgccggcggctgagctgggcctctactctctggtgctgagtggggccctggcctatgctggccggggcctccttgaggcttcacaagatggggcccacaggaaggccttccgggagtctgtgcgacctggctgggagtacattggccggaagatggatgtggctgacttcgagtgggtgatgtggttcacctcctttcgcaacgtcatcatctttgccctctccggacatgtgctgtttgctaaactctgcacgatggttgccccaaagctccgctcctggatgtatgctgtgtacggggccttggctgtgatgggcacaatgggcccttggtacctgctgctgctgcttggtcactgtgtgggcctctatgtggcctcgcttttgggccagccctggctctgtcttggccttggcttggccagcctggcctccttcaagatggaccccctaatctcttggcagagcgggtttgtaacaggcacttttgatcttcaagaggtgctgtttcatgggggcagcagcttcacatgctgcgttgcaccagctttgcactggagagctgtgcccaccctgaccgccactactccttagctgacctgctcaagtacaacttctacctgcccttcttcttcttcgggcccatcaatgacctttgatcgcttccatgctcaggtgagccaggtggagccagtgagacgcgagggtgagctgtggcacatccgagcccaggcaggcctaagcgtggtggccatcatggccgtcgacatcttctttcacttcttctacatcctcactatccccagcgacctcaagttcgccaaccgcctcccagacagtgccctcgctggcctagcctattcaaacctggtgtatgactgggtgaaggcggccgtcctctttggtgttgtcaacactgtggcatgcctcgaccacctggacccaccccagcctcccaagtgcatcaccgcactctacgtctttgcggaaacgcactttgaccgtggcatcaacgactggctttgcaaatatgtgtataaccacattggtggggagcattccgctgtgatcccagagctggcagccacagtggccacatttgccatcaccacactgtggcttgggccttgtgacattgtctacctgtggtcattccttaactgctttggcctcaactttgagctctggatgcaaaaactggcagagtgggggcccctagcacgaattgaggcctctctgtcagtgcagatgtcccgtagggtccgggccctgtttggagccatgacttctgggccatcatcatgtacaaccttgtgagcctgaacagcctcaaattcacagagctggttgcccggcgcctgctactcacagggttcccccagaccacgctgtccatcctgtttgtcacctactgtggcgtccagctggtaaaggagcgtgagcgaaccttggcactggaggaggagcagaagcaggacaaagagaagccggagtaggagggagcgggtagagggatgggctctgctcagctattcttgggccagatggggcctgaccgatagaataaaagacttttctacaacaaaaaaaaaaaaaaaaaaa

SEQ ID NO: 40 - DNA, 2392 bp, Homo sapiens
atttcacactggcattaacaggtctagcataagtggcctaggcagtcatcccaggctccaaaatgaagatgtgcaaaagagatgccactgggaatagaaacactgagttggttcagttaggtcatcccctgcagacgtgtcatcgagcaggctgactcccacccctcagccatgccatgggtatgagaagccccttataatgaaagctgccagccctttcgtccttgtttcagagggtgggtcaggtggttggggtgagaacttgctcacggtgcacccaacaagacctgcaggtgcatataagtttagtcccaactgcagggccagaccaaacacttcctgggaagtgtgtggagggctgtgctagaccttcctgagtttctggctaaatcatcagccctgtttggtgcagtctcatgtctctgtggttcccaagctgcatgatcagagccagtgagaagacaggatcagtgacccacagctttggggaaaaacagccccactgttaacttccctcctgcaaacctgggtccccaggccataaggtgggcacactggtgcttacagactgggtggagagccctaccttccaaggtcttgatcccagcctgcctataaggttgggattagcatgcaatcccccttccccaatcctgtctttttaaaatctcaagtttgcacttaaccttgacaacagcaccctctcctactccagtcctagaactcagtggccttagagaatggggtcccctgcactgaaggtccccgccttgctcccagttccatcctggccaataggctgcgcctcaagaggtgaaagagaaaaaagggagggagggaggaagaattatttagaacaaaaggatggctcgagcacgttagaggcaagtgagaggcacgttggtgagaagagcatgtgcatgtttggggtagctggggcctactgtcccttcattagggaaggaggcttccagaagcggatgtcttctagaaagaaaaattgtgtgaaggctgaaaaggggcttggagttttgtctttgttgattagaaagaaggaagaagtcagctctgagtgtttcaggaagaagagagcaggtagaaagggaatttagtgatttaacacccaagggtccagccatagcaggttggaaaatcctccaaatttggccacagaagctggctaggaaaaaactgccactcattgggccacacgctgggtccccatcagttctcaatgaatggtcattgatttacttagcagagagaagtcaccagccacaaaccaatctttgagtttgcaggccctgattccagaatatatgcatccagctcccgggttctcagctggttttgcccacttccctttgactgtccaatccaaagccagtctctcaagttgtatggctcaaagagcagtgaccacaatgggtcatacagtagggacccacctccacaaattagaaccagagttcagactccattgggcacatctgggaggaaggcaacctcctttgtcgtcttgttggtaccagtcattctcaagtatctctgacacctgtggtggttcagtttgctgagcctgccacctggtatgaattagaytgggtgtgatgaacattcatccatggatataccctaccattttgcgttgccttataaccaaggcacactccccataagagtttactgcagagaaagaacagcaaaacagccaccctccttgaatttacaactcattatctgcaacaggttttctttaaatccaagacacaggatgggaaatgggtttccccaccaggtactcagaggtctgcaggaagtgactcccgggcaaggcagacttcagtaatccctgaagcgtgagcatgtggactgcatggctgggtggggactggtggatgtctctggagctccagaaccttggagaattcctcatggaattcccctcccagctcttagtgggctctgtggggtcaggaggagcccttcctccaggttttccttctttcctcctcagcagagaaactggagaaaggacattaaactcagtgcagtcgatttgagtgctgaaatatttccagaatcaatggtggtgctaaactatctccatgtttctagcatttttaatagtggagttggtttgtttttaatctcatcacaaaaatgcagtgcccttggggaagggaccagccccttggcctgccactttccaggtgtcctttatcactttgacgggactctttggtctgcagaaaatgctctgtcttggcatgcttctagactgtaagatttgggttttgttttgtattttatgtttacatgcatcttatatttccctgaaaactaaataaagttttgggcctttttaaaaaaaaaaaaaaaaaaactcgag

SEQ ID NO: 41 - DNA, 1782 bp, Homo sapiens
  misc_feature (1765)..(1765): n equals a,t,g, or c
  misc_feature (1771)..(1771): n equals a,t,g, or c
ggcacgagcccgcctcagcccaacatggcgatgcacaacaaggcggcgccgccgcagatcccggacacccggcgggagctggcggagctcgtgaagcggaagcaggagctggcggaaacattggcaaatttggagcgacagatctatgcttttgagggaagctacctggaagacactcagatgtatggcaatattattcgtggctgggatcggtatctgaccaaccaaaaaaactccaatagcaaaaatgatcgaaggaaccggaagtttaaggaagctgagcggctcttcagtaaatcctcggttacctcagcagctgcagtaagtgcattggcaggagttcaggaccagctcattgaaaagagggagccaggaagtgggacggaaagtgacacttctccagacttccacaatcaggaaaatgagcccagccaggaggaccctgaggatctggatggatctgtgcagggagtgaaacctcagaaggctgcttcttctacttcctcagggagtcaccacagcagccataaaaagcgaaagaataaaaaccggcacaggattgatctgaagttaaacaaaaaaccacgagctgactattagaagacacattagtgcagaagcttccaggctgtagagccctgcttcccttctctgacctcacaaagataaacatccttcacctgagttcgtggccatccacctctgctctcccagacccagtgcctgtgactttgagtagtttgttctaaatgtggtgacaaacaagtcatttctgtaagacattgggtcttactttatgtcatttttagtaacagaactgcaggaagatcaagacaatgttgtaatcccggcaagttgctaactgtgcgtttctcccttcttagaatgaatgtctcccccaaaactggctggcaccagcttcatctgtgatacccttcaagaaatgttctctggttttgttttatgctgaaagtagaacacaagtcacatttcagatggaggctgtaaatatctggcattttcttatattgttttatgttttcttgtttttctcttgttgtttttatcttattttctttggggtttttttgtaatgcctttgtacagctcatactttcctgctgacatatctgatcatctctttcatgcagttgccaatattcataactgaaaataatctggtttatcataagtaaaatgggaaacttgcctctgttttttgcaaggggaggtaaagagtgtttagtaattacctatcttaaatctttctgagttggtagtagattcatgttcaaggaacaggaaaaatggaaaaacataagtttaaatcagttctttttaaataactttttattcttttgtataaataaaatttcacaggcttcaaattctcatgctttacttttaaacccgagattgttttttcacttatttattcatatcatgccttatggaaatttctttttctgtattttctctctttgctggtattcacctgattaaatattgctctaaaaatcaccatggcatatggaaagtctcaaaattataccaaaagtgataacttatgtcgttcttaagtggagtgaaaggatagcatcagtgatagccagtgttgcccaccaggtctccctttcttggagggcttgttggggctgaggaatctgctagtaatcgttacctgcctctagtgctgtggtgaacttgcgacagggtctggctggcacattggaatcacctgagaagcttttaaaatacttcatgncctggnattcccattcc

SEQ ID NO: 42 - DNA, 619 bp, Homo sapiens
aaattttgtttcactgaatatgtttagagatgccgccagaacattaaccattgtttcatttttatgtaagttgaagaaaaatgaagctagatagcatgttctccatttgcagtctacaaaggggaattttattgcttaaattaaagtttcattttctggcctgtgcaagagacttttatatctaaaatatggatgtacgtttttcatattttagagttcattgtatggaaaaataccatcaaagttgaccaaaagattttgaaaatccttaccagttgtttgtcatatgttaaagtcttatggttaattttatttattttatcttgttctcttgctggttattggcagactcagtctttctgttttcacaaagaactcatgaagaggacgataggggaaacccacgtatgcctttgaggctagggactatgttgtaagttcacctgtgatggccaggtcatacagtcatggcacagccactaaccccattcacagcaccaaggactggggacccagaaggcacttggttatggcttccacactaacgaaaatggaaattccttaaattgagagaactgggaccacccaggaaaaaaaaaaaaaaaaaaaaaactcgtag

SEQ ID NO: 43 - DNA, 1693 bp, Homo sapiens
gatccggggtcaccagttattagaggaagtaacacaaggggatatgagtgcagcagacacatttctgtccgatctgccaagggatgatatctatgtgtcagatgttgaggacgacggtgatgacacatctctggatagtgacctggatccagaggagctggcaggagtcaggggacatcagggtctaagggaccaaaagcgtatgcgacttactgaagtgcaagatgataaagaggaggaggaggaggagaatccactgctggtaccactggaggaaaaggcagtactgcaggaagaacaagccaacctgtggttctcaaagggcagctttgctgggatcgaggacgatgccgatgaggccctggagatcagtcaggcccagctgttatttgagaaccggcggaagggacggcagcagcagcagaagcagcagctgccacagacacccccttcctgtttgaagactgagataatgtctcccctgtaccaagatgaagcccctaagggaacagaggcttcttcggggacagaagctgccactggccttgaaggggaagaaaaggatggcatctcagacagtgatagcagtactagcagtgaggaagaagagagctgggaacccctccgtggtaagaagcgaagccgtgggcctaagtcagatgatgacgggtttgagatagtgcctattgaggacccagcgaaacatcggatactggaccccgaaggccttgctctaggtgctgttattgcctcttccaaaaaggccaagagagacctcatagataactccttcaaccggtacacatttaatgaggatgagggggagcttccggagtggtttgtgcaagaggaaaagcagcaccggatacgacagttgcctgttggtaagaaggaggtggagcattaccggaaacgctggcgggaaatcaatgcacgtcccatcaagaaggtggctgaggctaaggctagaaagaaaaggaggatgctgaagaggctggagcagaccaggaagaaggcagaagccgtggtgaacacagtggacatctcagaacgagagaaagtggcacagctgcgaagtctctacaagaaggctgggcttggcaaggagaaacgccatgtcacctacgttgtagccaaaaaaggtgtgggccgcaaagtgcgccggccagctggagtcagaggtcatttcaaggtggtggactcaaggatgaagaaggaccaaagagcacagcaacgtaaggaacaaaagaaaaaacacaaacggaagtaagcagagctgccaggctcccaggagagcatggggactaggaggaagggtgtggcatggctcagtctggcccccttgattaccggcctagcccctgctcacatcacagctgtctgaagaacagtgaggtggagtgcctagaactcccgtggtggtcctgagcagagaggaggatgtcctcctgcctgcctgaaggtctcccatgaaaacactgctgaactgtgttgacactcatgaccctttttttaaaccgttaaagggaagttcggtgttggagcgatactcaatgtagtcagtctacacctggacgtgtgggccacttaagccctccccacccccatcctattcctaaataaaaccaggataatggaaaaaaaaaaaaaaaaaaaaaaaaaaaaaaaaaaaaaaaaaaactcgagggggtcc

SEQ ID NO: 44 - DNA, 1685 bp, Homo sapiens
  misc_feature (1667)..(1668): n equals a,t,g, or c
ctgcaggaattcggcacgagtactattataatggcaattaaattccaacatgagttttggaggggccattcaaaccatagcagtactgttagcctgttagtcacatggccccaggtcgctgcaagggaggtggggaatgcagtcttggctctgggcagctgtgtgctcagctggctgtccctgcttctgggggatgaaggcattgtgagatttttgattaaatctgggccatttccaggctgaaaagctggaccagagcttcagggcttgagtctctcacagagagatttcccaatggggacatcagtcctgccttgggaccagaaagccacatgctgtaggccaggaagggggaagcaggggctgagcccgagggagaaaggctttagaggtgttagcagacagctcagtggcagtggttagaattagggaggcagcgacctcttcttagtgtggtcagagcatgccaagaaagtgtggtctgtgtctgggctgctgaggcccgagggcaagggccaagctcattcataggacagtggccaagaagcggggactgaaaggcttgggaaaagtaaggaagctctgcaggttctgggacacaagtgaacacggtaagcagtggaaggcccaccccaggacagggttagactgggagcactgtctccttgtagcccacaagaggccaggcaggggtgggggtggaggcttcctgcgtcctcctcacctcatgcccaccccctgccctgcacgtcatgggagggggcttgaagccaaagaaaaataaccctttggtttttttcttctgtatttttttttctaagagaagttattttctacagtggttttatactgaaggaaaaacacaagcaaaaaaaaaaaaaagcatctatctcatctatctcaatcctaatttctcctcccttccttttccctgcttccaggaaactccacatctgccttaaaaccaaagagggcttcctctagaagccaagggaaaggggtgcttttatagaggctagcttctgcttttctgccctggctgctgcccccaccccggggaccctgtgacatggtgcctgagaggcaggcatagaggcttctccgccagcctcctctggacggcaggctcactgccaggccagcctccgagagggagagagagagagagaggacagcttgagccgggcccctgggyttggcctgctgtgattccactacacctggctgaggttcctctgcctgccccgcccccagtccccacccctgcccccagccccggggtgagtccattctcccaggtaccagctgcgcttgcttttctgtattttatttagacaagagatgggaatgaggtgggaggtggaagaagggagaagaaaggtgagtttgagctgccttccctagctttagaccctgggtgggctctgtgcagtcactggaggttgaagccaagtggggtgctgggaggagggagagggaggtcactggaaaggggagagcctgctggcacccaccgtggaggaggaaggcaagagggggtggaggggtgtggcagtggttttggcaaacgctaaagagcccttgcctccccatttcccatctgcaccccttctctcctccccaaatcaatacactagttgtttctaaaaaaaaaaaaaaaaaaaaannaaaaaaaaaaaaaaaag

SEQ ID NO: 45 - DNA, 1135 bp, Homo sapiens
gctcaaaagtaggctcttaattctaccagtgataattataccttgcatgcttagtccatttactcttttgctctcttatgcaactatcgtacacttctgcatgcccctaataccttttctccttattcttactatcaaatgatgatcttgcttttcacttttactgtactaagaaagatggaagcaattagaagagcacatttagcacagtctagccaacaaatctgactacctacagccacctacacctatgttattcttgttttccaccctattaccataatgacccatgcgttctacttacaacacattttcacactttgttgggtcatttcatcaacatagaaawacattgttacttctctcatcttagaagaaaatcttcctttgatccaacctcctccgtaagttactttcccatttctttatttccctttgaagcgaaacttttcaaagagtcatctccatttctccgacttggtcttctcccattctctggtaagcccatttcagtcaggattttgtccctgtctctctgcatgcgcacacacacaggtttagcctaaaaaagctctcgaaaaagagcaatggtaagagggactggcactgctgatgtgtaaaatacttagtaaagttatggtagtttttattttatttttttagaatttaatagatacttcacagttcaaaatatcagaaagataaatatgaagatatcacagaccttttctcaccatttttattttttatttgtccttttttcaaatgtagatgtttttctcccttatttcacaacagtaaactataatgattaaaaccatgtagtataggttcagaaatacataggcaaagcagtgggtaaatagcctcaacaaacataaagatacatgaggacttggtagatgataaagatgacatctcaaattggtgggaaattggtgggaaataggtggtagtgacataactggttagctgtctatggggcaaatctttaatatgtcactctttagaccaaaattaataccaggaggattaaagacttcattgggggcagggcaaagtgctgggattacaggcatgaaccactgcacccagcctatttctctctcttaaaaaaaaaaaaaaaaaactcgta

SEQ ID NO: 46 - DNA, 2325 bp, Homo sapiens
  misc_feature (51)..(51): n equals a,t,g, or c
  misc_feature (2323)..(2323): n equals a,t,g, or c
ggccaacggcttcctggccctggacgtggctgccaatcggctgtgggtgantcccggggagcgggagcccgccgtggcgccggactttgtgcccttcgtgcagctgcgcccgctgagcgcgctggctgaagctggagaggcggtgctgctgctgcgggaggggcttctgcgccgcgtgcgttgcctgcagctggggtccccaggtcctggccccgtggccgccggccccgggsccgcctccgtctctggccttgccgcggggtccggccgcgactgcgtgctgctgcaagaggactttctggcgcacaggggccgaccccacgtctacctgcagcgcatccagctcaacaaccccacggagcgcgtggccgcgctgcagactgtggggcccactgccggcccagcccccaaggccttcaccagtaccctggagaaggtcggagaccatcagttcctcctctactcaggccggtccccgcctacgcccactgggttggtgcacctggtggtggtggccgccaagaagctggtgaaccgcctccaagtggctcccaagacgcagctggatgagacggtgctgtgggtggtgcacgtctctggccccattaacccccaggtgctcaaaagcaaagcagccaaggagctcaaggcgctgcaggacttggcacggaaggaaatgctggagctcttggacatgccagcggcggagctgcttcaagaccaccagctcctctgggctcagctcttcagcccaggagtggaaatgaagaagatcactgacacccacacgccgtctggcctcaccgtgaacctgacgctctattacatgctctcctgctcgccagccccactgctcagcccctccctgagccacagggagcgagaccagatggagtcgacgctcaactatgaagatcactgcttcagcgggcacgccaccatgcacgccgagaacctgtggccggggcggctgtcctccgtccagcagatcctgcagctctctgacctgtggaggctgaccctccagaagcatggcccagcaggaccccgggctgcccttcctcttctggttcagcgtggcctccctaatcaccctcttccacctcttcctcttcaagctcagctttggggggctgcagttcacagagaaccacctccagttccaggccgaccccgacgtgctgcacaacagctatgcattgcatggcatccgctacaagaacgaccatatcaacctggccgtgctggcggatgccgagggcaagccctacctacacgtgtccgtggagtcccgtggccagcctgtcaagatctatgcctgcaagcaggctgcctggacgagccagtggagctgacctcggcgcccacgggccacaccttctcggtcatggtgacacagcccatcacgccactgctctacatctccaccgacctcacacacctgcaggacctgcggcacacgctgcacctcaaggccatcctggcccatgatgagcacatggcccagcaggagtaaggaagatcccagtgtctgagtgaactaacagtcctgctttcagccaccatttgcacaagacacccagcactgaaagtcccgctgccaggagcaagggatcctttggaagcacccgccctttgtgccttgttgggggaaaccggtgacgcagaagtgagtgtggatacaccagagtttgcattggaaggaatgagtgtcacgtggggagggaaggggccagtggaccttttgtaagctttccactcaataaaatgaacctgtatggcaaatacttgaaatggaactcactccttccactttccccctttcttctgtcccaggaaatagatcatcttttgaaaagactcttgtctaggaaaagttgtgtccttttcctaatttaacgtgttctttcttaatgaagttttaatttatttttgttgagattttgctagatggcttttgcatcccctgtagatggtgagtgttggcggtgatgtccrtctcggcgttcggaggccccacggtcccgaggctgggccggggccccccagggtggctgtgctgctgcctgtaggagggtgcgggttgtgctgtcatcctcgggtttgcacgcccttttttaggagcctgtggacatctgtggttttgtactttggggcttcaggggaggtgtttaactttctagtgattgatgattgtcaggttttgaaataccaaagcttttttgttctgtttttaaataaatatctttcaaactttmaaaaaaaaaaaaaaaaaactcgagggggggcccggtacccaattcgccctatagtgagggggtantc

SEQ ID NO: 47 - DNA, 543 bp, Homo sapiens
  misc_feature (529)..(529): n equals a,t,g, or c
  misc_feature (533)..(533): n equals a,t,g, or c
ggcagagcgatcctcccagcaacccacaaggaagcttcacagagaggcagatgccacacaggccacccacccagatgcagagccagattccctgcgtggactggacgggagtttcccagctggagttctctcggccaagctgcctgtgacatggggttggaggtgctccagagagtcatggccacccctggaggaagtgacttgtggctgactgctcaaggggaagtcctgtggcagtggagtcgtcagcattaattcaaataagatctctccctgcacacaatctgctttcgtgttcctgatggattgaatcaagagtgaatgagctcctacttcgcgaaagcaaaacaaactaaacgcatcaaccacgaccgcagagcccccatctctcccaggagggtgagcccatgttgtgttttcatttgtcagaaatctatcttaggaagccattcctgagatctgttctaatttaggccatttttaaaaaaaataatgcagttgaaaaaaaaaaaaaaaaaactctaggggngggnccggtaccca

SEQ ID NO: 48 - DNA, 637 bp, Homo sapiens
ggcacgagcgcgatgtaacacgagaaagcacataccaaggccaccacacaccacctgtccaaaaaggccttcgatacgggataatcctatttattacctcagaagtttttttcttcgcaggatttttctgagccttttaccactccagcctagcccctaccccccaattaggagggcactggcccccaacaggcatcaccccgctaaatcccctagaagtcccactcctaaacacatccgtattactcgcatcaggagtatcaatcacctgagctcaccatagtctaatagaaaacaaccgaaaccaaataattcaagcactgctcattacaattttactgggtctctattttaccctcctacaagcctcagagtacttcgagtctcccttcaccatttccgacggcatctacggctcaacattttttgtagccacaggcttccacggacttcacgtcattattggctcaactttcctcactatctgcttcatccgccaactaatatttcactttacatccaaacatcactttggcttcgaagccgccgcctgatactggcattttgtagatgtggtttgactatttctgtatgtctccatctattgatgagggtcttaaaaaaaaaaaaaaaaaaa

SEQ ID NO: 49 - DNA, 1629 bp, Homo sapiens
ggcacgagaagaaaatgatttggatgattctttaagtgtaaaaaatggtgatagtagtaatgactttgtgacttgcaatgatatcaatgaagatgattttggtgattttggtgactttggctctgccagtggctcaactccaccttttgttactggtactcaagattcaatgagtgatgccacttttgaagagtcttcagagcactttccacattttagtgaaccaggtgatgactttggagaatttggggatataaatgctgtttcttgccaagaggagacaatattaacaaagtcagacctaaaacagacttctgataatttatcagaagaatgtcaattggcaagaaaatctagtggaacaggcactgaacctgttgcaaaacttaaaaatgggcaagaaggtgagattggacattttgattctgtgccaaatattcaggatgactgcaatggttttcaagactctgatgattttgcagacttcagttcagctggtcctagccaagttgtagattggaatgcttttgaggatgaacaaaaagatagttgttcttgggctgcttttggagaccagcaggctactgaatctcatcatcgaaaggaagcctggcagtcacataggacagatgaaaatattgatactccaggaacccccaaaacgcacagtgtaccttcagcaacttccaaaggagcagttgctagtggccatttacaggaatcagccacttcagttcagacagctttattaaaccgcctggagcgaattttcgaagcatgttttccttccatacttgtccctgatgctgaagaggaagttacttccctgaagcacttgctggaaacaagcactttgccaataaaaacgagagaggccttacctgaaagtggggaattgctagatgtgtggactgagctacaggatatccatgatgcacatggcttgagataccagtggggcggctcccatagcaacaagaagcttttgtcctccttgggaatagacacccgaaacattctcttcacgggcaataagaagcagcctgttatagtgcccatgtatgcagcaggattgggtatgttagagcccaccaaggaaccactgaaaccactttctgctgcagaaaaaatagcttccatcggtcagacagccaccatgtcaccagatatgaacacatgtacatctgatcagttccaggagtctctaccacccgtccagtttgactggagtagcagtggccttactaaccctttagatggtgtggatccggagttgtatgagttaacaacttctaagctggaaatctccacctcaagcctcaaagtgactgatgcatttgcaagactcatgtctacagtagagaagacaagcacatctaccaggaaaccgaaaagagaagagcacctaagtgaagaagctatcaaggtgatcgctggccttcctgacttaacattcatgcatgccaaggtgttgatgttcccagccacgttaacaccttccacaagctctcaagaaaaagcagacggataactgatgtgaattggacagtttctattgcttttccttttttccatcccttccctaccatcaaaagcatacctgctctaattaaaaaaaaaaaaaaaaaa

SEQ ID NO: 50 - DNA, 1076 bp, Homo sapiens
ggcacgagtcctgaccttgtgatccacccacctcggcctcccgaagtgctgggattgcaggcctgagccaccacgcccagcctattttgtgtttttttaaagctaactaccattaagatcattatagaagtttggtataatgaagatttgggtttttcagtccaatgagtttccatattcttgaatgaaaaagatccacatttcatcatttgcctgtttcattttcttttagtacttttgaacttagtttggtcagaaaatactagaattttagtttgatctaaagaaccagcttatataacttgctgttgccatgtacattgtatgtctttgctgtgtcaaataactggatcgattttagctcttttaagtggtgaaagcaatgcattttattcttcaaattcagacattgaatgtgtataaaatgtgtgtgcttacctttaatcctctccccaccgacaattaggaacacgtttctccaattactgttggcaagactaccaagaaaaattgttgaattagaatcccagcaccgggcacggtggctcacgcctgtgatcctagcactttgggaggccaaagcaggcggatcacctgaggtcaggagttcgagaccagcagggccaacatggcgaaaccccgactctactaaaaatacaaaaattagccaggcatggtggtgggcgcctgtaatcccaactactcaggaggctgaggcaggagaattgcttgaacctgggagttggaggtcacggtgagctgatatcacaccattgcactccagcctgggcaacagagcaagactctgtctcaatcaatctatccatcaatcgataagaaccccagattgtatagctacatgttttagcccccttttcaaagtatatgttctccttggtacttattttgacattctgacttttctacatatgctttatcaacctcttaattaaaccatcattgtctattttgagagataactgcgctgcttcccgttgtgtgttttaaatgttattgttcagtttgagtcaaataaaaggatatttaatctgtgaaaaaaaaaaaaaaaaaaaaaa

SEQ ID NO: 51 - DNA, 1652 bp, Homo sapiens
  misc_feature (1500)..(1500): n equals a,t,g, or c
  misc_feature (1527)..(1527): n equals a,t,g, or c
  misc_feature (1546)..(1546): n equals a,t,g, or c
  misc_feature (1614)..(1614): n equals a,t,g, or c
  misc_feature (1640)..(1640): n equals a,t,g, or c
tcgacccacgcgtccggattgttctgtttttctcaccctactatgtgaatatatattctgttagagatgggctgttatctgcaatgtggactcaataccatgggcttgagtttggttagttcatcattagagattttttttcagcagttggtttactttatgagaaaggatcatgagtttaattttcccactgatatatttgtgttctcattgctgagatataagtttcttaatgatttgttacctttttctattttcctagactagtattaaaattttgatggcatatgggtttggttccacttgtagagaataaatgttcacaacttactggtattagcacacacacatcacatgcagaaatggtgttttcttgccacttactctttctcataagatgcttatattcctgtgggcatttgtcttccacactacagcacataatttgatgaaactgattttctgtgcaagagcttgtgtttctccaactctgggttttatggaccacttttcattggtatataggaggcggttaaaacgtggtggtagaatgcaggttttaggttagctgggtgtgaagaatcccaggtctttgggatagtcttggcaagttactcaactcctctaagttagtttcttgatctgtcagatgmcagtaaacctcagagttgtgaaaattaaatggatataatgtgtgtaaagcacttagcataatgctttatacatcgtaaaactttcaaaaataggagtagtaattattacaaagaaatgtgaagaagagtcctagtgggctgcatgttaaaaatagtttttagttaatgaaaattaaatcacatcttagatgtttatcatctgcatggtacttttctggttgctgctttaacctttgtatagttgaaagtctgtaaactttctagtattctttgatttctggcccatttccctcctaccattcacgcttatattttttggttcaagtcaccattccttgcaaaactaattaaatacattcctaaatacataatattgccaatattcattcacatccaccacgtctagatccaagtcttcatcttctttatgctggtctaatttttgctgagccttagaagcaaagacagactccgggggttgatatgggacctccagaatggggattgcacagaataatcttatttttcctctattcttctagtctgttatgttctgaacccacacatgttttcggaaggaccagatggctgacactggctaatgggaaccaaaagacgagtgaaagtaacctggttgtcacatacccccagcttagaggtgcttcaccctgccccaaggtcaatttcttttttctctagagactttaccccattatatcaaaaacctttactacagcctgactttatctgatgttagagtatcattaagtcaagcagcagcatttattgagtgaaaaaagattgtcacaggactggaagagaagcatctgcctttaaaatacagtanaaggccggcatggtggctcatgcctgnaattctagcactttgggangccaagcaagtggattggctgagctcaggagttcgagacaccctgggcaacatggggaaaacctgctntctaaaaaaaaaaaaaaaaaaactcngggggggcccgg

SEQ ID NO: 52 - DNA, 1639 bp, Homo sapiens
ggcacgagctgaaaatggatactgctttagtgatgtctgctttattcgtaaaatgcttatttcttttgctagatgtaaagatttggtgttaacaaaagtggttttaatatgtaaatatgaatgaatgcctttagtttaccctgtttgtctattattaatctgttttcatttatccttcatagaggaggatcctttcatgatcttgaatacatttcattagatattgttgcattttaagaatgaaaatacaactgttttctgtcttagattaatcctgctgctatgagaaactgaaaatcaagaatgtgatgcactttttacattactatataccatacatataccataggttgctttgatacctttcctgtagcacagccactaacaagagtgaatgaattataaaattctttttgggagggaatcaatacaagtaactaattcttagctgatattgtcctatgaaggacaataacttaggaatataagaattctgttaatagtacactttttggccttaaatgtcttctactactgaaaatagtttaaatcttagctttgtttctattattccctctctctgcctcagaaagaggaattgggaagaatggtttaaaggacgtggtgtcattgatttgttgctgatcttttagaaaacatttgtctatgtaagctggggacttattttttgtttgtatatagaggggaaatagtgctgccctgaaccaatcagatttagtttaaatcaaatcaatcaaaactccagctgtttctcttgtctttttacttagcaaaggaaaactttagtgaatgctacttgacaagaagaaaagtcatttctcaagcacatacccaaacttgaagtgattgaacccaaaataatgggtgggaaacaccaaatgagtggagaatgagaaagatgtgtgggccaaagctatctggttatattttgatgttgccaatatcgcaaagccaaaattttaatttgcttatttaatatatttgttggccagagatctatttttatatcaatgttgccttgcatgtatattaaaaaaaaaaaattggaaacgcccatgtagtaatgcctgagatagtcgatggttccttaccacctcactaatttttatgcagtatgaaagctcattctattgccccaactggtgctctctgtttaaagttacagatcttgcgaaactggaactattttataagctggggaagtgatttactttttttgttgtatcttttttgttcttagtctgttagtggctgtcctgtagtgggaaatagtaaaaggattcttcactcccttctcccctcagcaccttcttcaagtaaacatttcttgtgtgctttgaaaaaagtttcagcttgctgtctcttttagtgttttaaagaagtgttatacaaagcattgtttgcaaaatatagggagataatgtagtccactttaatttggaattctgtgtgagctatgatccaagttatcagctctttccaactttaaaaattttgttaaaagcaccttgcttagaaaattttaaatatttatgtctgcaacaattgtctcaaaataataaactgtgcaattcttgtcattaaaaaaaaaaaagatctgaaaaaaaaaaaaaaaaaa

SEQ ID NO: 53 - DNA, 1308 bp, Homo sapiens
gaaattaaccctcactaaagggaacaaaagctggagctccaccgcggtggcggccgctctagaactagtggatcccccgggctgcaggaattcggcacgaggatgaatggtttgcacatattttctcccattctgtaatgtgtttctttgtttattgtttctttggctgtgcagaagctttttcatttgctgtaatctcatttttcygtctttgcttttcttacttgtgcttttggagtcatatccaaaaaatcattgcccagtccaaagtcaagaaacttttccttacattttctttagtagctttataatattaggtcttacgtgtaagtctttaatccagtttgagttgatttttgtatatggtgtgagataagggtctaatatcattcttctttatgtggatatccagtttttcagacatcatttattgaagagactgttctttctccattgtgtgttattggcatctttgtcaaatatcaattgaccataaatgcatggtttatttctgggctctctgttgttccactggtctgtctgttttcgtgtcagtaccatgctgtttttattactatagatttgtagtatattttgaagtcaggtggagtgtgacgcttccaggtttgttcattttgctcaagattgctttgactatttggggtcttttgtggttccattcaaattgaaggattgtttcttctatttctgtgcgaagtgtcatgagaattttgatagggattgcattgaatctgtagattgctttggctagtatggacattttaacagtgttaattcttcaaattcatgaatgaacatgggatatctatccatttattcatgactaatttctttcatcagtgttttcagtataaaggtcttttatctccttggttaaatttattactaagtcttttttttaagctattgttaatgggattgctttcttgatttctgttttggataggttgttgttattatgtaagttttaaagatgaagaaagtgaggccaggtgcagtgctcacgcctgtaatcccagcagtttgggaggccgaagcgggtgaatcacccgaggtcaggagttcaagaccagcctggccaacatggtgaaaccctgtctccactaaaaatacagaaattgccagatatgttagcacatgcctgtagtcccagctacttgggaggctgaggcaggagaatcacttgaacccgggaggtggaggttgcagtgagccgagatggtgccactgcactccatgctgagcgacagagtgagactccgtcttaaaaaaaaaaaaaaaaaaaaa

SEQ ID NO: 54 - DNA, 1891 bp, Homo sapiens
  misc_feature (1164)..(1164): n equals a,t,g, or c
ggcacgagcatgaatgtactgcaagggaacacatttgtgtcatgtgaagagacatgacaaaaacagccctccttaaattatttgtggcaatagtgatcacattcattttaattttgccggaatatttcaagacaccgaaagaaagaacattggagctatcatgtctggaagtgtgtttgcaatctaattttacctattcactctcctccttaaatttttcttttgtgacttttctgcaaccagtaagggaaactcagattatcatgagaatctttctaaatccctccaattttcgtaacttcaccaggacttgccaagacatcacaggtgaatttaaaatgtgctcctcgtgtttggtttgtgagtctaaaggaaacatggattttatttctcaggaacaaacatcaaaagttcttatcaggagaggatcaatggaagtgaaagcaaatgattttcattcaccttgtcagcactttaacttcagtgtagctcctctggttgaccacttggaggaatataacactacctgtcatctaaaaaaccacactggaagatcaacaatcatggaggatgagccaagcaaggagaaatcgataaactacacttgtagaatcatggaatacccgaatgattgtatacacatttctttgcacctggagatggatataaaaaatatcacttgttccatgaagatcacttggtatattttagttctattagtttttatatttttgatcatcctcactatccgcaaaatacttgaaggccagagaagagtgcaaaagtggcagagtcatagagacaaacctacatctgttctcttaagaggaagtgattcggagaaactgagagcattgaatgtgcaggttctttcagcagagaccacgcagaggctgcctttggatcaagtccaggaagtgcttcccccaattccagaactataagttacttccacagtgcatcagtgagatcaatatacacgaatatccccgggcaagttggaccgagccctttgaagaatactcagaagtttattttgtgaatgagtagactggaaaatgtttgtgtccagctgaggatgcacagttggaaagcaggaggaatgctgactggttgatgaaaactagcttaagagcattcattcgctccatgagatcaagggancaagagtgtttgcaagaagccattatgagtcatggaaaaaaagatgatgaaacccatggaaacagcaagagaattcccactctctctcttcttaaaaaaaatctatcattatacagcacagagtggagccaattttttaattttgaggaaccaaaaacaggatcaaatatgaaaaccctttcttttattgggccacattgtagatgctgatttgataattgtttcctatgcagatagattatttttatttcacagattatttaaaagggaagagggcctggttgtttatttatatgtttgtttgcatttatgaatcttgctgccttttagcaccaggatgtttttaaaaaaattcaaagaggccaggcgcagtggctcatgcctgtaatcccagcactttgggattctgaggtgggaggatcatgaggtcaagggatcgagaccatcctggccaacatggtgaaaccctgtctctactaaaaacacaaaaattagctgggtgtggtggtgcgcgcctgtagtcccagctcctcaggaggctgaggcaggagaatcacttgaacctggcaggcagagtttgcagtgaaccaagatcacgccactgcattacagcctggtgcagagcaagactctgtctcaaaaaaaaaaaaaaaaaaaaatcaaagataccaataaaacgaatttaaataaaatacttaagtactttaataaaaaaaaaaaaaaaaaa

SEQ ID NO: 55 - DNA, 726 bp, Homo sapiens
ggcacgagggatgacaaagctcatgaatcggcttttaagaactgtttccatgttggagtatttcatcaaccggagttgggaatggagcacgtacaatacagaaatgctgatgtctgagctgagtcctgaagaccagagagtattcaactttgacgtgcgccagttgaactggttggaatacattgaaaattatgttttgggagttaaaaaatacttattgaaagaggatatggctgggatcccaaaagcaaagcaacgcttaaaaaggctccgaaatattcactacctctttaatactgccctcttccttatcgcctggcgccttctcattgcaagatctcagatggctcggaatgtctggttcttcattgtaagcttctgttataaattcctctcctactttagagcatccagcacgctcaaagtttaagagcatttagccatcgctttttatctggaacctctcagatacctctaaaacagcaaactgtgattctcaagattagaaagtaacaaggaatatgcccaaactgtcaaatgtcacctgttatgtattcgtccctattccttaactatgtatttttatttcagtgagagaaggaaagttgtaaactagcccatagtcacctatattttagggaaaaaaatccaaattgtttcctaacattctattttatgcccttgcgtattaaacgtgaaagtactcccaaaaaaaaaaaaaaaaaa

SEQ ID NO: 56 - DNA, 1118 bp, Homo sapiens
ggcacgagagggttctgacctgggtggatgacgggcaaatggtcctgaactctctgctgtctctctccttaatgtcctctgtctgttctaagctgagatgttagatagaccttcagggatccctgacaaagaggcatctggtcttaactgcttgcttctagtggccatgtgctcattactttcttcacttcattgagactgccccatgtgctagagaggtctcttccatgttgggaaatgcctctgccctcatctgggcagttctgatctgtgttcatgggttatttttcccattgtcagggtgaggcattcactctttggggaagtgaggaagctcatcacagacgagtttgtgaagcagaagtacctggagtacaagagggtccctaacagcagaccacctgaatatgagttcttctggggcttgcgctcctaccacgagactagcaagatgaaagtcctcaagtttgcatgcagggtgcagaagaaagaccccaaggactgggctgtgcagtaccgcgaggcagtggagatggaagtccaagctgcagctgtggctgtggctgaggctgaagccagggctgagtggttccaacaccagcactggctttactggcgaacccagcaccagcacgggcttcagtagtggacccagttctattgttggcttcagcggtggaccaagcactggtgttggcttctgcagtggaccaagcaccagtggcttcagcggtggaccgagcacaggagctggcttcggcggtggaccaaacactggtgctggctttggtggtggaccgagcaccagtgctggctttggcagtggagccgccagtcttggtgcctgtggcttctcgtatggctagtgaggtttcagatttattccccatgtttacagataccgctaataaattgcagtagtccttcccatggagccaaagtacatccttggaatctttgtccacacagcagtcaaggcagttatggccaatcagctgagggtgtcatgtgatggaaaaatctgtttgctgttcctgctttattgtttgctttctgtgtgctgtcatattttggtatcagagttacattaaatttgcaaaaaaaaaaaaaaaaaaaaa

SEQ ID NO: 57 - DNA, 1974 bp, Homo sapiens
  misc_feature (1967)..(1967): n equals a,t,g, or c
tggttgggatgtggagttgttgctggactctcaggcgaacgtgaagtcattgaagtgtgtgaagctctgtgcttgcatgagggcaagcaaggaatggctgtgctgaggctgctctgggaaactccttgccccttgacctcttttgagagcattcacgtggtcttcttgctcatccccttataaatgtgctttgcctgcctcagcctcatggtcagagcagtggagactggagccctgtttgcacgttctagttgttcggagaaagcctaggttctgggctcaggtccagatgcagcggggattctgttctctgactgtggcgaccttgctttggttcttgttgaagtgaaccaagcccggccaccacgcatggcatgctgtgcttggctccccataagacgtcctctttgggtgcacggtgtcaaagtgtgggcaggagtggagagctggtgccctcaggaggagaccacagcatgtccatcagctcagcagagctcgacagccacaagtcctgagaagctttgaccttgaagggcttctgggagaggaggaatttctgcatggggcgtgaaggcacactgtcccaccacaactgaaccagaagagagtgaagactcccctcttcccatcctctgtgccaggtgccagactgwctccagccaaggtgcaaagacgagattatgagacaggtcctcaggcctgtgttccaagtactcacaggggctctgggtgcccatcgccgggagtatggttcagctgccaccggcactgtccatttgcctgtctgtcaagctcagagcatggataagccacacagcagggcagtgcaccctggcaccatgcacggccagcaagaatcaaggcccgcagatgctaagagggcctattgtcaggggaaggtccccgctcctgcacactctctatggatacttgggttgtgggggctctcttggagagtaagtttgtggtttgtttctggtttacagtggtggctgacaccccttgtaagaaagcattcctgggaagtcttctgtgggtccaaacatgttgctccgatcatcacaggagagcaaaaggccctagataccccctttggaatgtgagagtcttgttgtctgatatttgccactgagctggtgaagcccctctaaagagatctcgaccctggggagcagaattcttgtcatctatgaggggtcctgagaaagacttgtcattttttttcctggagttcttcccattgaggtcctaggatttgcacaccactgtcccacaagagctttcctgcctaatgaaaggaggtcttgtggtgtgtgtctcctctcttctctatagttcccgagttggcccccattgcagcccccaccctgtgggtagtcttccagaagtgatgcagtggtgtgagatgccctacaccttgttatttgggagactttgagagtcattcacttccatggtgactagtgtttgttttgcctgattttatattctgtgttgcatttctccccactccctgccctgctttaataaacagcaaaccaatatctaggaagaatgactgagggatagtattgggtattggccccatggcaggaacagccacttgcatctggtcccggtgccacactgcggtgcttggtgtggttgtggagcctgtccctgcgcgccttgctcccgttgagccacgctgtctggtgggtgattctctgccctgagccaccaccctggactggcccagtctccagagctggcacaccctgcctgttttctctttttagacacaacagccgcagtttggccagccactaagtcccaccagctgaggtccgaggaaagcggggtgactcatttcccttgtccagggcccgaggagagtgaggtgtccagcctgcaaagctattccagctccttggtgttggtttgcaataaattggtatttaagcagtaaaaaaaaaaaaaaaaaaaanactcgag

SEQ ID NO: 58 - DNA, 2111 bp, Homo sapiens
  misc_feature (225)..(225): n equals a,t,g, or c
  misc_feature (612)..(612): n equals a,t,g, or c
  misc_feature (1142)..(1142): n equals a,t,g, or c
  misc_feature (1203)..(1203): n equals a,t,g, or c
  misc_feature (1245)..(1245): n equals a,t,g, or c
  misc_feature (1765)..(1765): n equals a,t,g, or c
tgataactaaacacacatgtggtgaatcgtcactcatggtcctgatcacttgggttcattgtgcttgtcaatcaaaaggaccccagacgtgcctgccaccaatccccaggctgacccagatgcttctagtgactcagttaggaggatggagggcaaactgacaacaagcaaaattctaattgttgggaaggtattttgggtttcctgcactttgttttatatttnttttttttgagaaaaagatagtcaaaccatccaggcataaaatcattctaatagaaaagctgttgagaatcatggagaaaaaaaataaaccctgtacactggagctcactgcttactcacaggcacttacatcaggatagcagcagcagcggcagcaggagcagaaaaacaggctaatcagaaggaagaaaaaacattctctgaaaacgctaaaatggagcaacagtagtggcctagaaaggggtatcatatgttttggtaaaaataataataataataataagccatgtagcaatggagaattgaaattcctgagagtcactgaaactgttcaggggctcctttcattctcttcttcacttccaaaccctgcaaatcccccacggnagctctttgtatagasataatttctcagactacttagcggagaaattcatacttttatagaaaggtatgtgatgatggtgtatttatgtgtgaaagagaaaagaggaatttactggtctctccatcttcaagaaagaaaattctaagaattttcacatcaccacctacagaccatgacaatgtcttccagaaaaataaacattgttccttttatggcttttagaactagaatgcagaattcaattatttattttaaaatccctaacaggattttatcctggaggagaaagcgtgcacaagtaaaaggaattgtaaatgctaacaaaataaaggaaaaaagacaaaaaggctcattatagaattttcagtatcaggggattctaattctaaactgtggattaaattcgtgtcattgttgattacatcttctgggctgtgaccagtgttgtaaaagaataggagaagcatgaagtctcaaaggcaacttctcttctccatgcccatgggaatatcttagagctcacaatgangttaataaaaagcccctgattccttggatctcatggataaagagctcaccaattamcaggncccacaggaaagaacaaagcagcttcatatcgaaacagaaanaacaaaaaacaaagccctgcaatttgcaaatgtccaagaagtgcatggaatatcagtaaataatggaaaggaatacaatttttaaaaaaataggctctgtgcatatttgaaagtgtctttttttccagataaataattctagatgaacaatttcatacacacagagcatttgaataattccatagaatccattttaccagatctttctgcctaattacaagtctttgaaccagacaccggtacttgaaagatcaatgcctggctgcacaaagcatatataaagcataattaagaggaggactgctcgacagagccacggataacatgcatatggatgtgtgaagtcttcacatgtacacactttatagctgtgatatgcacatcagacacatactctcactgtccaaaatgtctttggctgccattttataaatgaggcaatcaaaggaaaatggaattaaaaacaaataataaggtaaccaaattttagatcatcttcttatttgaatctctgagtatnaagcaagtctatttaactccattttgaagtatttatctctgaaaataccttacttcctatttagatcaaaatttggtacatttctaggaaatacgtggattttaaatgtgaaatgatttgttcaacttgcttctcatttttttaattccaaatcaatataatcaaacattaacactttggactactcagaaagtatatttatactttcaggaaggattatggtagagtatgtacttaagtgggagcattttgtgtgtaaactaggaaggttggcttagtctctgggaggcaaacaaatcgaagtcgcggaattcgatatcaagcttatcgataccgtcgacctcga

SEQ ID NO: 59 - DNA, 592 bp, Homo sapiens
  misc_feature (8)..(8): n equals a,t,g, or c
  misc_feature (451)..(451): n equals a,t,g, or c
tttgcctnctgccatgccttttccctacccgcttcctcagccctcgccacctcccctcttcccacccctgccccaggataccccttttttcccaggccagcccttcccaccccatgaattcttcaactataatccagtggaggacttctcgatgccaccccacttaggatgtggccctggagtgaactttgtgcctggccctctgccacctccaatccctggccctaatccccatggtcagcactggggcccagtggtccaccgggggatgccacgctatgttcctaacagcccctaccatgtgcggagaatgggggggccctgcaggcagcggctcagacactcagagagactgatccacacatacaaactggacagacggcctcctgcccattcggggacatggcctgggtagactggatcttgggctgggactggatgtgccaatggnccttcagggcctgcctggcacctcaggtactgggctagggtgtctgctatgcctggtattgttcttgtccattgctgtcaccaataaaggcatggaagaacagagtgacaaaaaaaaaaaaaaaaaaaaaaaaaactcgag

SEQ ID NO: 60 - DNA, 1010 bp, Homo sapiens
  misc_feature (350)..(350): n equals a,t,g, or c
  misc_feature (584)..(584): n equals a,t,g, or c
ggcacaggtttaaacgaggtgagttcacataacaggaattctggaactgcttgaaaactaggacgattgggcaatatcggccttaactccacctgatggcaggtgacccggatagaaaatggccctgcgtttagccaggatgtggctctccagcttggcttcagtgtgatcacttgtcagtgcgctttctctttcgatagtgaaatccttctctatacctatgttttgttttgtttcttaagttgggaaacagaatgggccagggaggttgagtgactgaagaccaagggttggtgcagcctcctcgccgcgctgcgggggctgggccgcacaggcttctgcccttctcnggtgtccaggctccttgggtratgctggagttktmatgsccgcagttcagtgtgagattttttaccaggtattgcgcttaaagggacatgattttccattttcttcgcccggacaacttgaatgaaatgggcactgttgattccacttctgtcragragcttcggggctcagagaggtgatgacgtgcccaaggtgacgcaactcgtgaacagccgtgcctgccttgggcgcanctccggcgccagagctgggctcttcaacacggcatttagcgcagaaagtcgtggttcaggcagtatgggccgctgtgacaaaacacctaagactgggtagtttataaagaacagacattcaggccaggcacggtgactcacgcctgtaatcccagcactttgggaggccgaggcgggtggatcatttgaggtcaggagtttgaaaccagcctggccaacatggtgaaaccccatctctactaaaaaaacaaaactagctgggggtggtggtgcatgcctgtggtcccagctacttgggaggctaaggtagaagaattgcttgaacctgggaggcagagattgcagtgagccgagatcacgccattgcactccagcctgggtgacacagtgagactccatctcaaaaaaaaaaaaaaaaaactcgag

SEQ ID NO: 61 - DNA, 1219 bp, Homo sapiens
  misc_feature (575)..(575): n equals a,t,g, or c
  misc_feature (582)..(582): n equals a,t,g, or c
  misc_feature (606)..(606): n equals a,t,g, or c
ttttttttttttttttttggacatgtctatggaaggataattccagaagtatcatgcaacggtagccaaggcacaggtcctgtctttaagcagtttatggtatagtggggaaaaggggtggtaaaaacacaaaatacctcccatgcaaatgtcctaactctcttcattaatcaatatctacatgatcccacaggtctacttctttatcttcatctctgcaggactagatatttgatagttactactttcccaatgctaacttcttcatttatcctgtcatattttgtttgtttcagtttttatttttttgtttgtttgtgttctgttttttttagagacagggtctcagtctgtcactcaggctggagtgcactggcacacaaaaagctcagcagcctgggacttctgggcacaaaccctcctcacgcatcaacctccaaagtgggtaggactacaggcatgtgccaccacatctggcaaatttttaaacttttttttttttgcaaagacagggtctcactctgttgcccaagcgagtctggaactcccgggcacaagcaatccacccacctcancctctcnaagtgctgcaatcacaggcattanccaccttgcccagcctgattttgtttttaatatatttcacagtcacattcgctgaaacttacttctcccttattctcttatatttcagtacttttcaacattctgtttggataacgtcacttatctggtgccaaatacttaaatcgtagtctgatctattcccaggaattcagcattaccagtgttctgactcctaaagctacattcttctgcttatctatactcacaaatttcagatctatatcctgttaaatatcacttgcatttttcaaagataccttaagtacaggatatcttaaccagaatcattccaaggaaaatgtgctgctctttccacttttcccaaggttggcaaatggcaccactttttcctcaccctctcgggtaggtatctttggtatctcccactgttctccatagccttatccacatttctgcttagcaaatccctacttttccacccttcaaaccacggctatgattttttgtaacccacactcaagtcctcctctacttcttgtagcatataatcagtctctccatataatgcctctcatgcctttacttttaaacatcaaatctgctcgtgtcgaattctttggatccactagtg

SEQ ID NO: 62 - DNA, 1392 bp, Homo sapiens
  misc_feature (11)..(11): n equals a,t,g, or c
  misc_feature (17)..(17): n equals a,t,g, or c
  misc_feature (26)..(26): n equals a,t,g, or c
  misc_feature (71)..(71): n equals a,t,g, or c
  misc_feature (86)..(86): n equals a,t,g, or c
cttaagaaccncccccnattctttgncccatccagtcttttctaacttggtctggtcttttgtcccatccnttttgaagattttgnccgawttttgamcaaggccaccaacctgcagcaatgamcaaagttccaatgccaaataagtaaagaggggagccaccacgaacccggtgagggcatcgagattttggtttccaacatagcacaagccagtcagttcatctgcatccaccagtctcataatcaagatgacaatggttttcactgcggggatggcccaggctgcaatgtggaaataagagctgtgcatttcaatggcttcatgaccccatttgagtcctgctgccaaaaaccaagtgagtgtcagaataacccaccaaatggagctggccattccaaaaaagtacatcagcaagaaaattattgcacatcctgtgttcttaagtccttcttggatgagaacaggttctgctgcctcttcaaaatcacaggatatcctttcccggcctacagtcagcctgacaataagcaatgctataaatattatagcacatactgagaaatatgatggggcgctcagggtaggaaaacctagaagaatcgatcaggaaggtcagtactgtgaaggcagtggagatgaaacacaggctggcccacacagccatccagatatcagtgaactccttggctgagcggctgtataagccagcatcatagccacacttgagcacacagttcaggctccttttcacccagatgtactgatcagaattggttcccacagagtgacactcttccccaggctggatgggggttttgtgaggtaagggcacctcttcatcacctggcccttccatgcacatgtggttgtggtcgttctgtggtgggaatttgctgcagttcagactctctggccaggcaaatccaaattccttcaggacgggttcacagcgtctcttgactgaaagacacatgccgccgcatgggccaatggggatgttgatcttctctgtgcacattggcacataaacagaacaaaggaagaactggaaaagtaacaaaatgaacacacacaaaaaaaacaatgacttggaagtttgaccaaatgctcccacaaagctgagttgaatgcttccaggcaatctaggtatctacttttaaaccaacctatcgggagtctgtctgtttactctgacctcaaacaagggcgcctgataatccatcacttacatacttttcttagtttggctttagtaatcctttccagaagaatgtacataaataaataaataaaataaatagggtctgaagaattgcataagccctctttgcacaacacttgaaataaatcttaaaaaactgaaaaaaaaaaaaaaaaaaaaactcgtag

SEQ ID NO: 63 - DNA, 813 bp, Homo sapiens
  misc_feature (30)..(30): n equals a,t,g, or c
  misc_feature (54)..(54): n equals a,t,g, or c
  misc_feature (81)..(81): n equals a,t,g, or c
  misc_feature (97)..(97): n equals a,t,g, or c
  misc_feature (807)..(807): n equals a,t,g, or c
tttttaaccccttttagggcttccggggcncggtatggttggtgtgggaatttntggggcgggttaaccaatttcaccccnggraaccagctatggnccatggatttasgccagctcgaaattamccctycactaargggamcaaaagctggagctccaccgcggtggcggccgctctagaactagtggatcccccgggctgcaggaattcggcacgaggtttaggaggaatacaattcaagaacctcactttgaagctaaccatagcaaacctagtttacctctagaatgcaggtgacagtgtgcaaccactcctgtcatctgtcttttgtatgctcttcataagcaatcttcctcttccttcccagttcatttatttagcctctgattcattcttctcttctcccacccctttctcttctaccagccagcctaccaatacttattctctctgaaaggatcttatcctttaccagaagttcagttattacctctaagaaccagtcccttcccttttaaattttcttttccctgaaagagtcagttttatgtattagaaaaatgaaggtatatgttttcctttaaagggattataatcattacagaaaattttaaagttttcaaaaaattaaaaaaaaaacccagaatttcccaaaacctgactatccaaagagaagcacttaatgttatgtgtgtgatcttgagtgaaaatttaaaatttatattagaacattttataaattatccaaactttttgtacgaaaaaaacagaaaatgtaaaaaaaaaaaaaaaaactcgaggggggncccgca

SEQ ID NO: 64 - DNA, 1896 bp, Homo sapiens
  misc_feature (933)..(933): n equals a,t,g, or c
  misc_feature (940)..(940): n equals a,t,g, or c
ggcacaggaccagtggagtgagctgttcatggatgcgctagggcccttcaacttcgtgctggtgagttcggtgaggatgcagggtgtcatcctgctgctgttcgccaagtactaccacctgcccttcctgcgagacgtgcagaccgactgcacgcgcactggcctgggcggctactggggtaacaagggtggcgtgagcgtgcgcctggcggccttcgggcacatgctctgcttcctgaactgccacttgcctgcgcatatggacaaggcggagcagcgcaaagacaacttccagaccatcctcagcctccagcagttccaagggccgggcgcacagggcatcctggatcatgacctcgtgttctggttcggggacctgaacttccgcattgagagctatgacctgcactttgtcaagtttgccatcgacagtgaccagctccatcagctctgggagaaggaccagctcaacatggccaagaacacctggcccattctgaagggctttcaggaggggcccctcaacttcgctcccaccttcaagtttgatgtgggtaccaacaaatacgataccagtgccaagaaacggaagccagcttggacagaccgtatcctatggaaggtcaaggctccaggtgggggtcccagcccctcaggacggaagagccaccgactccaggtgacgcagcacagctaccgcagccacatggaatacacagtcagcgaccacaagcctgtggytgcccagttcctcctgcagtttgcctttcagggacgacatgccactggtgcggctggaggtgggcagatgagtgggtgcggcccgagcaggcggtggtgaggttaccgcwtggaaacaktkttcgsccgcagytcctgggactggatcggcttataccgggtgggtttccgccattgcaaggactatgtggnttatgtntgggccaaacatgaagatgtggatgggaatacataccaggtaacattcagtgaggaatcactgcccaagggccatggagacttcatcctgggctacyatagtcacaaccacagcatcctcatcggcatcactgaacccttccagatctcgctgccttcctcggagttggccagcagcagcacagacagctcaggcaccagctcagagggagaggatgacagcacactggagctccttgcacccaagtcccgcagccccagtcctggcaagtccaagcgacaccgcagccgcagcccgggactggccaggttccctgggcttgccctacggccctcatcccgtgaacgccgtggtgccagccgtagcccctcaccccagagccgccgcctgtcccgagtggctcctgacaggagcagtaatggcagcagccggggcagtagtgaagaggggccctctgggttgcctggcccctgggccttcccaccagctgtgcctcgaagcctgggcctgttgcccgccttgcgcctagagactgtagaccctggtggtggtggctcctggggacctgatcgggaggccctggcgcccaacagcctgtctcctagtccccagggccatcgggggctggaggaagggggcctggggccctgagggtggggtaggcagatgggccaaggtgaccaccattctgcctcaatcttttgcaagcccacctgcctctctcctgctgctcctccagctgtatctgcacctgcctctctgtcctggccaggggtggacaactggggtcccccaaaactcagtcctggcacctcaactgtgacaatcagcaaagccccacccaggcccccatctgggatgatgggagagctctggcagatgtcccaatcctggaggtcatccattaggaattaaattctccagcctcaaaaaaaaaaaaaaaaaaaaaactcgag

SEQ ID NO: 65 - DNA, 1276 bp, Homo sapiens
ggcacgagtttccgttccaggatcttgagtacagacatatgtggttttattgcactttgctttatcatgctttgcagatattgtgttttttacaaattgaagatttttgacaatcctatgtcaagcaagtctattggtgccattgttccaacagaatgtgctcactttttgtcacattttggtaattctgaaatatttcaaaagttattattaatctgttatggtgatctgtggtctttgatgttaatattgtaattgtttgggagcacaacaaaccatgcccatgtaggttgcaaacttagttggtaaatgttgtgtgtaatagttgctacaccaaccagctgttccccaatcactctccctctccttaggcctccctattccttgagacaaaataatactgaaattaggcaaattcacaaccctataatggcttctaactgttcaagtgtaaggaagagtcacacatctttcactttaaaccaaaacctagaaaggattgagcttaataaagaaggcatgtcaaaagctgagataggccaatagctaggcctcttgttccagttagccaagttgtgaatgcaaaggaaaagtccttgaagaaaactagaactactttagcgaatacacaaatgataagatagtgtgacattctaattgctgatatggagaaagttttagtagtctggataggagatcagccacaacattctcttaagccaaagctaactctcttcaattctatgaaagcttagaggtgaggaagctgcagaagaaaagttggaacctggcagaggttggttcatgaggtttaaggaaagaagccatcctcatagcataaaagtgcaaggtggtgcagcaaatactgatgtagaagctgcagcaagttatccagaagatctagctaagattattgatgaaggtggctacactaaacaagagattttcagtgttgacaaaagggttttcttttggaagaagatgccatcttggctttgaatagctggagagaataaggaaatgactgacttcaagggacaggctatcttgttaggggctaatgcagcaggtgaccttaagtcgaagcccatgctcatttaccattctgaaaatcttagggcccttaagaattatattaaatctatcctgcctgtgctttataaatagaacaactaagcctggatgccagcacatctgtttatagcatgatttactgaagattttaagtccactgttgagacttactgctcaaaaactaaaaaaaaaaaaaaaaaaa

SEQ ID NO: 66 - DNA, 1807 bp, Homo sapiens
  misc_feature (1807)..(1807): n equals a,t,g, or c
cccgggatcgacccacgcgtccgctttacatatcatactttggggttaaaggagattcctcagactcatccagcccttgggtgctgaccagcagagtcactagtggatgctgaagttacatgagctacatgttaaatatttaaagtctccaaaataaaacaccccaacgttgaccttacccggctgatggttagccccttgctgcctgctccatgtgtcttatgagagcccgtagttacagtgtcctctaatttgaaatccataagttaacaagtctatatcaggtgcagctggctttgattaaaggccatttttaaaacttaaaaactcaacacctcacagattataatagaaaaagaaatggcctcagtttgatctcgttcagaatgacccagattgtttctgctttgggtgcagctgtttagttcagagttatattacagagaattattttctgagataatcttaaactagaatgttcaaaactaattgataattgaagtatcaagatacgtagaacacctcagagatttttcttcaggaacttccacaaactttgaatccttgtatctttatttggtattcatactactagtagcaaaatacaggttttttgttttgttttgttttggcttcatagagtatctcaaattgaaacttttctgcacaaagaataaaattaaggattttataaactcaaattggcacctactgaattaaaatacataaaatcatttaaatataattcagcatatgggaagtaacattgcactaatatggaaatcactgccagagacagtctattttcttttaatttgttactacttagtcacaaaccccacattattccagtttggaattacttattaaggagaattggaaatacatatgcccatgcttaaattttatagctttaatttgtgttatttctttattgacgggaagaggtacatctttttttccttactgaaaacaaatatggattaattgcctcaaatttgtataagtgattggctagtgattcttgttttcagaagggagagtggtatagatagaaaatgacaaagatggcaatatacacttaatgttgttattgtatgttgttactgaagtacttagatttttaaaatttcaaatcctaaatcacttcttgtaggagggttttcattaactgcagtatatacagttcactacatatgggttgtttgagttttttgtgtgctgtatttctttctgttttttaatacctggttttgtacatatctaactctgttctcttttggttgttcagaaactggattttttttttcttaagcagtgcttaatttgtgttttttaattttgattcagaagtagtcccagctcataggtgttcatactgttacatccagaacatttgtcaggctctctgtcagctttcatgtacatatggtatagaaaccatggagttaggcacttcctggattttttttttatgagaaaaatactgtatttaaaatgtaaaataaacttttaaaaagcaggcactaatatatatttcttccagcctttgattacaaatttgtccttgcacatgttaagatgaattatctcctaaaaatatcattgttcttgggagcagtgtatgttactttacatagcagcggttcctgtcatgtgttcatgtcagaatatttttggttttaaactttcttattgcctttggctgttgattagtacagtacaagtgcgatttcaaaaagatcttgaaagtaatatatttaatcaattaaaatgtttatctgtaaaaaaaaaaaaaaaaaaaaan

SEQ ID NO: 67 - DNA, 1732 bp, Homo sapiens
  misc_feature (6)..(6): n equals a,t,g, or c
  misc_feature (56)..(56): n equals a,t,g, or c
  misc_feature (83)..(83): n equals a,t,g, or c
ttaaantggtttttggggttttattcccaaaggaaaaccttccaccaaaggttacntatttacctaggttcaaaattatattntttaggaaggtgccctggatttttggtcaggagatttcttacmaaccatwttaaaaamcamactttgaaaagtmtcctactaccagaagcacttagactatcacagaaaaatacatgaagagttaatgtctgagataagaccagcagcttatagttataagaaaaacacactgtacaatgtttgggggggaaatctgttgtttatagaaaagctttacctttttcttatttatcctcagataacgttgtgaaatctgctcatcagtaaggatgatatggaaagaattctctttttctatctatggtttatttacatattaaaattttactcagtttattaagtacacatatgataccacactagatgcaaatatatatacaggctatgacagtcaatgttcaatttaatactggtcaataaagtgaatttattcaaatgtaacaacttcacttgaattttttggatcacacatatcctatataaagccatctggtttctaatattatgcacaacacattccattttaattataacattcatctacaagaaaaacaaggaaaacaattcaaaactatgttagtaattagttcttgtttggtccattgtacgcaatcaggraagtataggacttaattagttgctatcaaattgaagcmatgaaaaaggtaaaaatcaagtacttaaaataaaaatatggaaataaccccccctccccaatactwwagggacacwwaacaacaactactgtcccatcaagcaaaagtggaaaacaaacagagcatgtgtgtaacctcacttaccatctttttgttattctacttcaacgggtcaagaaaggtgaagagagagaaggtagaagtaagagtcagaaaaggcctaaataaaatcctcactgaaatgtttaaacatacaagcaatagagacaattaggttgaggtcagatgcagtactactatatttaatggagttaataattagggccaaattaacatggacagttattcctgaatgcaaattaactcattaaacgatttaaatttccatttttcagtctaccacattttagctaacaagacacaaaaagtataagtcaaaatactaagcacaggaattccaaaaagtaagcttctttaattcattactgaacttaagaactttaattaagaaaaataaatgataacagcaaaggtctagctgagtaggcagagtgttagatagctcagggttgtttttccaagctctagtgttcaagttaaatttatttgacacaggtatcttttgctgktttctactcgaagaataatttaacttgataggcttacaagattgcacagagtgaacagaattgagccaatagaatacagaatgacaaaccatacmagcaaatgctgctagggaattccttggcaaaaatgktttattagcatactgacaaatttgatttctatcacttggccttaaacacgaagaaagtgggcatgaagagatgtgtagttatttgtgcctatgttggaaaataaatttatggctatacatgatatttcttcatacctcaaaaattttattgtccagtatataaaaaagccattctttaaaaacctgacactgaataaaaagtatagccttcaacttcattaaaccggcacga

SEQ ID NO: 68 - DNA, 1052 bp, Homo sapiens
gctgccgtgtgcacggccgtctggtctctctcccacacgtgtgcgcaacctgtcatggagatgtgagggccttgtgtgtgcttctgtgtgtgactgtgtgactgcgggtccagacccccgcctggcggtgatgtgggcccttaaatcactcttcctgctcaccccctccccagtgattcggttttactttgcagcactgtggatccgggcagctgggcggcttctcgggggtgggggatcccccaccccgcccacaagtctggccccagggttctcggaggcagggggtctctgttagtgcgctccctccagctgcaggcacatagcccgagctcacagctcgcctgagtcgacgccggctggggtgaaagctccaagtgggcctctggccttcccgctgctctgggtccagagtgtctggagcatgtggcacagaccagggccccttgtcctccgaggagggtgggacatcctctctgtctcacgcccctgggtggagattctggctggcctcctctccctgtttgccaaggtcaaagtgggccaagggtgcaggtgcttagcctggttccctctcccgggccccgaggttctgtgggttgggcagattggagacaggactcgtgtaagggctctgctggggtgaaggatggagacagagaaaatcaagatcctttcacaagttaattctacgtctgctgagccccagcccccgacacatcaccctgaggaggtgctaggcttctctgggccccctgtgccccatccacatgttgcagagtaaatctggccccttggacctggggtccgagatggacgcctggctgcccctcctggactgcgggtgacagctggcgagacactgcggggcttgggtgcggggagatggagtggggctgagctgcatttttccagccaccccacatcccacagaaggggagtcatggtcagtgccttgagctggaaagacgggcaatgcttccggcccacaccaaccaagaaaaccaccaggggctcattcatcctctcaaaaaaaaaaaaaaaaaactcga

SEQ ID NO: 69 - DNA, 992 bp, Homo sapiens
  misc_feature (405)..(405): n equals a,t,g, or c
ggttccagcccaccccatcccacacccacctggctcatgtctctctgacctcagttcccgcctgcacccccagggatgggtgggaagggtctagaaggtatggacctggagtgggtcacttctgggtggtaatctggctagtcagaagcatgagtgatcgaatgaacaagaatgctctgtaaactctgagacctttggaggctgcagagggagaggggagcagaactccagagatctgcatcttgtcagaggagtccatcaagctgatttggggagaagtccccgcactcccccagctccccggctctcccagcagctcatctacctgcccccaccctggggcacctgcaaagctgttaccatggactcggatttggatttcttcgactcctacagcatcactgnctgccgcatcgactgtgagacgcgctactggtggagaactgcaactgccgcatggtgcacatgccaggtcaggcykggggytccgagcatactcctggggtcctgggsctttgctgccyttcactagctccccatccatatcaatctcccttcccatcttctcccagcttacaccttctaggcctttggtactaccaccatcaccagaccccttgaattcccatcctgcatcattgtcttttctcctctgtaggggatgccccatactgtactccagagcagtacaaggagtgtgcagatcctgctctgggtgagcgcccctggcctggggcagtctgggggagggaaaaggtgctgccagccacgtgcgcaggagtttcaggtcacgctcccagaagcctcacataactcctggactgggctgcaccctctcttgtgtctgacattaaagctgagaatggtcagtcatggtggcttacacctgtaatcccagcactttgggaggctgaggtgggcaaattgcttgagcccaggagttcgagaccagcctggtttcatggtgaaaccctgactctatgaaaaaaaaa

SEQ ID NO: 70 - DNA, 1229 bp, Homo sapiens
ggcacgagaaaatacaaaaattatccaggcgaggtggtgcacgtgtgtagtcccagttactcgggaggctgaggtgggaggatggcttgaatctgggaggtgaagattgcagtgagctgagatcacaccactgcattcagtctggataatagaacaagactctatctcaaaaaaaaaattgtatactttattgactcatttatgtctgatgggtatttttgattacaaattgtttagtcactactttaaggcctgctttatttttttcttaattttattgactcatttatgtcttagtcttttttattacaaattatttattgttcagtcactaccttagagcctgttttattttttcttaattttattaaaggatgatattgatgatgaaatgtcttacgatgatcatttagaggtttattttgaacaactggcaattccacgaatgatggaataaaacatatgaagtagaaggactggaacctccagaaaaagtactttaagttacctacaggtgatcctagtcaggtatgaattgataagaaatgcctgcaccttccctccttcctatctttcccttgcctacagaaaattaaaaggcaaaacaatggacatctacatattcttcattcagatcaaccagtggctagcatttgccaccttttgcagtttctttctctttccataagtactttcttctctgaatcatttgaaagcaaatgaaaacagtagcctaaagtgtcagtttcaaccagaaaataacagctctgatttctcatggctcacactcttctgaaacgactcgggtagaggctgaggaaggccgtgttgtttgtctacctgggactagtaagtatagaaatagaattcctttgttcttaaattctacctttgactttacttttaaaatataatttctttggtacgatttagctcatgcctgtaatcctagcattttgggaggccaaagagggagaattgcttgagcccaggagtttgagaccagcctggacatcatagggagactctgcgcacgcacacacacacacacacgcgcacgctaaccgggaatggtggcatgcgactgtggccccagctgcctgggaggctgaggttggaggatcatttggacccaggaggtggagactgcagtgagccatgattgcaccactgcactccagcctgggtgacagagcaagaccctgtttcacaaaaaaaaaaaaaaaaaa

SEQ ID NO: 71 - DNA, 2280 bp, Homo sapiens
ggcacgaggaattatgaagttgtgtgccccatgatggggagtggactttgagatgagacactggcctgcattataagggacctgtcatttccactggattttagtttgtgtggcttaaagagaatgcctttccagttaggtatgctcgtggctttgaatataaatgggaacagtctaacgctagctattttgctcctttccttctgattcccagctggtggaaatcggtgctgcgtactcagcaaccttacatagggcaggtatggtctcatgagctgggagcaagacaggttttctttcttgaaatgaggtccccccacttccctttgtctttgctgctttgctgctttctttccattgtcttgctgctttccttccttggatctgtagacactcagagaactgcctggccagaccctatagaggtacaattaggtcactctagggcatctgaccatgggtggcagttttccacaaaattcacttgttctgtgggttgaaggaaatatcaaaccagctggcaagttctaggcctcttgtcttcttggtatcttctagtcaaatttacagtatatcccttctgatttaatatttgcaggaaactgatgcatggagatgctgacatcccacgtgttaattctggggcaccctgatcctattctctaggatggcattgcccctttctgagccatcaatccaagtcctttccccgtatttctatgtggttggtatataattcagtgagacactctttcttgctcctgtacttgaatgtaggagtgtattgcagtggccctgaagatcccagtagagtctggggagggttgattaggacagagtgatttccaccctgcccctcctcaagcagaggagctttcttcaacctttttctctttgaagaaattgagactcagggaagaagtattgtcgcagatgtgatgcggtgagtcactggtttttaaacctctgttttggcgatgggctgggtatggatgagttaaggtttattcccctaaatctgtattacactctaagtcaacattgtgtccttaggctgggcgcagtggctcacgcctgtggttccagccctttgggaggctgaggcgggtggatcacaaggtcaggagatcaaggccatcctggctaacacggtgaaaccccatctctgctaaaaacacacacacacacaaaattagccgggtgtggtggcaggtgcctgtggtcccagctgctcggggggctgaggcaggagaatggcgtgggcccgggaggcagagcttgcagtgggctgagatcacgccaccgcactccagcctgggcaacagggcgagactccgtctcaaaaaaaacaaaacaaaaaaacaaaaaaaaccattgtgtccttaaattgaatatccttgatagaaaagggtagggccttagcgtactggctctatggaatacgtactctctgtctttcagtagaattcagcagtcattgttcacctgctttttgccagatgttgagctaattgctattggagtaggatggtaaagattggtcttggtatgcttggttgagaaggcacaactttttacacatgtgggcctgcaaatatctatgcagatttttttgagactttaaaaagcatgtttaaaagattatttcttctaatagagactccaaaagtactcaattactgtcttatcctctgggatcctagttcctattacttgtgcttgatttccctctgctgattagataagttaccttgaaagaggcaaagaaagccaaatgggaattgacttgtttttcttcctgtcattaaaaaaaaatggaaataatttcaaatttatagaagttatacaaataaaattatacaaagaatatttgtaatcctttttatccagaacctcctattgttcgtgttcattttaccccatttgctttatcatttgcacattctctctccatgtatcaatacataattgttttctgaatcattaagaggagagataattggcccaggcacggaggctcacacctgtgacctgagtactttgggaggctgaggcaggaggattgcttgagcccaggagttcaagaccagcctgggcaacagagtgagatcctgcctctaccaaaaaaaaaaaaaaaaattagtcagacatggtggcatgccgctagctactttggaggctgaagtgggaggttgagactgcagtgagctgtaattgtgcactgcgctctagcctgggttacagagggagacccttgctcaaaaaaaaaaaaaaaaaaaa

SEQ ID NO: 72 - DNA, 1811 bp, Homo sapiens
  misc_feature (1804)..(1804): n equals a,t,g, or c
tccacggattctctgccacaaggatatgtggctcagtgtggtcaagttccttccaaagaacctgcacttggtctgcgtggacatgccaggacatgagggcaccacccgctcctccctggatgacctgtccatagatgggcaagttaagaggatacaccagtttgtagaatgcctgaagctgaacaaaaaacctttccacctggtaggcacctccatgggtggccaggtggctggggtgtatgctgcttactacccatcggatgtctccagcctgtgtctcgtgtgtcctgctggcctgcagtactcaactgacaatcaatttgtacaacggctcaaagaactgcagggctctgccgccgtggagaagattcccttgatcccgtctaccccagaagagatgagtgaaatgcttcagctctgctcctatgtccgcttcaaggtgccccagcagatcctgcaaggccttgtcgatgtccgcatccctcataacaacttctaccgaaagttgtttttggaaatcgtcagtgagaagtccagatactctctccatcagaacatggacaagatcaaggttccgacgcagatcatctgggggaaacaagacgcaggtgctggatgtgtctggggcagacatgttggccaagtcaattgccaactgccaggtggagcttctggaaaactgtgggcactcagtagtgatggaaagacccaggaagacagccaagctcataatcgactttttagcttctgtgcacaacacagacaacaacaagaagctggactgaggccccgactgcagcctgcattctgcacacagcatctgctcccatcccccaagtctgacgcagccaccactctcagggatcctgccccaaatgcggtcggagcgccagtgaccctgaggaagcccgtcccttatccctggtatccacggttccccagagctttggggaccacgcgaaaacctccaagatatttttcacaaaatagaaactcatatggaacaaaataagaaaccccagccatgaaatctaccatgaagtcttcaagttcatgtcactgacaagcttgtgcaaagcagccaccttggaccataattaaatcaaggacattttctttgagacattccttatagttggagactcaagatatttttgttgcatcaggtgtattcccttgcatgggcagtggcttttataggagcattagtcctcattcgctgaaccctgttgtttaggtctaatttaagttttacatagagacccatgtatgactgcagcccattggctgcaagaccagggaggaaagtggcaagctgtagaaaatgtttacacgcatggaggggcattgctccagccctcagagcgtccggagcagcaggrtacatgggtgggaggttcattcagcacccaccagtcaggtatgttctgagtgaacccacagcagtcgcagaatgagcacctggcagggtgggtttcctaggaataatttattatttttaaaaataggcctaataaagcaataatgttctagacatctgtctaagtaatcagactcaggttccacacacaagcaacaactcgtgggcctcttttctatttcaatgtgctactaagaacccttggatgtaacatactagttagttaatgaattctgtgaattctgtgaagagtaatgtgattgaaaataagtctaaacagctgtaaaagtgaccacaatgacatgaaataaatttaataagtctagatcagcaaaaaaaaaaaaaaaaaaaaaaaaaaaaaaaaaaaaaaaaaaaaaaaaaaanaaaaaaa

SEQ ID NO: 73 - DNA, 2534 bp, Homo sapiens
  misc_feature (174)..(174): n equals a,t,g, or c
  misc_feature (1350)..(1350): n equals a,t,g, or c
agcaactctatagatcatagaggaaacggtacctgcagtaccggtccggaattcccgggtcgacccacgcgtccggcatgcatgggaatagcggccctggaggatgttagacttgctccctctccaagacagcagcagcctgcacctgccccgtgtgtgtggccggcctcytcntcacccttcccggcccccggccaaggacccaggcgctgcatacaggggaggggcgcacccacagctggggccggttttcctcagctctaggctgttctgtagcttatctgcccctcccccactttcaagacagatgagcaggagcttgggtctctctcggcccctgtctgttcccagcccctgcagattctgagcaaaggccctgggtaagaagggtgggagtggggcctttgccagcagagccagggcagggcgagctgcaggaatcacccctctgcccctgcagctggaatgtgccacagaggccccacctgaagggtgatgtgctggaggggtggcccagagccatactgcgtccaccctgagctcggggacaggtgacagtggctgctctgggaaggggcttttagatgtaacctacaattcagttaggctagagacagatgctggtggaggaagggctgggccaccagggatcacagaccacaggaagatgggaggtggaagcagaggccctgcccccaccccttcctgtctcactcttctgtcttgtccccacccatgcgccttcgtgcctgagaccagggtggccacacaggcagggcctggctccagtctcatcctcccattgcccagtgagccctgctcttctctccccagccccctcccaccgctgcctcgtagagtgacctcggacagagcccccctagcaatacagggaggctcccggggcctggacaggcgggctcggaggctacccgctgtggccggtgccagctgcccttgcagggtgggtgagctctcaggccgagagccttatttacctagtgcaaaaactgtaaaagtgtacagactcttcacagatttttatcttaattgcaagtctgccgattttgtaaatgttcttggtgtttgactgtaatgtaactatctcacctaatggttgtacatatcctttggtcctggtgctgccgagggctggccgggactgctgctctcccaagggttttattttatttctgaatctagagaacagtattgggcaggaggaaaaggcttggtgtctgcggggggtgtcttccctgcctgtggcatttgtgtgttggctttgcagctgctgtctgagtagtggccactggggtgccttcactgggccagtcaacggggggctcctgnccaggccacagagaacctgagttcccgggagctgggccctgcctgcagccagggctggggttgccagaggccctggagggaaggacagtccctgctggggaagaacagccccggggccccctggtcaccgagactcagcctctgctggagaaagccacgccctccctgctagcacagaggcctgactgacttttttgcttaacttccatgttctgggtgatggaaactgccaaacctcctgtcagtgaggactctttccgactgcccagaaagtgggggtggaggaccgaggctacagctccacacgccccggtcccccagagcatctgccccaggtacacctccccctgcgccccgcacgactgcgggagccagactgtccagggaaacagcctctctcttttctacacactcagccacaaagccccccagctcccacaccgcgtcccagctcccctcttttgtaagtatgtgaaaaggaaaaaatgcaaacgttggagtttgggctggagctcctccctccagctgcgacttttaactatgtaataatgtacagaggaagctgttggtgttctaagactctgtgtggctgtgcaatttctgtacatttgcaattagaaatattaaagatttatttagctattttaaaaaaaaaaaaaaaaaaaaaaactcgagggggggcccggtacccaattcgccctatagtgagtcgtattacaattcactggccgtcgttttacaacgtcgtgactgggaaaaccctggcgttacccaacttaatcgccttgcagcacatccccctttcgccagctggcgtaatagcgaagaggcccgcaccgatcgcccttcccaacagttgcgcagcctgaatggcgaatggcaaattgtaagcgttaatattttgttaaaattcgcgttaaatttttgttaaatcagctcattttttaaccaataggccgaaatcggcaaaatcccttataaatcaaaagaatagaccgagatagggttgagtgttgttccagtttggaacaagagtccactattaaagaacgtggactccaacgtcaaagggcgaaaaaccgtctatcagggcgatggcccactacgtgaaccatcaccctaatcaagktttttggggtcgaggtgccgtaaagcactaaatcggaccctaaaggagcccccga

SEQ ID NO: 74 - DNA, 1305 bp, Homo sapiens
ggcacgaggggattttgggcccaggagaaacacttacattctggtgccttgtcttttgcttgtacagaatctgtagtgattttggtggccagtaaatgccagccatttctcaaacccacctcggaccacccagagtttcctcttggtccctgtctactaagagtcatgaaggcagggtgctctgcccactccatcaccatgaagcctgggattgggccacgaggaacaaacagcagatgcccttgccttccagtccaagaaactgcttcttgaaatggatttaacaacagccactcaccttttcctcctgagcctgctctctgatcagctggatccccacgtgagcaacagctggcccaggaaaggctgcctgcagaggacaggtgtgttgggcgtgttgagagccttgaagtgactacctgtatcttagatctgagtacaagcctgaggcttttgcttttgtcttttttgatgagggctcactccagcttcatatggtgccaagacgttgctgcttctgaggttggctctaacatctctggtctttagagccaccagatctctctggcccatacagatatcagagcagacggaaatttctccctgcaagcgctcagtctcatcccagcaagtcaaagacctcctggccaagtcctgccctcttaagtctccaggaacgctgcagggaaaacccagctgaggcctgggctagactgtggtgaggtcactagattctactgctcttcccccacattaataccttttccttcctcagagagaaatctcccctaacctgaattgcagccccctccagtttgctttcctttggccttccagaccccaggaagttggccttcccttcctagtgctatggtttctgccattggccatgatttcagggagctggctgaggccggctgaggccacacctgtgccagtggggcttccctggtgctgcagcacttgtaaaccacacacacagcctctctccctggacatacgttagcacattggcattcagtattggtggcctggcatggtaggtactacccaatgaagagtgtactatatattttcattactataggccatacttatacagacgtgtatatatatttatataagatctacctatcttaggatggaaccttggggaaaaataaaattgaggggaagtaaaaagtatgtaacacttccagttgtgagccaagattgtaaccagagagcagccaggagcttcctgtcagtaaccatgttttcaataaatactctttcatgtaaaaaaaaaaaaaaaaaaaactcgag

SEQ ID NO: 75 - DNA, 1434 bp, Homo sapiens
ccacgcgtccggggagattgagttagagttgtgatgtttgggctagaggatgacaagatgagctgctttgtcggttccagatatctccagcccagcagagatggccctctgcagtctagccgtattttgcccttccaccattcttggctgtgacctggtccagctgggccctgaatgaatgtttgcttctcaggccagtattctcccctcctcaccaagccacctccacacagctctaaggaagctcccccaggtccaggcctcaggggagccctgccctcaggccgaccctactgccttttcagagccctccctgccctcctcggaagttgctgatgaacctcctaccctcaccaaggaagaaccagttccactagagacacaggtcgttgaggaagaggaagactcaggtgccccgcccctgaagcgcttctgtgtggaccaacccacagtgccgcagacggcgtcagaaagctagcaccatcccggccctccgcctcctggccctgcctctatttattgcattctggttctggccgcgccgcgttgctggggtaagggcaagcactggggtcaagagcctgcacacatgagccttccgggctggaaggctggcgtaggacttggggctgtagcatcatcttcctgaccctggcacctgtgtctacttgctcccgagaagaggagcgctcatgtcttttttgcaccccaagttggctggagcatcggccaccccaagattcatctgtgacctccaggcagcagtctctgctccagaatctctggacggagctgctggcagcttctgcgagaagagagagatgtggaaggcaccttttagaagagagcgtgcctcaggttactgaacttgaacggagactgtagactcccggactttcccctaggactgggggccctgtaggctgctgttggaggactgggtagagacattggagggaagggaagggcttttctccacacaagggcagagagtccgtctagatttcttgctgtcctgccagctctgcccatgcctgaggtggtcctacctctcacgggcaccctagctgctgacagccctttgtggccgccgtccccatcccctgccctcagcacacacatctgcacacacgcagctttgttctcacctctacctgtcattccagcatccctgcctcttgtcacaaactgccccagcaagaatttgaggttctgacaacagtacccatcccccacagtaccccttcagctcagtttctagaaagctcccttttctttgaaatctgcatgttgaattgaactttgtgattttattttttgtttcaaaaaagtttaagaaaatggaaatgggcaacagtgagtgaagacatattttagcactgaatagaatatttttaaaattaaactatttgaaatatgaaaaaaaaaaaaaaa

SEQ ID NO: 76 - DNA, 910 bp, Homo sapiens
  misc_feature (17)..(17): n equals a,t,g, or c
  misc_feature (857)..(857): n equals a,t,g, or c
  misc_feature (862)..(862): n equals a,t,g, or c
  misc_feature (883)..(883): n equals a,t,g, or c
ggtccggaattcccggntcgaccmacgcgtccggccgccatctcaggtctcttggctttgcagggcccaccggagaaaactgacgacccgtttctgtaatccttatgggagaccaaccttgtgcctccgggagatccactctcccacctggaaacgcacgggaagccaagcctccaaaaaagcgctgcctcctcgctccgcgttgggattatccggaaggaactcccaacggaggtagtaccactctaccctccgcacctcctcctgcatcagccggcctgaagtcgcaccctcctcctccggagaagtagagaaataaatttctcccaccctaaaccagtctttgagtgattgcagtatgactccatttccctggtgcattcatataatagttcacctggtgaaaacaatgaagattatttacaatgctaccctgctttttctggtgtcctgaacctggaagttgtgctttttaagtcttatgatgtaatcagcacgatttcacttcctgaatttcgatgaattctaagacatgggcaagatcgggttgtaagacctctgagatttaaggccatgccctggatcatggtgaacttaccaaagcaaacaatgcctgtgagatggtcctgcagcagccaaccagtgaactcttttggtgacatcctgttcttgttgtataactttatattcctataaatccattaaggccccaataaagtttgtctctaaagcgctgtgttagatctatatggactacatctagtaaaattgtgaattttwaagtaaatattttataaggaactcctatgtaaagcmttacttaaaattargtgttggaaatatggaccttctttccnaacanttattcatttatttatggtcntatttattccattattttaggggaaaa

SEQ ID NO: 77 - DNA, 1588 bp, Homo sapiens
  misc_feature (1586)..(1586): n equals a,t,g, or c
ggaagggccaggggatcccgcggcggcgccacggaggcggaggagcaggcggtggaggcgaggcaggaagaggagcaggacttggatggtgagaaggggccatcatcggaagggcctgaggaggaggacggagaaggcttctccttcaaatacagccccgggaagctgaggggaaaccagtacaagaagatgatgaccaaagaggagctggaggaggagcagagaactgaagaataacgaaktatccttagcgtcctcctaaaggcttttccttttggcatcttaaaagcttgagagataaaacggaaaccccagagaggagtctgggcaggctcccagggtgcatgctgcctccataaatctgctgagctctagaccctcaatcaggacttgtcccttggctagcaggatcctgggaacacctttggccctgccctgtgtagagatgttcatgtctgttcctgtgggtcactttgttaagctgaagagttttaagaggtagagctcagaccctggactgggatttttcttaccactcaaacttgctatccacacaccctgcacaccttagataaaaagaacattttaaaagcagagttcactttcactccagtctcccctcttttgccctcactgaagccaaaccacagaagactttgaggaatgagagacaaatgaggtagagctcacctgtgctcaccagctccgtcagggtggtcagccgacccctttccctgggaaccccacttctctctgtggctggcttggttgtcgggggtgagatgccatattgattacagggcagcaaagaaccagtaccaggaatttacttgaccattccccttatttttcatctagaggaatctcggattcagccctttcattgctaagacaccttttcactgaggttcttaccagctcagccaaatctccactctgctatagcagaagcaataatgtttgctttaaaaagatttcttgacctatgccttttcttagaaagtttgatagattagttagaacttcagatcatcagatcagtctcaaatgggtttcttggaattttatatttgacaatatttatactataccaaactcatttgcagttcttaggtttgttggttaaaacatttttttaaagcagtaagtttatagaaaatgttttcatttaatggaaggctggggaatgtccagcatcaacccctatggcatgcattcccagtggccttctcatctgggcctggaacctttggttcagggcttaggggagaacaggccacatggcaacagccacacagtcattgccttcaacacagagccacgtgtccccaaacagcaatagtcatgcccttgtccaggctgggatctaattgatacaataggtcgttgactccctcctagtagagctatctaggtttgtctggaaagtttccgaccctggcttataggcaccacacctcatgtactcctcatggcttggatctctgtattcagcctttgttcagtccaataaactttgagtagatgatctcaaaaaaaaaaaaaaaaaaaytsggggggggcccgtacccattggcctttagggngc

SEQ ID NO: 78 - DNA, 2166 bp, Homo sapiens
  misc_feature (20)..(20): n equals a,t,g, or c
  misc_feature (2164)..(2164): n equals a,t,g, or c
ttggcacatacattacctgntttctcatcaattgctaaaycatcaaacatttattgagcatctcctctatgtagggtataagtaatgctgaggtagtactcgtgacttacagtggtaaaagacttaagttttaggccgtgagccactgcgtctggccagaaatctcttaaccatgggagttaagtctcaaaattctggtgatacaagtggttgaaacttaaaactgtatttaaaaaataggattcgtgaatttgagatagttcataagtctgcaaaaggctgtataaatacatattttacatttactattattaattttgtagtaaatttgagtacagcactctctttatctgtggaaacttcagactctcccctattactttaatttcagtgagacattattaaatataagtgggcttacacatttgttttgctttactgacaaataatacacaacttggaggcttttttttcctttctattcttcctctaaatgttcaacacttttctgattttgtgatttgaggttgtttaatagcttcctgaggctccattgagaccgtatatacgtgacacttaacagtctagccttcctcggtacatatagatatatgatggtggctttgcctgtagtaaattcatgccaaaacataggctttcagtgcctattacatatggctttcagctctctctactgagggatgtaggagtttatttctgaggtctgagcctcttttcctttacttcctttactctttcctaagccttctttataaaaactatgcatgttctattgttttcctttttgattccctttcttttattatccccagtaggagtgacttgtaattctcatatgttagaaaggcagrtctcctggttgaagaaaagatccacccaagcaagtcagcatgtttaataatttttgagggggatctcaaatgtgggaaggattgttatataagacaaccaaatgatgacatgagacaataaatgctataggaattatggaggaataattagctatttattttcttggttagggaagagatattattagttgtagaagtaattactaacttctacattttttattgtggaaatcaaaaatatatatatgaaaataaaatgttataattgacttcagtgtcccataaaccagcttcaacaattaccaaattgtgaccaatctttacacacatgcacaggtgtccctcagtatctgtggggcattggttctaggaccacttatggataccaacatctatggatgctcaagtccctgatataaaatggtggactatttgcatataacctgtgtacatcccgtattatttaaatcatccctagatcacttataatacgtaatacaatgtaaatgccatgtaaataactgttatactgtattaaggaataacaacaagaaaaatgtacatgttcagtacagacgcaattttttttgtgtgtggaatattttcattccaaggtcagttgaacccatggacataggaggctgactgcgtgtgtgtgtgtgtgtgtgtgtgtgtgtgtgtgtgtgtgtgcatacagacacacatatttctgaaatgtaaatattctctttttaaaaaaattattatcacagctaaacaaattaccagtaattcttttatcctcatatacccggtgttcagattttctagattggctcctaatttttttacagattatttgaatctgattcaattcatgtactgtaatgtttgataacttaagtaccctttataggttctcttttacctcttctttattaaattccttgtaatttgttgtactaaatagattgtcttctagaatttcctgtagtctgaattatgtagtattgtttcacatgttccagtgtcctcttatttcctgtgagttggtagttagatctagaagcttgattaaattcagattttctctctttagatcatcaactttagatcatcaacttggatcatttgtttcattttgcttttgatatgttgttttttagaattacctcttaaaattttgatttaattttataatcatgtaaaatgtttataaatttccaaattcagatcagcaaaacacaataaaatctattcagagaaggcaaaaaaaaaaaaaaaaaaaaaaaaaaaaaaaaaaaaaaaaaaanaa

SEQ ID NO: 79 - DNA, 1287 bp, Homo sapiens
  misc_feature (1281)..(1281): n equals a,t,g, or c
  misc_feature (1285)..(1285): n equals a,t,g, or c
  misc_feature (1287)..(1287): n equals a,t,g, or c
aagaaatcgggcgctatatacctgtaacaggagacagawttggacamcaaggrttttaagagycattgcccattgtaaagcattaagccagagctggttattcattatcagactarctacatactagtccatgctagtgtcagcctatattaaaatagtctttccttgccatagtgctggcgaaaacccaatcccttctgatgaaacattgcttcttgggaagacaagctgaggaaagcaatgaagatcccagtgtcggcctttattgagctatgtatgagggtcagggtccctcaactcctagtgactatgaagcagcagtgtgatsgcttcgccctctttgcccctctgtcatcaatcctttgcatgtggctattttaagcttctcagctttcttttgggaggcttcatgtgtaacttattatagaaatgttactgaaaagctgcctaaacaaaaaattgtataaagtaggaatttgtataaagtaatactgttgtaaatccatcttcaagatgtaaagaatcaatttgtaaagtgtatattttcacttctcccttcaaatttatgtgaacaagtttttcatgtttcaatattgcttacataggaatacaccttacgtttttatcagtataaatggaacatttaaaaccagtcaacaacagaacagataatccagctccctgtttgtgttctgggttaattttgcaaggatgaagggctagaaagtggtgagtttgggtgtgtttcttattttcaggataaccggctgcattgcagtagaggaatggaatggtgaggtcatttgacctgttccaggtgagtggaggccaaagaacattgtttctgcctccccttggatgggaaaattgagaaattaaaaagttgcctttccgaggaaacaaaagttattttctctatttaaaataaatgtccaaaggcacccctctaaacaccaaaacttttagctcctggcaaacttacctagctagaagttggagaagagtgcggtttcaaaccatgcttcctttctgcccttgccaatacgttctcactgactgtgattctgctgtgaacacacacacacacacacaaacacacacacaagccccttctgtgtatgatcaggacaagtagttcaacagttaataaaaaagttaaattattggatgagaaagatatatttaacctaaatcataaatatgtawatccatttaataaacactaaaattgagaaaaaaaaaaaaraaaaactcgaggggggcccggaggccaattcgganctgnan

SEQ ID NO: 80 - DNA, 788 bp, Homo sapiens
ggcacgagaagatggcggccccgcggcgagggagaggatcctccacagtgctctcttcagttccccttcaaatgctgttttatctcagcggaacgtactacgccctgtatttcctcgccacgctcctgatgatcacgtataaaagtcaggtgttcagctatcctcaccgctacctggtcctcgatcttgctctgctgtttctgatggggattctagaagcagttcggttatacctgggcaccaggggcaacctgacagaggctgagaggccgctggccgccagcctggccctcacggctggcaccgccctcctctctgcccacttcctgctttggcaggccctagtgttgtgggcggactgggccctcagcgccacgctcctggcccttcacggcctggaggccgtcctgcaggtggttgccatcgcggccttcaccaggggcttcggaggagaggtcagggctaaggccggggatgagactgcaggagagagagcagcggagggccacattcggagcctccgtccactccagttttatcagcttttgcctttttgcacggagttaaacaaattctagctctgtgtttttttcccattcccagatttactatcagttctccttaaaaagtatctaagctgttacagtagctttcccttcacttgattctattgtgtgttttctatgtttggaataattacacccaaatatctagatattttctcttcaccgcattttgtaaataaagagatgtgtatgcctccctgaaaaaaaaaaaaaaaaaaaaaa

SEQ ID NO: 81 - DNA, 1264 bp, Homo sapiens
ggcacagcgggaatgggcgtggcctgggcggggcgggcgctaggacccaccggagcgccgtgaacgtcaccgagcggcgccgaggccccgggttgagcgggaggcgcgatcggtccggtcggtggctccccgcggcggggccgggcccgatctcgggcgggaaccgagcgcagagccggtagcgggaaggatgaccacgctcacacgacaagacctcaactttggccaagtggtggccgatgtgctctgcgagttcctggaggtggctgtgcatctcatcctctacgtgcgcgaggtctaccccgtgggcatcttccagaaacgcaagaagtacaacgtgccggtccagatgtcctgccacccggagctgaatcagtatatccaggacacgctgcactgcgtcaagccactcctggagaagaatgatgtggagaaagtggtggtggtgattttggataaagagcaccgcccagtggagaaattcgtctttgagatcacccagcctccactgctgtccatcagctcagactcgctgttgtctcatgtggagcagctgctccgggccttcatcctgaagatcagcgtgtgcgatgccgtcctggaccacaaccccccaggctgtaccttcacagtcctggtgcacacgagagaagccgccactcgcaacatggagaagatccaggtcatcaaggatttcccctggatcctggcggatgagcaggatgtccacatgcatgacccccggctgataccactaaaaaccatgacgtcggacattttaaagatgcagctttacgtggaagagcgcgctcataaaggcagctgagggggcacctgccaccccactgatgcccaaactgtcagactttgggggatccccgcctagggcagtgctgcatggctgccctgattccaagtgctcttatcgcctctgtgtgtggatcgcccgccccagcccggggccgctcaggtctgcttggaggatgcctcccccaggagggcagtgagggatgccgcaacctcgacttctcagcctcctggggttccgccggccaacactgtctgtctcaaatactgtgctgtgagttgtttcaataaaggggccccaaggggctgaaaaaaaaaaaaaaaacattggggcctctgcggattcttgggctcgagggcaatttccccattgtgatcgaataaatccgaatcagggaaagcggttccgggggaattgtaaccgctcaaattcgaaaagtatgggcgaagcataatt

SEQ ID NO: 82 - DNA, 892 bp, Homo sapiens
  misc_feature (21)..(21): n equals a,t,g, or c
  misc_feature (33)..(33): n equals a,t,g, or c
  misc_feature (855)..(855): n equals a,t,g, or c
  misc_feature (868)..(868): n equals a,t,g, or c
  misc_feature (891)..(891): n equals a,t,g, or c
gaatatccctttaagctggtncgcctgcaggtnccggtccggaattcccgggtcgacccacgcgtccggatgactgtaattctccttgttaccgacgagagatcattggaagctgccttctaacactttgtgtagctctgtggagttggattttcttaaggtttaaaaagaatcacagcttcggaacttttaactgaaaatgagagacagaagccacaggggaagcaaagcaaataggattttcaatataaatatcagtgtggaaaaataacctattctgttgaatttagtgttcatgcacttgagaacaacattatttccatttactccgaaaatccttctgtgggggtttgagaaagtgaatgttgcagacatgttctgttgtgttgcactttatcctgtgtttatgtgtatgtgtttttagattaattcaagttgtgtgctatatttcttgtataatttacaaagttacacaaaatataaagagcagtaaacttgtctgaaagtttttggcaaaggaaggtaacttcaatgtaatagcttcctttaagagtacaggaaaatgcattctgtaatgaagtggggcccatgtaattgtttatattttcagttttaagcaggtatagtgcaggcttgktaggaatgtgtggaagggaagawtggaagtgatttttcctcttttaaaagtaaacaaaattcttyaaatatgccctagttaactatttcagcataccatttttacttggttaacagtgtacattttgataacctatcaggaatgaataaagtatttttatttaaaggtgaaaaaaaaaaaaaaagggcggccgytytagaggatccaagcttgcgtangcgtgcaaacganatcaggagtcgatgagtagcttnt

SEQ ID NO: 83 - DNA, 597 bp, Homo sapiens
ggcacgagcaaactctgatggattgtcattctctccagacgggctcacctttctgtgtttcctttggtggcaaaagccattatcatctgctgggaagtgccggcaagagtcctggggctgttgcagatggttctctcaccgctggagttccatccgttcttccccaaggctcatctgttctttctcttaaatatccctccatcttctctccctctttgccttggtacacatgccaaacacgttttatctgagccttcacgggagcctagttaactctttcgctgtcactagcctggccctcttgaatccatcttctggtgtgtcttacagttttctcaaaaacaaatgggttctcactttggtgtctaagtctctatgtaatctggtcccagtctccctctctctctctctctctctgtctgcctctttcgtgttgctgggccttgcatgccgtaccctggcctttgtgaaatgcccttcatctgtgctcttccctccacctggaatgtccgtctctctttttctgccaacccactcggcccctccctcctgcaagcccttgagtgtcccctccctccatgtcctgtggtggcagag

SEQ ID NO: 84 - DNA, 530 bp, Homo sapiens
  misc_feature (308)..(308): n equals a,t,g, or c
tcggcagagctcccctgcggttggaagtgttcatgcaaattccagatctgtcctggcccagcttggaggtgggccttcctgactgggccatcccttgcgagcgttctcagcccacactggctccctctgcgcaggcccctacttgtgaaggagctgagccgcactcggtgggctgtcctggggcacccatgttgtgtgttttggttttgtttattttgtatctgcctggtttttccaagtctaatcaggatgtcccctggggtgacattctttgctgagagaagggcacatgcctcggttccctgggnctgtagaaagccagtgctcagccttgctttctgccgcagacttggtgcccggagactcgctatcaaagtgcagtggagataatgtccaatgggaggctgaggcaggagaatggcatgaggcagagcttgcagtgagccaagatcgcaccaccgtactccagcctgggcaacagagcgaggctctgtctcaaaaaaaagaaaaaaaaaaaaaaaaaactcgag

SEQ ID NO: 85 - DNA, 1143 bp, Homo sapiens
  misc_feature (1109)..(1109): n equals a,t,g, or c
tcgacccacgcgtccgagccgagactgcgaaggagaacgcagcaagcccaggcggcggtggaaaggctggaggacacacctaaacatgtggaatcccaatgccgggcagccagggccaaatccatatccccccaatattgggtgccctggaggttccaatcctgcccacccaccacctattaatccaccctttcccccaggcccctgtcctcctcccccaggagctccccatggcaatccagctttccccccaggtgggccccctcatcctgtgccacagccagggtatccaggatgccaaccgttgggtccctaccctcctccatacccaccgcctgcccctggaatccctcctgtgaatcccttggctcctggcatggttggaccagcagtgatagtagacaagaagatgcagaagaaaatgaagaaagctcataaaaagatgcacaagcaccaaaagcaccacaagtaccacaagcatggcaagcattcctcctcttcctcctcctcttccagcagtgattctgactgaatacaggccctggacccttccctcaagtctcaccagttctgctctcccatcaagcttcagatgccatgttgtactgggggaatgtagcccttgtgctccccaccccctacctscacctgagcctcaccctgctgttgagccctgagtggctaggggaaatgggaagaggattgccatggcctggccatcttgttgctgcttggttagatcatatagctaatgaattaggcaggggagctattttttgaagatgatgaactaaatgttgaagacaagtttgagatctgtaaaatgtgattttttacttccacttataatacttgtgattggggaggtttgtggaaattcaattatgatgaaaaacctatcttttttgtaatgttggcatacttggggaatttagtggcaaatacattccccagcaggccttttgttggttgcactaactgcaaggttgctgggaagtagagtccatttggttgatgagctttgactgcggttttggaaccttacctctcctccttagcccaatatgctgtcttgggtcctattcaaataaagttatttctcctggtcnaaaaaaacggcacgagcggcacgagctacgtggg

SEQ ID NO: 86 - DNA, 402 bp, Homo sapiens
  misc_feature (373)..(373): n equals a,t,g, or c
  misc_feature (397)..(397): n equals a,t,g, or c
gcccccgggtctgcagtaattcggcactagcacagcctctgcatgggcccagagccgggmcccccccagcccagccccgccctccccagactccgcgcaatcacatactgtatatagacgtgaatcgattttatttttattctttaaattaaggtcgtgataaagtgttgccaaagatacctgctgaattctcgcgtttcaggaaacaaacaaacaaaaaaaaatgatatttgaggagggtcgtgttgactccatatgaaaggacacagctcaaagcttttttgtttggttgtttggggttttttgtgttttctttttttggggtgttttttttttaactgcctggtacaaaaaaaaaaagagaaaaaaaacncggggggggccccggaaccaaatnccccc

SEQ ID NO: 87 - DNA, 471 bp, Homo sapiens
ggcacgagccagcacccacttcccacaggccttccctcctcccctgcctgctgacccggcagctcccgacagcacggccttgtttcccagggaacaatgcatctgtgtcacggacaacaatgtcctttcatgtcaggcgcactggccccggtgcacgccgggacgtggcacaaagggtgctttgtgcagctcagggatgtgagttcctggctttgccatgttggtgctgccgacccggggcctctgtccttgggtcccagttatgcaacagtcagtcgaggctgtggggctggcccaggggctttatctgtctccctctccaacttttgccaagttacccttctgggcttccgccagccaggagcccacactccctcagccctcccacacgctcctctcaactcctagctgggcttcgctgacttgaacctggccgagtttgcgggctcggggctccaaggtgcgctgctg

SEQ ID NO: 88 - DNA, 467 bp, Homo sapiens
cggcacgagcctaccagtagctccctgtcagccccttcccccgtgacctgctcttccagagataacccatctgccattgtgtcaagaggggggttgagggttaagctcttctctggggaatcacatggaaagtctaggcacagttcgtccctcagagagccactgtgtgccatctccatgctctgaaggagagactccagcttcttgttttggatgtttatgtccacaaaatatttctgaatgcctttatctttatcagccaagctctccgcatggtttcgatgacctgtttgagctgtttaatctctttcctggcttctttgagtgccaactgggcctctacccggtgacactcctcctcaatccagtcctctcgcatgcgggccagctgggacttaagctccacgatttcactttccctagagtgccaagacaagcatggttaattaaaaaaaaaaaaaaaaaaa

SEQ ID NO: 89 - DNA, 943 bp, Homo sapiens
ccacggcgtccgctaaattgttctctgcatatagcaggaaaactagcatgaaatattgtttcaggccctgggttctatgtgacactacattaggaattggattgtttgggtttgctttgtgtttttgaggtagaggaagaaatgggaatcttttttttctcttccaggagtcagtggaagaatagttctctagctaaggaacggacatacctttgttttaaaatattttatacttacaaaaatctagaaatggagagggaactgttttgaataaggatttaaaatacctgcacaaggatagagagaaactatgtgactcattctgtgaaaagacttcttgcagttgtgagttatttagaaatgatcaaaatttgtaattaggctaatccatttagtgattcctaatattttgtactcacagagaactaattgactaaacaacttgaacgctagtggtttgtccttagacaatctgtctttgaatttaaagtctttatcgctaagaccttgactttaaatttttcatcactacaaccttgaatttaatttcaggtcttcaacatgatgaccttggatttaatttaaagtcttcaacactatgcgctttatcatattattcccagatgcatttttgaaatgtagtatgtaaaagtatgtaacgtgctgtttattaacaaaagattgttcacaacatctcatgtagtttaaatttgtaaatactgcttctgttttgtttctcctttatacacttgactgtctttgtgataagtgacatgaattttatgttaggattaagtatgttttcctgaaacttggattttttttgtaattatataattgagagttaagaatgaaatccttcaagtgttaaaaactcacattttaaaagcaaattttggttccaaaaaaaaaaaaaaaaaaaaaaaaaaaaaaaaaaaaaaaa

SEQ ID NO: 90 - DNA, 497 bp, Homo sapiens
ttttttttttttttattatgaaaccatgatttggccttaaaaacttaagaagaataaagtaagagttgctacaatgaagtcagaatgaaactattaaagaatggtaatggaatgatttcaggtatgagtgttattagaaacgtggctctctcttcctctatgcatcaacctgtaatgactccctaatacttatgtgataaccacactttgtctctcaagaattccaaaggcagagagaatgatcagtgattgtcagagtttgaaaacaatctcaaaagagcagtaataacttcaaattatttggaaatcccttattttaagaattcaagaaaatttagcatcatatttcctatttaagttgctacagagatatttaacatgacttatcaattaattaattataagtttccctactctgctagttttacttcaaataatgaagggaaacttataattaattgataagtcatgttaaatataagtttcccggacgcgtg

SEQ ID NO: 91 - DNA, 1536 bp, Homo sapiens
ccacgcgtccgcacatctcccccatagcaccctgccctcatgggacctgccctccctcagccgtcagccatcagccatggccctcccagtgcctcctagccccttcttccaaggagcagagaggtggccaccgggggtgctctgtcctacctccactctctgcccctaaagatgggaggagaccagcggtccatgggtctggcctgtgagtctccccttgcagcctggtcactaggcatcacccccgctttggttcttcagatgctcttggggttcataggggcaggtcctagtcgggcagggcccctgaccctcccggcctggcttcactctccctgacggctgccattggtccaccctttcatagagaggcctgctttgttacaaagctcgggtctccctcctgcagctcggttaagtacccgaggcctctcttaagatgtccagggccccaggcccgcgggcacagccagcccaaaccttgggccctggaagatcctccaccccatcactagagtgctctgaccctgggctttcacgggccccattccaccgcctccccaacttgagcctgtgaccttgggaccaaagggggagtcctcgtctcttgtgactcagcagaggcagtggccacgttcaggaggggccggtggcctggaggctcagcccaccctccagcttttcctcagggtgtcctgaggtccaagattctggagcaatctgacccttctccaaaggctctgttatcagctgggcagtgccaccaatccctggccatttggccccaggggacgtgggcctgcaggctgcaggagggcactggagctgggaggtctcgtcccagccctccccatctcggggctgctgtgtggacggcgctgcctcaggcactctcctgtctgaacctgcccttactgtgtttaacctgttgctccaggatgcattctgataggagggggcggcagggctgggccttgtgacaatctgcctttcaccacatggcttgcctcggtggccctgactgtcagggagggccagggaggcagagcgggagggagtctcaggaggaggctgccctgaggggctggggagggggtacctcatgaggaccagggtggagctgagaagaggaggaggtgggggctggaggtgctggtagctgaggggacgggcaagtgagaggggagggagggaagtcctgggaggatcctgagctgctgttgcagtctaacccactaatcagttcttagattcaggggaagggcaggcaccaacaactcagaatgggggctttcggggagggcgcctagtccccccagctctaagcagccaggagggacctgcatctaagcatctgggttgccatggcaatggcatgccccccagctactgtatgcccccgacccccgcagaggcagaatgaacccatagggagctgatcgtaatgtttatcatgttacttccccacccctacattttttgaaataaaataaggaattttaaaaaaaaaaaaaaaaaaaaaaaaaaaaaaaaaaa

SEQ ID NO: 92 - DNA, 1550 bp, Homo sapiens
ccgggctaggagacctgttctgatgatgtgtgtggtcctcaccacactgccctgcctcaccttttccatagcagtgactgaggttcaaaagagcattaatgggtccgctgatgtcttacctgatatgttacctgacctgcccgtatctctggttctgttatccctgatcatggttgatattattgaaaaactcaggatatatcctcttagagggagtcaaaagagtaagtgttcttttaaatgtgaatattttttaaagtttgatatatttttcacatttctgccactgtgttatctgacaacatgtttaatgataccttttcttagggctaacattactgatagaagattgcaaatgaagatatctaaacataattatttttaaacctaccttgatagctagatagctgcttttgtttgctattcgcattttagtagtactgataaattaaaaattatcaaatagttaataccaaaaaccttaatgtttattccagcaagaaattatccaagtaaattattatagatgtatatttttctaggaagtctcttaaagcttatgtttaaatggattaataaaaagcttagtttggagacttttactacaggaattaatatgactgtggtagttgtgtcctagataatcatgtgtttaattgtgaattataaaaatgccaaagatcacactaataaaaccaagatatggctgggtgcagtggctcacacctgtaatcccagcatttttggaggccaggatgggaagatggcatgagctcaggagtttgagaccagcctgagcaacatagcaagacaccatccctataaaaaaataaaatttaaagaaaactcaacaagatgtgtcacatctcctccaaagtgatgagttgaaactaaatacagattggcccttacaaaaagatattttgttaatggaatattttatttatttagtcgtaaattactccagcctgggtgatagaacatacctctgtctcaaaaaaaaaaaaaaaaaaggaaagaaaatttgcatgcgtgtgtgtgttgaatgtgtgtgtttgggagaagggagagcttcatcatgatcaacaatatttttgtgtgtttaagagtggtgttttatgtgagatttcatttgggggaaaaaaaagcttcctctgctaaatgtttaaaaatcattaacctagggcttcattcagcattgtaaccgcacctgtttctaggacactaccatttctatgaagagatagataggttgccaactctctctccaggcccagctccctggcaatcatgactgcaccacctagaggcaaagtgagcccccatctaaggtcttgtgactactgctgctgctctgggcagtttcagctttgtaggcagagtgacccgtcttggtggggtacaaactggcttgaggctcaacacctttgaaaaacagataaaccttttaacatgccatgttgaattttttctttccaatgttgcatttttccaaaagaacacatactcatttaaaaaagttataaaatagagataaaaaaaaaaaaaaa

SEQ ID NO: 93 - DNA, 1997 bp, Homo sapiens
  misc_feature (1468)..(1468): n equals a,t,g, or c
  misc_feature (1495)..(1495): n equals a,t,g, or c
cccacgcgtccgtatcttaggaaatgcccatgataattcagaagaacttgaaagagccagggagctgaaggaaaaggaagccacactatgtctagagtttctgcttcaaaatgatgcaaatccatctatccgggacaaggaaggttacaatagcatacattatgctgccgcctatgggcacaggcagtgtctggaattgcttttggaaagaacaaacagtggatttgaagaatcagattctggtgctactaagagtccactccacttagctgcctacaatgggcaccatcaagccttggaagtcctctgcagtcgttggtggacctggacatcagggatgagaaaggccgcactgctctggatctggctgcctttaaaggacacacagaatgtgtggaagcgcttatcaatcagggcgcatccatctttgtgaaagacaatgtaaccaaaagaaccccacttcatgcctcagtaattaatggtcacacactgtgtttacggctgttgctagaaattgcagacaacccggaggcggtcgatgtgaaagatgccaaaggacaaacaccactgatgcttgcagtagcatatggacatattgacgctgtttcattgttacttgaaaaggaaccaacgtagacactgttgacatcctaggatgcacagctttacacagaaggattatgacaggacacgaagaatgtgtgcaaatgctgctggaacaagaagtgtcaattctctgtaaagatccagaggagacgcccttgcactatgcagctgctcgtggcacgccacgtggctgagcgagctgctccaaatggctctttctgaggaggactgttgtttcaaagataaccaaggctacacgccgctgcactgggcttgttacaatggtaatgaaaactgtatagaggtacttttggagcaaaaatgttttcgcaaatttatcggtaatccctttactccactgcactgtgcaataatcaatgatcatgggaattgtgcatcattgctgcttggggccatagattccagtatcgtcagttgtagagatgacaaaggcaggacaccccttcatgcggcagcatttgctgatcatgtggagtgcttgcagcttcttctgagacacagtgctccaagtgaacgcagtagataattcagggaaaacagcactgatgatggctgctgagaatgggcaggcaggcgctggggatattttggtgacagtgcccaggttgatctgactgtaaaggataaggacttgaatacacccttacatttggcttggagtaaaggtcatgaaaaatgtgccttgttaatacttgacaagatacaagacgagagccttattaatgaaaaaaataatgcactgcagacacccttccacgtcgctgcgcgcaatggcgaaaggtggtagttgaggagttgctggccaaaggggcctgtgtacttgctgtagatgaaaatgttntaggtcaaatggaccccgttccacacntggaaccgctgtacaaaaagaagaatgagactctttaaaaattatgcacatacacatgcacacatatatgtgtgcgtgtgtatatatatatatatgtgtgtgtgtgtgtgtagttcatcagccagtacacatgaggaccaaaatgcatcagtctaaaatggaagatacacattttttttccttcaaaattcaagtgagaactgaagtagcttttttatggagttaaatgtaatctttctgtgttaccagtctttgttgtattttatatttcttaggacacagatttctagttgaccacttaacatttgtaactgatgatgtgttgacctttttttttttttttgccaaactagagaaaatgtccatatacttttgctgtaaatgtgtttatatttatttgaaatgaaacaaatggtgaggaaacatccattatttgttctctattttaattgctatgtatcttatttagaataacaaaaaaaaaaaaaaaaaaaaaaaaaaa

SEQ ID NO: 94 - DNA, 1904 bp, Homo sapiens
cccacgcgtccgccgggagtcgctgggtgcgtggggctgcctcgccgcgtctcgccacgggctctgccagcagacagccttggcacacaggcacaagggctggagcccagagatgagagtgcccaagggagatgtgagcctggcgggctgcccgctaacctgtcgctgaagccccagaagcgggccctcaggccaggcctaccctgcctccggcccagcatgcgcctgtcggtgcggagggtgctgctggcaaccggctgcgccctggtcctggtgctggcggttcagctgggacagcaggtgctagagtgccgggcggtgctggcgggcctgcggacccccggggggccatgcggcctgagcaggaggagctggtgatggtgggcaccaaccacgtggaataccgctatggcaaggccatgccgctcatcttcgtgggtggcgtgcctcgcagtggcaccacgttgatgcgcgccatgctggacgcccaccccgaggtgcgctgcggcgaggagacccgcatcatcccgcgcgtgctggccatgcgccaggcctggtccaagtctggccgtgagaagctgcggctggatgaggcgggggtgacggatgaggtgctggacgccgccatgcaggccttcatcctggaggtgattgccaagcacggagagccggcccgcgtgctctgcaacaaggacccatttacgctcaagtcctcggtctacctgtcgcgcctgttccccaactccaagttcctgctgatggtgcgggacggccgggcctccgtgcactccatgatcacgcgcaaagtcaccattgcgggctttgacctcagcagctaccgtgactgcctcaccaagtggaacaaggccatcgaggtgatgtacgcccagtgcatggaggtaggcaaggagaagtgcctgcctgtgtactacgagcagctggtgctgcaccccaggcgctcactcaagctcatcctcgacttcctcggcatcgcctggagcgacgctgtcctccaccatgaagacctcattggcaagcccggtggtgtctccctgtccaagatcgagcggtccacggaccaggtcatcaagcctgttaacctggaagcgctctccaagtggactggccacatccctggggatgtggtgcgggacatggcccagatcgcccccatgctggctcagctcggctatgacccttatgcaaacccccccaactatggcaaccctgaccccttcgtcatcaacaacacacagcgggtcttgaaaggggactataaaacaccagccaatctgaaaggatattttcaggtgaaccagaacagcacctcctcccacttaggaagctcgtgatttccagatctccgcaaatgacttcattgccaagaagagaagaaaatgcatttaagtggaaatcggacctctaatccaagcatattgcttgctattaatcgccaaaacaggactgctgatgaggaatgtatttgcatatgtttgcaaaagctgaatcattgaaaacgtaccttgaaactctctatctctggacactccagggtagagaatgaagggtatggaagtagtccggcttttgaaacttaggtattttatatttttcccctcaagaactttttttaagagacagatttgccatcctccttaatttgcaggactgccttggtggctttgtttgctgggacaaggcccacaacctgtgcctctcctattgacccttactttgaattcaaagaatctatttaagagtttaatatatgaggctttctttgattcctcctcagttctacctagtttcacagaggaaaaaaatactctttgaataaagtgaacagaggctcaaaaaaaaaaaaaaaaaaaaaaaaaaaaaaaaaaaaaaaaaaaaaaaaaaaa

SEQ ID NO: 95 - DNA, 2187 bp, Homo sapiens
  misc_feature (347)..(347): n equals a,t,g, or c
  misc_feature (2097)..(2097): n equals a,t,g, or c
  misc_feature (2187)..(2187): n equals a,t,g, or c
ggccctcaatttatcctctgcctctgacaaatatattccattttgttacattgcaaaaatttcagcacattgctttgcttacccatctttgctctggaacgacttttaattcttcttttggcaatcttggttgttttgagatgtgtgaaattagaatcatatgcaggtgtttgagttcttttgattttgctttttaaaagagttttttttttgttttgttttgttttgtttttagaatggggcaatgtaaagccagaatatcaacgtccttttgtcaagatttcaaacctattkggstgatagtacacttacaagaataggtaaaaaagatcccaaagattttactncacttactkgaactactagccctactattaagagccacagcaagcttacagktcaaaaaaaaaaaaaaaaagagctgcaacattcctttcgcactcccactcgcccctgaggttcttccacttccttcctatggctttttttagaagcgagtgtgtttttctcacgtccggcaacaaaggatgttttgtgctactactgaggtttgtgtgtgtgacttactttagaactctttctagaaaatgcgattactatttgcataggtctggtagaactttgtattgagtgaaagtctccgatgactgtttttgtttttgtgtagatttgccactgcttaacatcaaatcactttcccctgtgtgttttaaaatacctctaataggacctgtcaaaattctcccagaagtctcacaaattcttacctttaaagaaagtgtaagtgataccttcagtgtattgtatttattcttatatacctttgcaaagacttctcatcacttccttaaatatgtctgatagtgccataatgagaaggggacatggtaattaaccatcaactttggttttcatggagaaaatctatctggagcagtcacagtatcctatgctggagctatcagatgccttgacattagatgtttccatctaattgtaattctctgagcaaggagacaaggtgggataaacagaattctcagatggctgagaattataccctaaatcctgggagagaatttacctttccattgtcagataatatgaatcatttaaaacatgtgctggaacagctttgccttttcttgaggaaaatggggtttctctctcaaagagaaagataaatgcgcctcagaagattttagtggtcgatctctgtcagtgtactaccagcaaaaatcccagcaatcaatattacaaagargcagcactcacttgagtacaraaktwacaacattagctgcttcgtwaacaagatggcatgggagatattctgttttgagtaaatgacaagtcctacagtctagataggaagatttytcctccatatggattttgtgatttygtcttgtgttgagtaaggaaggggagcttggattccaagatcaatttaatgtctatattccttggcattgtcatgttagagcagcacatctcagatggctttcaatagttattttagcattgattttcctctactagagtaaatcaaaagatgatttagaaaatcaaagtcagttttccttggagttttctcagaataaagggaagctgtggtgttgaagggtttttttggctcctatttacatatgatgcaaaatcaatctgtgtgaatctctttcctctgttgagctctactataggctctactatatgcagagccttgggtatttctgtgcgagggggattatgcaaaagaattttaaggcatgccacttgactttgtgaaaccaagtatttgtttaaagagacacgatattatagtgggaggctgttttgtgagaacccacactttcatgtcagcaccctgagatgggatcccattacgccctttaaccaggcaagggactttatgcagttcttcgtcaggaaaatggagacaattaaactgcttttctcataggttgttgtgtaaaaggcagcaagatgtggctgtgtaagaacatgactgaagccagactgcttatgcttaaaacctaggtgagctgtttacacctgatatgaccttggacaagtctcatctaacttctcttgccntcaggtgcctcatctgaagatagcagtgatgttagtgtctgccctcctgccctcataagcctggtcatggttggagaccatcctggccan

SEQ ID NO: 96 - DNA, 4115 bp, Homo sapiens
gcctgcaggaaccggtccggaattcccgggtcgacccacgcgtccggcgcagacgaggcctgaggcggcggcgcgaggcagtatggtttgaagtggtgaacatggatttttctcggcttcacatgtacagtcctccccagtgtgtgccggagaacacgggctacacgtatgcgctcagttccagctattcttcagatgctctggattttgagacggagcacaaattggaccctgtatttgattctccacggatgtcccgccgtagtttgcgcctggccacgacagcatgcaccctgggggatggtgaggctgtgggtgccgacagcggcaccagcagcgctgtctccctgaagaaccgagcggccagaacaacaaaacagcgcagaagcacaaacaaatcagcttttagtatcaaccacgtgtcaaggcaggtcacgtcctctggcgtcagctacggcggcactgtcagcctgcaggatgctgtgactcgacggcctcctgtattggacgagtcttggattcgtgaacagaccacagtggaccacttctggggtcttgatgatgatggtgatcttaaaggtggaaataaagctgccattcagggaaacggggatgtgggagccgccgccgccaccgcgcacaacggcttctcctgcagcaactgcagcatgctgtccgagcgcaaggacgtgctcacggcgcaccccgcggcccccgggcccgtgtcgagagtttattctagggacaggaatcaaaaatgttacttcttgctgcagattctgcgcaggatcggagctgtgggccaggctgtgtccaggacggcgtggtcggccctttggctggccgtggttgctccagggaaggcagcctctggagtgttctggtggctggggattggatggtaccagtttgttactttgatttcttggctgaatgtgtttcttcttaccaggtgccttcgaaacatctgcaagtttttagtcttgctcatcccactcttccttttactaggtctctccttacggggccagggcaatttcttttcgwtcttgcccgtgttgaactgggcaagcatgcatagaacacagcgggtggatgacccccaggacgtgtttaaacccacgacttctcgcctgaagcagcctctgcagggtgacagtgaggcttttccgtggcattggatgagtggcgtggagcagcaggtggcctctctgtctggacagtgccaccaccatggtgagaatctccgagagctgaccactttgctacagaagctgcaggctcgggtggaccagatggaaggcggcgctgccgggccgtcagcttcggtcagagacgctgtgggacagcccccgagggagactgactttatggcctttcaccaagaacatgaagtgcgtatgtcacacttggaagatattctgggaaaactgagagaaaaatctgaggccatccagaaggaactagaacagaccaagcaaaaaacaatcagtgcggttggtgagcagctcctgcccacagtcgagcacctccagctggagctggatcagctaaagtcagagctgtccagctggcgacacgtgaagaccggctgtgagacagtggatgccgtacaagaaagagtggacgtgcaagtcagagaaatggtgaaactcctgttttccgaagatcagcaaggcggttctctggaacagctgctgcagaggttctcatcacagtttgtgagcaaaggcgacttgcagacgatgctgcgagacctgcagctgcagatcctgcggaacgtcacccaccacgtttccgtgaccaagcagctcccaacctcagaagccgtggtgtctgctgtgagcgaggcgggggcgtctggaataacagaggcgcaagcacgtgccatcgtgaacagcgccttgaagctgtattcccaagataagaccgggatggtggactttgctctggaatctggtggtggcagcatcttgagtactcgctgttctgaaacttacgaaaccaaaacggcgctgatgagtctgtttgggatcccgctgtggtacttctcgcagtccccgcgcgtggtcatccagcctgacatttaccccggtaactgctgggcatttaaaggctcccaggggtacctggtggtgaggctctccatgatgatccacccagccgccttcactctggagcacatccctaagacgctgtcgccaacaggcaacatcagcagcgcccccaaggacttcgccgtctatggattagaaaatgagtatcaggaagaagggcagcttctgggacagttcacgtatgatcaggatggggagtcgctccagatgttccaggccctgaaaagacccgacgacacagctttccaaatagtggaacttcggattttttctaactggggccatcctgagtatacctgtctgtatcggttcagagttcatggcgaacctgtcaagtgaagacactactcattatttttgtacatttttgtatatactgggacagcgtgaaacactggaatccttcatggacgagggcatatacaatgatgggacagtgccacactccttcaataaacgtggctgctggccagaggacgtgagcgtgtgacgggcgccttggcgccacctgttgggtgctcactgcctctgcaggtgcagaggggtcagcagcaggagaagcgtgttgaacacgtggctctcagacactccttgtttttaacgggaagctctttgcatttgcatttcctcaacaaaggagcaaagcagaggaagctgagagtctggcgtgttcttgacgctttggtcttcagccttgcactggctcttctaaaggacttttggagggcagataatttcatctgttaaatccaacacacatttctttcagggaaaaacaatgtcaccaaattttcagagttctaaactcctttccttcaagccggaattttccttttttcagcaccagtaggtactaagtctccagatggggaaataactaaaatgtgtttttctgctttgttcgctcttacttctgaggaaggtttccagtcaggactcgctgtaccaatatccatggaggaatatgggagcgtttcgctctccttgtaggctgaagtcagtctgacttgaaggggcctggtttggatctaagcaaacacccagatggggttctctggtctcagcaaggcttttcctgttgggagtcacagtaaacagaaacccaaaaatctcatcttgggtgttttcagggcttgttttgagttttgctgaatagggagcgcaagacgccctgagcctccctctcactggtggtgataagaggagccgtctggtgtgtcagggtcacgaacccgttacatttcaggacgatcctttttccttcagcagcatttcttactggctgtggctggaatctgccttttatcacagctgtcaccattctcacgtgattcttgtgagactctttttggttataattactatttaatatttagactattttactgagcagactttataaatgagatatctacaaggcacttaaagtgttacagatgttttaccttaagaattatttaagttgtgttgggttaagacagttttcagtgtaccgtaaatgttgtgttttcagaaaaagacaaaacgatggtgctgactggttttctgtatattgcacaacagtcctcaaatacactgatgtatgaaactattcatacatcaagcagcatttttttcactctccttagaattggaactatgcagttaaggcagataaaatgtacagatgtttcatatattacaggttacatatataaatcaaaatttcctatataaaactgatttgggatttggggtggaaatattttgaatattaatttatttttaaagatgcaagataggactttgtgcaatgtatttttgtaaatgcttttcaaaatatctgtctttggtagtgcttctgctgctgccaccaaattgataagatgctattaagaggtttaaataaagagttttaatttttaaaagggaaaaaaaaaaaaaaaaaaaaaaaaaagggcggccgctctagaggatccctcgaggggcccaagcttacgggtgcattcaacgactaag

SEQ ID NO: 97 - DNA, 2196 bp, Homo sapiens
  misc_feature (1921)..(1921): n equals a,t,g, or c
ggcacgagctgagtttgtggctgcatttttatctctggtggctctgctacggcggcgcagaaatgaggcagaagcggaaaggagatctcagccctgctgagctgatgatgctgactataggagatgttattaaacaactgattgaagcccacgagcaggggaaagacatcgatctaaataaggtgaaaaccaagacagctgccaaatatggcctttctgcccagccccgcctggtggatatcattgctgccgtccctcctcagtatcgcaaggtcttgatgcccaagttaaaggcgaaacccatcagaactgctagtgggattgctgtcgtggctgtgatgtgcaaaccccacagatgtccacacatcagttttacaggaaatatatgtgtatactgccctggtggacctgattctgattttgagtattccacccagtcttacactggctatgagccaacctccatgagagctatccgtgccagatatgaccctttcctacagacaagacaccgawtagaacagttaaaacaacttggtcatagtgtggataaagtggagtttattgtgatgggtggaacgtttatggcccttccagaagaatacagagattattttattcgaaatttacatgatgccttatcaggacatacttccaacaatatttacgaggcagtcaagtattctgagagaagcctcacaaagtgtattggaattactattgaaaccagaccagattactgcatgaagcgacatttaagtgacatgttgacctatggctgcacaaggctggagattggggtgcagagtgtttatgaagatgtggytagagacaccaacaggggccacactgtgaaggcagtgtgtgagtcatttcacctggccaaagattccggttttaaagtggtggcccatatgatgcctgacctgccaaacgtgggactagaaagagacattgaacagttcacagagttttttgagaaccctgcttttcgtcccgatgggctgaaactctatcctaccctggtgattcgtgggaccgggctttatgagctttggaaatcaggaagatataagagttactctcctagtgacctggttgaattggtggctcggatcctagccctcgtgcctccatggactcgagtgtaccgagtacagagggatattccaatgcctttagttagctcaggagtagagcatggtaacctgagagagctggcacttgcaagaatgaaagacctcggaatacagtgtcgagatgtgagaaccagagaagttggaatccaagaaattcatcacaaagtacggccataccaggttgaattggtaaggagagattatgttgcaaatggtggctgggaaacattcttgtcatacgaagacccagatcaagacattttgattggcctcctacgattacgcaagtgttcagaagaaactttccgtttcgaattgggtggaggtgtctccatagtacgagagctgcatgtgtatgggagtgtggtccctgtgagcagccgggatcctactaaatttcagcatcagggatttggcatgctgctgatggaggaagcagaaagaatagctagagaagaacatgggtctgggaaaatcgctgtgatatcaggggtcggcaccaggaattattatagaaagatcggctacagattacaaggcccgtacatggtgaagatgctgaaataatggccacaccagtccactcttctgcagtatcctccctggcagaacacggagaatcaggatttcttaaatactcaacagagaggctgagcagagcaaatggggggcttcaccctcatcccgcagctgcagagactggaaactgccttcaaggccacggctggtcatctgctgaccacaccccagatccgccctctcctgcgtgcaccccaaaaaantcacttgcgtttttgaggcttaaatcatctatccagtttctacattttgcatgaggcctgcaggtggcctattttgactcagacggtgaaaaaagcaaattaactcatttggacaccataactcatgcaataaaactgattgtcattcgaggaaaaaaaaaaaaaaaaaaaaaaaaaaaaaaaaaaaaaagggcggccgctctagaggatccctcgaggggcccaagcttacgcgtgcatgcgacgtcatagctctctccctatagtgggtcgta

SEQ ID NO: 98 - DNA, 1489 bp, Homo sapiens
ccccctcccctttttttttttttttttttttttttttttttcactattcaaaatgctttgataatcttaatttttgtttctggtgctgagatattatgaaaggaactgcatttgcaacttattaaatacttccaggaacaaatagttcactttgcttgggacttgtagttttgagtaattaatcatccatggagcaggagccagtcaggagatacccgttggtaccactggtcccattggtggttgtcgcagtgtggggattctttcccggaggttctgagtcctcctcatctgagctagactcaatatcacttcgatcatccttggacaccttgcctcttgaaacagctttgcaagctattttcacaatcaagtaagaccagaagcagttcaacccttgtactagcaatagcagtaggttaaaaacccaccaggaagggtaaggtccaacgatctcccagctttcaaataatgtggtatttaacacccagagaggaaatacccagtcgtgtggtgataaaaaccacggcaaacataacaaacaggagatcacacattttctgaaacttggcataatttgccattttggcagcctccagaagagcatcagctgaatcatgaacacaaaggaccagcgttcctactcgggccatattgttgacatatgaaaaggtaatcaacaaaatatatacaaggtggtgcaggaacataatgccaaagtcctttcttttgatatcagtgaattgagaaatcatcaaagaccaataaaacgacagctccaggatgtaatagtagtgaaggtcagttgtgagtggctgataggggtagttgtaccagcaatgcctcgtattccacaaccagggggtctttttcaggaatctgactccgtaggtaaatacataaaggtaaaatgaaaatctccacatgctctcacagaacctcgtcagcgtgcttggcttctcctgattgcgtctttgtcgaaaccagcgctgaatgcttcgaacatcccagtccagttgcttggagaggccttccaatctcttttcatcaggatgctttgtaattgcagtgaagaccttttccagaatggcattgggcggagcaatttgtggtccattggcctgaatgttgagggctatggcgcacggtttggctacaaatctctcgaagatgagccgcaccatgaagatacagaaggccaggggaaaagcgagatagaggtcctcagcctgcgggaaggtggcctcctccgtgttcttcaggtccgcccaggtgacattgtgcgggagccaaaacctctcgttccagaaccaggctaagatccctgccatcttgctttgtccactcctgtcctgcggcacccgcagctccgccaagctctccaccgcgcagggcgcccggggatgcgcgcccggctggccccgagcctgtgccgccgccgccgctgctcccgcccgccgccgccgcctcctccgcggccgctctagag

SEQ ID NO: 99 - DNA, 645 bp, Homo sapiens
aattcccgggtcgacccacgcgtccgggcggactatgacttagttgcgttacaccctttcttgacaaaacctaacttgcgcagaaaacaagatgagattggcatggctttatttgtttttttttgttttgttttggttttttttttttttttggcttgactcaggatttaaaaactggaacggtgaaggtgacagcagtcggttggagcgagcatcccccaaagttcacaatgtggccgaggactttgattgcacattgttgtttttttaatagtcattccaaatatgagatgcattgttacaggaagtcccttgccatcctaaaagccaccccacttctctctaaggagaatggcccagtcctctcccaagtccacacaggggaggtgatagcattgctttcgtgtaaattatgtaatgcaaaatttttttaatcttcgccttaatacttttttattttgttttattttgaatgatgagccttcgtgcccccccttcccccttttttgttccccaacttgagatgtatgaaggcttttggtctccctgggagtgggtggaggcagccagggcttacctgtacactgacttgagaccagttgaataaaagtgcacaccttaaaaaaaaaaaaaaaaaaaaaaaaa

SEQ ID NO: 100 - DNA, 701 bp, Homo sapiens
  misc_feature (670)..(670): n equals a,t,g, or c
ccacgcgtccggttgcttctcagtatcatgttgcttctcagtattgtgttgcttctgattctatgaatgttcattttaagaccccttgttgaaatgggacagttggcagcggctctgatgagcccgagaagaggcctgcccttgggtgcggagtctccctccgcacgatgctcccacgcgtccaacttgcacccaaggggcttttccctcttccaagtggactccttcaaggaagctgcagctcggtcagcagagaaggggcctgccgccagcgccctggaggaagaggaagaggaacccaagaggatggcttgtctcccagcagccacaccggctttgtgctcagccagttcatttgagtttgcatgtttctctgcactatggattttgagcatttagatttctttaatcaaaagcgttttagtgactccagcagacccactgtcccagaaaagcctgatcctgtagtttatgtagaatgccacatctgcgtcctcaagacctgtttcatccatttgggaaaagatgttgggaaaggccactttgctcgcaggggtgaggggaaggatagagaatctatttttaataaataacattctagaaagaaaaaaaaaaaaaaaaaaaaaaaaaaaaaaaaaaaaaaaaaaaaaaaaaaaaaaaaaaaaaaaanaaaaaaaaaaaaraaaaaaaaaaaaaaaaaa

SEQ ID NO: 101 - DNA, 552 bp, Homo sapiens
  misc_feature (3)..(3): n equals a,t,g, or c
  misc_feature (69)..(69): n equals a,t,g, or c
  misc_feature (128)..(128): n equals a,t,g, or c
  misc_feature (164)..(164): n equals a,t,g, or c
  misc_feature (198)..(198): n equals a,t,g, or c
cancttccgccccattgacgcaaatgggcggtaggcgtgtacggtggaaggtctatataagcagagctngtttagtgaaccgtcagatcgcctggagacgccatccacgctgttttgacctccatagnagacaccgggaccgatccagcctccggactctagcntaggccgcgggacgggataacaatttcacacagnaaacagctatgaccactaggcttttgcaaaaagctatttaggtgacactatagaaggtacscctgcmggtaccggtccggaattcccgggtcgactgcgcccccggcgccgwttcccacgattgccacgatgctgtccacgctgatgaacctcgccctgccgctgacccggctgcacatgcccgcgggagccggcgatgctgatggcctcggcgctgagccgctgcgcgggggcggccgtgctggtgctgctgctgtggctggcggtggactgggcgctgatgtgagcgctccggtgccggcgggcggcgtgctgctgaggctggatcggctgacgctcgcgcgaggcggccgc

SEQ ID NO: 102 - DNA, 1756 bp, Homo sapiens
  misc_feature (907)..(907): n equals a,t,g, or c
tcgacccacgcgtccgaaaaaagtccctagtttattgggtgttctcacacaacctgtaagatgaagctgtttttctgcctgtgtgcagggctgattctggaattccagaaggccttgtgggagcgtaaaaggcttttgaataaagtgtggaacagagcgcctcattctgataacatgcaatcataaaaaccatagggcaacttggagttaaggagtttctagaatttgctttagtctccaactgcaattctttattgatcatgaaattgttgaagagaaacacaaatgtcagttttacctttcctgtgggcatgaaagcacatcgaagtttcaggcaactgttaacatctctaccatctgtctgagttgagatttcaggttgtgacacttgccgtgacttatttgtaaatgacatttgtgtgtcttagatactaatggaattcatattctggctagttctttcagtgcatttgtagacatgttcttttcctttgtagcagtcctccctcaccctgaaatgttggtgttctaaccgatttctaatgctaatttcaactggaagcactttttcaagcccagctatcaaaccacaccagacatgtatggattcgggttgcccaataaagcgttgctattatgtaagcatccctcacgcatacagcatcaccagttttgaaagcttgaactattctgcttacttcaaggtacagaaaaaaaaatgtacttaaactgtgcagaaaagatgaaatcactggataatatgtattataaaataagcttcatgtgagtgacactggtttaagttgaaataaaatggtgaaagcattgatatcaatcattgtgactttatctcaaaacaatattgacacacatagatgtttttcttgctttatggtaagattacagnctttattgtcttaaatctgttatactcttcaatattttcaaagaaaacattctagtctcagaaatagtccatctctttgcaaaacagggctggccaattatcaaggacccataaaaatcaaaacactttcaaaaattttaaaaataaaaataattttcacatgattgctttaggaattttgaagtatccattcttttcactatggagtgttgaatatagaagattttttaatgaacaggcttgccctttgatgccaaaggcaaaaaataataataataacatttgcacgtgtgatcacagagcagctgtgaggcatcccgggggagcgcacgcagtggggatgtgattgctccactcaactattttatcacaaagtgttgtaaacatgggagatgaaagcttaactctctctacacccagctacagacccgcaatggccctaaaaatctggggtattcattgggtgggctgccatggaggaatttttggttttgtttttatttttatttgttgttctgtttacaaatcaggagagcccctgtttttatatgctaggaaggtccttgggataggccgaagaggtgtgcaaacgagcagtggaaggcccgggccctgtctctcaggaccacggcggcctgccccacacacagttctgcttctccctatctagaacgaggttttcctggcagattcctgccagactctgagtggagcccccccatgaccctataaaaggggctgtttgtcctcctcccaccctcctgtgctcttcctccctccccttgagggcacatggccgctggtaccacatgttggagcggccgctctagaggatccctcgaggggccc

SEQ ID NO: 103 - DNA, 377 bp, Homo sapiens
aattcccgggattttaataatcaacaccctcctagccttactactaataattattacattttgactaccacaactcaacggctacatagaaaaatccaccccttacgagtgcggcttcgaccctatatcccccgcccgcgtccctttctccataaaattcttcttagtagctattaccttcttattatttgatctagaaattgccctccttttacccctaccatgagccctacaaacaactaacctgccactaatagttatgtcatccctcttattaatcatcatcctagccctaagtctggcctatgagtgactacaaaaaggattagactgaaccgaataaaaaaaaaaaaaaaaaaaaaaaaaaaaaaaaaaaa

SEQ ID NO: 104 - DNA, 660 bp, Homo sapiens
ccacgcgtccgtgaagacatcaccgagccgcagagcatcctggcggctgcagagaaggctggtatgtctgcagaacaagcccagggacttctggaaaagatcgcaacgccaaaggtgaagaaccagctcaaggagaccactgaggcagcctgcagatacggagcctttgggctgcccatcaccgtggcccatgtggatggccaaacccacatgttatttggctctgaccggatggagctgctggcgcacctgctgggagagaagtggatgggccctatacctccagccgtgaatgccagactttaagattgcccggaggaagcaaactcttcgtataaaaaaagcaggccatctgcttaacccttggctccaccataaggcactgggactcggatttctctatctgatagaggtattttctgtggccctgggagctgtctgtctttcccctacccccaaggatgccaggaagacgtccaccattagccatgtggcaacctttacttctatgcctcacaagtgcctttcagagagccccaattctgctttcccacaaaataaacctaatgccatcaggcaaaaaaaaaaaaaaaaaaaaaaaaaaaaaaaaaaaaaaaaaaaaaaaaaaaaaaaaaaaaaaaaaaaaaaaaaaaaaaaaaa

SEQ ID NO: 105 - DNA, 678 bp, Homo sapiens
tcgacccacgcgtccggtggtagctgggattacaggcgcacgtgtgccaccacgtccagttaatagagattttcagtagagacgaggtttcaccctgttggtcaggctggtctcgaactcctgaacaagggagacttctaagaaggtaggagttgagcaagaaatggctgctatggttttcctcctcctgagcatcacaaccatctggggagctttcaaaaaatgaagttgctcagccgttgagaactgctggaaagcccagcttaacaagttgtttgcttgggtggactctgcttgggggtgcagcggggggttctttccagtcctggtgtgttgctgggatgaagcagagagccctagaactgttctctccatcccacttacggcaagggctgttcctctgtcaggccagtccttgggggcaatgacagcagcaggaacattctggtaagtgtgtggtttccctcccagtgagcaggctaaccctgagtataggaacttaggggaggttaggtggctgatgcatgttttccagaccggtttgtatctgcttgtcattgatcttagaagttcatattatggtggaattatctatttgcatgtgtaaactttgaatatgtttttaacttttaataaaaagttatttttacaaaaaaaaaaaaaaaaaaaaaaaaaaaa

SEQ ID NO: 106 - DNA, 2261 bp, Homo sapiens
ccacgcgtccggtgcaatgctcttacaaacgcttgactccatgttaaagctttagccttaactacttcattttctttcaaaaactgtactggaatatttgtgaaaagaatgaaaaatatggaataaattcataaatacacaaagagagagagctctaggtatatgtcaagtctggattaaagacagatctgtgtttatttttatgaagcatcttctgactttgatccaaagcaaaacttcttccatggccccatttaatccttgttgcacccctgggaagggaaatgctgctgtcccactttgcagatgaggggctgcatgttccaggccacccctctcatgggctgagcagcctggttgcaggtctcatggtggcgccactttgccattgtccctactttggcttctgtaaacaccctctgaggttggtgagctctctggggaaacaggctagcaccagttaatacacagagggagaacaatcagtaactttgttcttgtgcccagattggtggaagtcaccctatgtggagaggaggactttgaactcagacctggacttccctctgggacctttccctacactgtctgacctggggctggtcgtcacctcttccaacctttgcatcctgctctgtaaaatgagaataagaacaccatcctctccacattattagaaggattaaaattaatgtatctgaaggttcttaacagtgtcacacactcatcgttagtgattgtcatctcagtcatgtctcctgtttatcgatgccccttttgtagccaaaccctctgcccccgtggtattgggccctgcggcgaggaccacacctgagcatacagtgagtttcacctgtgagtcccatggcttctctcccagagacatcaccctgaaatggttcaaaaatgggaatgagctctcagacttccagaccaacgtggaccccacaggacagagtgtggcctacagcatccgcagcacagccagggtggtactggacccctgggacgttcgctctcaggtcatctgcgaggtggcccatgtcaccttgcagggggaccctcttcgtgggactgccaacttgtctgaggccatccgaggtagaggaccctcacacccagcccaagcccacacctggctgtcaagcccactcccctctccccaggctgttgctccaaggttgaatggcctgtaatctaatccctgactatactgcccgccgccatgcacctaggtgtgctggtcacttactatcattttattggcagcggtcaggggaccagcaatcacgtgccaagctctgcgctagagagtttcatttatctcaccaagaacaactactattattccacccaccttggaggttactcaacagcccatgagggcggggaaccaggtaaacgtcacctgccaggtgaggaagttctacccccagagcctacagctgacctggttggagaatggaaacgtgtgccagagagaaacagcctcgacccttacagagaacaaggatggtacctacaactggacaagctggttcctggtgaacatatctgaccaaagggatgatgtggtcctcacctgccaggtgaagcatgatgggcagctggcggtcagcaaacgccttgccctggaggtcacagtccaccagaaggccagagctcagatgctacccctggcccggcatcatctcttactgcgctgctcctcatagctgtctcctgggccccatctacgtcccctgaagcagaagacctgactctccttccttcctcccctgccacgtgggaccctcatctctgctgcctccttcctttcctgagaggctcagcttgagagaatgagccagtgagaagcttctctagacttggctccaaacatctcccctcccaagacatctgcctgcccacaggctcctgttgctccttcacacagacctggatgccccagagcaaggtcttcattcatggtcctgagcaggggccatgggattgggctctgggcactgacttaacggcacctccctagaaggcgagaaacatgccaaatctaaacacaccaggactcccatccatcgccttgagactgaccgtaaaccacagacgctctccaggttctcaagagttatcctgccttccagattcctgcctatcccaactccccagccttgttgaggttctctattgcctcttgaatacaaatgcactcccaaagtggttttaagaaaataaaaagattatccttcaaaaaaaaaaaaaaa

SEQ ID NO: 107 - DNA, 809 bp, Homo sapiens
  misc_feature (372)..(372): n equals a,t,g, or c
ggctgcaggaattcggcacgagtgttagggtaaaaagtgaattaaagcaacaggactatttataaaataattagatttagaaagcagtcgtagaaatataagcctggagttgcctctgaattacatatttaacaaacctagaagctaaatcagtttgtcttttatcaaaactgcaactcctctaagttgaaagcacagtgacaagagaaagcattacaaattcttgagaaataatagaaattaaagctcttttcaaacctgtgaacaagtatagtaccagaagtataagattcagataggcccaagttgtagttcttgttatgagtcttacaaccctatggactttggacaaattacttctctgcgtctgtntcctcatctgtaaaatgaaaataatttctgtttcatacaggtatagtctaaatagggataattacacctacttcaaagttgtaaaatacacaattacaactagataggaggtataagttctagtgttctgtagcactgtaggatgactatagttaacaatattgtatagtttcaaatagctagaagaaggatattgcatgttcccaaaacaaagacataagtttttgagatgatagatatgctaattaccctaatcactatatgttatatgtattgcaacatcactatgtacccccataaatatgtacagttattgtgtattaaaatttttttaaactaaaattataagacattaaaaaaaggtatcacatgtaaaaaaaaaaaaaaaaaaaaaaaaaaaaaaaaaaaaaaaaaaaaaaaaaaaaaactcgaggggg

SEQ ID NO: 108 - DNA, 1569 bp, Homo sapiens
tatcacctgaatccctgttcaatgtaattttccagcagtgatgaagaggcataatttttatgctattagtctttcctttagccatcactagatcccttactttaaccatattattttgtgtaatttcacagcaacaagtggtcctggtggcatccgaacggtaataatacgccagcatgagattgtcctgaaggtggcttatccacaggcagacagcaacctccgaaacatcgtgaccgagcagctggtagccctgatcgattgcttcctggatggttatgtttctcagcttaagtctgtggataaatccagtaatcgggaaagatatgacaatctggagatggaatacctacagaaaagatcagatctcttatctcctcttctttcactaggccagtacctgtgggctgcttctctagcagagaaatactgtgactttgatatattggtacaaatgtgtgagcagactgacaaccagagccgactccagcgctacatgacccagtttgctgatcagaatttttcagactttctcttccgttggtatctggagaaaggaaagcgaggcaaattattatctcagcccatttctcagcatggacagttggcaaattttttgcaagctcatgaacatctcagctggttacatgaaattaatagccaagaattagaaaaggctcatgcaacacttctgggtttggcaaatatggaaactcgttactttgcaaagaagaaaacccttcttggcttgagtaaattggctgcattagcttcagacttttcagaggatatgctacaagaaaaaattgaagaaatggctgagcaggagcgctttctactgcatcaggagaccctacctgaacagctgctggcggagaaacagctaaatctcagtgcgatgccagtattgactgcaccacaactcattggtctatatatctgtgaagaaaatagaagagctaatgaatatgatttcaagaaagctttggacttgttggaatatattgatgaggaagaagatataaatataaatgatctaaaactggaaatcctttgcaaagctcttcagagagataactggtccagttctgatggcaaagatgatccaattgaagtatctaaagacagtatatttgtgaagatcttacagaaacttttaaaagatggcattcagctcagtgagtacttaccggaggtgaaagacctgctacaagcggatcagcttggaagcttaaagtccaatccttacttcgagtttgttttgaaagcaaattatgaatattatgttcagggacaaatataactttttctaaaaatggccattgtttatgaaatctgtataagtgtgtccttatacaaattttaggccataaacaagtgtaagtttgtacaatttcataacatgtatagctgagtttttatactttatatgtaggaagctaatataaaatagttatgtaactgtgattttggttttcagttatgtgacttgttttttccacctgaaaaaaaaaaaaaaaaaaaaaaaaaaaaaaaaaaaaaaaaaaaaaaaaaaaaaaaaaaaaaaaa

SEQ ID NO: 109 - DNA, 1323 bp, Homo sapiens
agtctgtctcaaaaatgaatgaatgaatgaatgaacgaatgaatgtactatgagctgatactgggatttcaggtaccgcagtttgtgctgaatgatatgtttggggtaaatcagtttttttcttayagaatttcggcgtttttgctgcaactgccactaattttgcatttaaaagaacaaaagaggaatgtatttttcaaaggagtgaatgaggttaaaatcaagattttgaatggtataaatatgcaactaattcagttgtaggatattattaaattttttattgctaaatatgtttctttcatacgttgcagtgcttacagttccaacagctttccaagaaaacatttccatatttgtgttatttgtaaagtatacataaataatgtaaaataatttgggattatttcaactttacattgtatgtctgaatttcatcgatgttgtacctggctcagtcaatagttgtcacaggtattaagccattttggaatttgccacttttttctgggtaacctgttttagtttagtttacagcatttagaaacagaaggtaactttatagaagtaacaccmatatcctagtctgcttgccccgaatataactaatagtrttaggrtgtaagcaatattaagatggkttttattattttttatacactgtgtgcttttactttttatttaaactacagcaaaaaactgattttttaactaaaattgaatggcgtttatcttaatgaccagttattgaccaaagtgtactcagaagatgttattatgtcccaatctaaggaatcctttaatttggggattaattttacttacacatgccatttcagtttcagttgcctcattctattacatcattcttgtcaagtctaagctttatcatgtctgaattcttttaacactgaatctgtgatgtaaaaatgtatgatgtgccataaattttattcataataaactaagttatagcctattgtaatctgtaaaacatttcttgtaaattacctaatttattttttcatttatgtacagtatcttatgtaaatttgaaaaatgtttgccatggcgcattctgtaaacattcccgtattcttttccttaatgcttatttgcatgaaggtaacttgggttttgcttgtttgtattggataaccattaagccaacttcagtttctctgcctttttttctgtagtttaaccatttctaattttgttcatattctaaatagatgttagaatcatactttttattttctactttctaaataaattatctaagttgtttactaaaaaaaaaaaaaaaaaaaaaaactcgag

SEQ ID NO: 110 - DNA, 845 bp, Homo sapiens
ggcacgagctggtcctttgtaaactcctgttgaacccctcatgccctttccttggtcttttaggctcttaatgctactttcaacagcccaaagcccccaaccccagaaaagattcccccttcacagcactcccctccaatccaacttcccactgagcaaatgctgaaatccaggcactcttgcagattattagatcaaaataaaccatcctaaggtgtgagtgagattgagggggtaaaactcagggaagccattgatgttttaagtaaggaacttcctaatccaatcaattcccctaacacatgaaatttgtggggaggggaaagccccaaatgagatgatggtcttttattcatgccttttataaatatacattaagtgtttcctgggtgccatgtactaggccaaacattaagatgtaaaaaagaaaaacgtacaattaattgccactctcaagatgctcacagtaagtctagtaagtagacaagtattacaaaacaaaaatacaagtgagctcacctacagcaggatgctccctcctccatccctctcgtacccatccctcttgtacccagcctgctttatttaaatagagactgagcatggcaagtcagtaccatcccgtctctccctatccccttcctcatctttgacagcagcccagtactccacataagccattaaaacagtacgcctacctagttagtagatgaacctatgtttgtgaaatgaggaataacaagaggcattgagcctccagcttaacacaaagcacccaacttacacttaggagatttcaacttaacttaaccgctctgaccaaaaaaaaaaaaaaaaaaaaaaaa

SEQ ID NO: 111 - DNA, 1526 bp, Homo sapiens
aattcggcacgagcgaaagcccacagttatggaaagaattactgtctagatggtctgcagaacgtgtttggggtgagtgggagtgaggggcaatgttactttttctccctgtagtttggagtccattatgagctgctgctttttcttctcatcttgtcatcttctggggatgtttgaaggctgagttccaacagaattcacaaagggaataaaacaggattgagattttgaggtgtgcacaaggtggtaagataaagggcatatgagcttcaaaactaatgctgttgcatacatgaagccttttgttttttgaggagctatttttgttattcttgtaacgctccaccttacatgccacatctgtgtgagtcaacagggatcaggtttggtcaccacacatgtctgaagctgggcagcgtctgctctgtgttctgtgtggaatggagaaaaaaacgcctgccctgctgccttccatgttcataggcccagcccaagagagtgacacacagtgctggccctgagacatttccacaaagtggtcaactctgccttgcatcctaaaactttttgggcatctattttgaaaactataggagcctttggaaggcctcttatgtttggaggggaagggtgttgagattgtcaccatccttcaagctgagactcctggtgagcctttgccaccatgaaaaccacatagctgaccagggctgtgcttgaggtacagaggacacacatcgtagacaggcctgtgtcatgtttccttacagtcgttttttacagagaaaaggggcattggtttttcactgctttctcaacagttcctgtgaataaatgaaacatttcggagctccctgagagcaagagccttcacttcttcttgcggtgccgggaccatgtgttggtgaagctggtgctgtgggggccactcactcgaatgacacctggaggcctgttcctcccttaccactcccttccccagcccgacttcttggcctcctgcccaaccagacacctcaaactctgtcagtgccctggcattctggcagagaatcctcaccagttctcaccaaccttccccccaggcaagggcagctgccagcatggtgctctgccaggacaggtttccctgaaggaagctgctcacactgagatgagcctctcagggcaggacctcttcccaagccctgcacacccacccctgcagcccttttggctccccttttccctgtgcctcagcactcctttcctggttgcagataacgaactaaggttgcctaaagggcagatctgccttctccatgtcttcgtcctggcaaacagggtcgtcttaaaattatgcgctaattctgtatgggagcactcaaaaggcattacttagagattgaaatttcaaactatctctagtttttcaatggaaatatatcagctagggaaaaaccatcaagctcattattattttttgatcttcagttgtatttttgtgaatattttaatacatctttttcaatttcttaaaaaaaaaa

SEQ ID NO: 112 - DNA, 867 bp, Homo sapiens
ggcacgagccacagtccggcctggtacgcctcctgacttcatcctcaaggtggtaatagacaaacatcctgtccgtttttttgtacataagaggccccatgtggatttcttcctggaagtggtgagccagtggtacgagctggtggtgtttacagcaagcatggagatctatggctctgctgtggcagataaactggacaatagcagaagcattcttaagaggagatattacagacagcactgcactttggagttgggcagctacatcaaggacctctctgtggtccacagtgacctctccagcattgtgatcctggataactccccaggggcttacaggagccatccagacaatgccatccccatcaaatcctggttcagtgaccccagcgacacagcccttctcaacctgctcccaatgctggatgccctcaggttcaccgctgatgttcgttccgtgctgagccgaaaccttcaccaacatcggctctgactgggacacaggcggaagcctaggagagccgaatcagtgtttgtgaagaggcaggactggccagagtgacagacatacggtgatccaggaggctcaaagagaagccaagtcagctttgttgtgatttgattttttttaaaaaactcttgtacaaaactgatctaattcttcactcctgctccaagggctgggctgtgggtgggatactgggattttgggccactggattttccctaaatttgtcccccctttactctccctctatttttctctccttagactccctcagacctgtaaccagctttgtgtcttttttccttttctctcttttaaaccatgcattataactttgaaaccaaaaaaaaaaaaaaaaa

SEQ ID NO: 113 - DNA, 1526 bp, Homo sapiens
ggcacgagcaggggttgaccaggacagttccccatctcagctggtgattgggaacagagactcccttgttctcctgcacaccctggctcatggctcttacttggtgtgtggaggaaggaaaaaagaagaccttcaccatcacctctccccattcatttattcacagcacttaccaccctctacagtgatccccttggaagatgagctccatgagggcagggattgtgtgtatcttgtatatcttcatatgctcagtgtttgcacaatgtctggtgcacagcagggtttcaatgtatgaatgtgtgggatagtggcctggtagggcaaggttacacagcaagtccaggacagagcctaactctggagcctcagactatattctgccagtccaagcaagggaatcctgatttcggcctgagagatgcatcttctagcaaagtcaacatcgggatggctcctgagctttccttctcagaggggtgggcttcctacttccccctcccagactcccagtctgcaaggccaagatccatttccaggagaaaatcaatatttgatgttcccttccttccccagcattggttcagagctctggaaatctcctgccctccttacaccacgcagataggaaatctctcctttggcttttaccttctgggcccaggccacccactgctgccgtggattttagccatattattttctgctgctctgagtgccaacagcacactcagcactagacacaaacatgcaaagacgcagctcttgcctgccccaaaggcttgctgggtaagttaaacagactgtaaaatgcagacttcaaatatgccagaggcaaaggcatttaaaattctcagcgggggctggaaagagaacgcttttaaagtcttttcatttctccctcttcctttgccttcagcatcgagctgcctgtgagttgtcctgcctcttctgtctatgaccatttaaggatgactggtccttttgtgagcaggcaaaggctttgagatgttggctgtgaatgtggacagctcttcccaggctgcctgaaagagcggaggcagctaaacttggcaacaaatatttccaagcctgctttccattccatcatgcagaatggtgttattaaattgatgattcaggatctcaaaccagcagagctctgtcctttgggagaaacataatccatatgacaggtttcaccagggctatttctgaataccagaaaccagtgcctaggacagtgtagatcagagagcaggtgagctgggtgctttgggatcagaagccacctgggccagagttttgcaggtaacactctgcagtggacatgcctgggtcaacctggtgcaccgagtccatgctgtgttcactttggtgtccttttctcctgacaaagacttaacctggtgccatatctctcctaagcaatgtgaggaggatcaccttaacctggggggtcaaggctgcagtgagccatgatcacaccactgcactccagcctggacagagtgagacagtatctc

SEQ ID NO: 114 - DNA, 1875 bp, Homo sapiens
  misc_feature (334)..(334): n equals a,t,g, or c
  misc_feature (966)..(966): n equals a,t,g, or c
  misc_feature (1304)..(1304): n equals a,t,g, or c
  misc_feature (1319)..(1319): n equals a,t,g, or c
  misc_feature (1329)..(1329): n equals a,t,g, or c
aattcggcacagtcagacgtggtagaaagacagtaagagaggaacaactagaagtggagcccgaagatgtgactgaactgctgcaatctcatgataagacttgaatggatgaagagttacttaagtggtttcatgagatggaatctactgctggtgaagttgctgtgaatattgttgaaatgacagcaaaggatttagratattacataaacttggttgggcagagtttgagaggattgactccaattttgaaagaagttctgctgcgggtaaaatgctgtcacacagcatcacatgctacagagaaatctttcatgaagagtcaatcaatgangacammcttcattgttgtcttatttcaataaattggcacagccactctagccttcagcaaccactgatcactcagttcagcagccatcaacatcaagacaagaccctctaccagcaaaatgattacaacttgctgaagggctcaggtgatcattagcgttttttagcaataaagtatttttagatataatgctattacatgcataatagactagagtacagtatagtgtaaacctaccttttatgtacactggggaaccaaaaaattgtgtaacttgctttattgtgatacttgctttattgtggtagtctggaacagatcctgcagtatccccaaggtatgcctgtatctcagtatagtcgtgatcataggtcttgcttttctttagattcactgttggtgttatcatccatgaatttcaccttcctgtgtacaaacatctcttattacagtaggagaatatgggagtcagaaaaggaagacatttattgtcattatgaactcagaaaatatgtttwctastgacattgaaacaactgagattgatattttccagccacggcagttttggtgattgaaagcaagatctgttttttaaaaattaaatataagtttgcacattcttccagggnaagggcacgggataatttcccttgccattttattttgaaaccagctttgttgtggtggcacgctccatgagatttgctccatgagatttgctccatgttgcaccacacacagtctttgctcctgtgtccttccatagaaaaaaacagtgtggggaargatttggtttgtcttaccctttaatcttctgctcctacagctctctggtctgatagttcactattttggtaataaagtcagatatagttcaaatcctgtctggtctattatttcgtgaaatttttgaacttttccatgctttggcatcctccaagaactttttcctttcwaagtttactgntttaataaatggacncctatgtgancacttttagactggagtctaaaagcscctaataggcttgctatttttagagaaggagaaagttgccttttgttctctctgtgcttttcacctcccacatgttctttagagttttttttcctgttctggtcttagtagtgacagctttctaatyccagaggctttttcctgggtctgtttctggctcattttgtctcatactcaaaatttttaatgtcagaattgggctgggctcttctctttctattatctgtaaacattttgggtttcttttcctctaatttatgaaaattatgaaatgtacacataaaggagtggaaaatatattcacccagtttaaagaagagtaataaaatggacattcgtatatacccaccatccaggttgagaaatagaacattgcttgtgtctcagaagctctctgtgttcctctcagtcacgttcccccaccccaactcctacccaaggtaacctctcatcctgaagcttacatggaagatttgggcatttttattaaaaaaaaaaaaaaaaaaaaaaaaactcgtag

SEQ ID NO: 115 - DNA, 2036 bp, Homo sapiens
aattcggcacgaggaagagtggtgtctccttcagcagggcgtgcagtggtggctctttttcttctgtgaccctttatacccattttcacttttccccattgtggacactctgagtccatgttgttcttcccacttgtcctcctgccatgtgttttcctttcttatagtaaaaggaggagagcgcagggttaaaaagacggtaactgtgtgcttctcctcccatgcagacaagcagccagcagcagctcctgagccccacgctgtcggatcgaggaggaagtcggcaagatgcagccgacgcagggaaaccccagaggaaatttgggcagtggcgtctgccctcaggtaggtccatccaggcatttctccagcgatcgaggcattttaaaggtatttactctgtttgtgtgttttgggtcttgcctttcaaaatgcaagtctgcatctacagttgtttacagacagcaacataatgaaaaatgtagtcttgtcaaaaacattgtcccccaaaataacttctctaaatatgacttacattagcccccattttccgggtacatttcaggctatcatggttgagaagccagcacctatgaaaaagacaagattcagaaagagggagaaatttccaagggctttctgtgtgcctcaaggcatgctcaaacatgggcaaaagtattcaactgaagagggagtgggcagatgcaatcattcagaaaatgccacgaagttctcaaaaaagggacaggcccccgatttctctcagcacactttgcagctgagccggtcactggctttaggcaagctgctttacctccatacaataacaaacaacaacaacaaacacttacgtagtactcactgtatgccagtcactcttctaagtgcattacttgtgttctctcattcaatcctttaataaacaatcccattattttccatattttactgattcagtaagagaattttcttctatgagcttcttctctatagggttttggaaagccaggataatcccattaagagcactcaggaatcgagggagagcaatgctccccacagcccagtgtccttgtacatgtttttttctatagataactaagttcatgctaaagcaggagctttataatgctctttaactgtgccccaacttcagcccaattgaaaggagaagatgtgtagcatatgtgttccacaaagcagatgacagcacagcttacattttgaggctgacgatgttcagtgggtcttcactgggactaccaccaaggaaagtatcccctttcatatccaggaacttatttttcagagatcagagaagatctaggttcctcctgattcaaaacacagcagagaatgacagcatcaagacaacgtagatggtggtgccaggtcataaattacaagctgagtcggttcaattttatcctgtaggcaattaggagctagcaaagatttctgagcagtatgtgacttttggaatctgtgctttaggaagttgacttggcagcaaaggagggaattgtctatgacagagcctggaggcaggttacaagctggaggaagttaccgtggtgtgagcacaaggcaacaaaggcatggacagagctgggggccagatactgcagggacagataggagaggtgacctggggagaatgcacagtccttggtattcatttaaatggacaaaagaaatgatgctgtcaaaagtacttccattgggccaggcgcagtggctcacccctgtaatcccagcactttgggaggccgaggcaggtggatcatttgaggcctggagttcaagaccagcctggtcaacatggtgaaaccctgtctctactaaaaatacaaaaattagctgaccggtagtggtgtgcacctgtaatcccagctgcttgggaggctgaggcaggagaatcacttgagcctgggaagcagaggttgtggtgaaccaagattatgccgctgcactcctgtctgggtgagagagtgagaacctgtctcccaaaaaaaaaaaaaaaaaaaaaaaaaaaa

SEQ ID NO: 116 - DNA, 2204 bp, Homo sapiens
ggcctgggcgacagagtgagaatctgtctcaaataaataaataaaattaaattataacaggcaaaccgtcactggccagggaactcctacgtggaataaacawagctgatgtgtaaagaattctgaggtgtgcttcacaggtcaccacacacagctagccttctgttggggtctggcccagccctgtgcttgggtaaggacagaaggctctgggtgacgctccgtgaaggagaacccagttgctgggcattgtctcttgtgcggtgatgctgatgcctatcctttggtctcatgcctggctctgctttgctgcgcaytctgtctcccactccgtgctgtctgagatgcaggtgattgagcaggaaaccccagtgagtgcaaaatcctctcgctcgcagctggacttgtttgacgatgttggtactttcgcctctggacccccaaagtacaaggacaatcccttttccttaggggaaagctttggctcccgctgggatacagatgctgcctggggtatggacagggtagaggagaaggagccagaagtgaccatctcaagcatccggcctatttcagaaagagccacaaaccggagggaagtggagagccggagctcaggcctcgagtctagtgaggcgcgtcagaaattcgcaggagccaaagccatctcatctgacatgttctttgggcgggaggtggatgcggagtatgaggccaggtctcggctgcagcagctctcaggcagcagtgccatcagctcttcagacctctttggggacatggatggagctcacggagcaggaagtgtatctctggggaacgtgctgcctacagcggacattgcccagtttaagcagggtgtcaagtctgtggctgggaaaatggctgtgctggccaatggtgtgatgaattccttgcaggatcgctacggttcctactgatccgagctctgtgactcaggcttacgatggtgacggcaacaagaactccacagttcccaggctggggatgctttgccttgtggaagctggggaggatttgttacttcgtatgtgtggtgtgtgtgtggggtggcctttgaggcgctcactcctgtgaggggaatggtcagtaccagcccttgtcctctgcctgtggactgagccctttattccctctcacaccaccctccgtgtgttagactcttgtccttctgtcctgcccccacagctgctgctcacttatcctgccatactgggaaagggggttcccccacgatggcttattctgggtccagactttccccaggtagggaaagcggaaggtagaaggctttttttgctggctctagggttcttctagttcgaggccttgggtccccatcctctggaaccagggggaggcctggaaggagttcactgtagacccgtcccatggggaaagaggctgcggacttgctgctgctgctgctgccagtggcctcttctgggtgccaggagaggggaaggacctttgtctgggcgttaccaagggctggaaactttacctggtacctaaaggtttcatttggtatcagaccggagacccttgggttctcccgtctcaccacccctttctacagtaagcacttggaagattgtttcagggtgtctcagggtccctctgtaccatctgctgtggaatgcaggaccctctgtgacattctttatcccttcttccccgggttggtggccatggagggtcttgtctgctgtgattcgactctggatgctgtgagcttgatgctggccagggaagcagaggatgtgagaggcagaggcaggctcctggggctgagctccttcctctgcatcattctgggcttggcctggacagcacccgccagtgagagctgtgggcctcaccctctggcagctgagccaagcactgtcattcttggtgccatcttcccctgccgcaccggcagtctcagcccagcccccacctttgggttgtaggttgggctcccaagcaacacagaccactcttccccttgcccctcccccagagggacttgactttctttctggactgtttgtattgaaacaaagtggtgtcaaaataaagcccctgcagggcctggctccctgttggtctgagtgaaaaaaaaaaaaaaaaaaactcgggtcgacggtatcgataagcttgatatcgaattcgatatcaagcttatcgataccgtcgac

SEQ ID NO: 117 - DNA, 676 bp, Homo sapiens
  misc_feature (638)..(638): n equals a,t,g, or c
  misc_feature (656)..(656): n equals a,t,g, or c
  misc_feature (675)..(675): n equals a,t,g, or c
ttcggcagagtggcccctcctcgacactaagccccccacagactcagcctccaaggaaccgctgagcacccttgaagcatgtcattgtcagtgatacctttttattctatggaactctaacctattcgtgtcatattgaccttttgctgcatgagtcataaattatgaaatcagtcttacagtttttgaaatktagccagcatttgtaaggctaaacctttttcatgaactgaatttaagtgaataaccaagccacagttcctcctcaaatggagagtgatgatcgacatttgaatctctttgccctttccaacggctatggcatcaggttctaaaataagctcgtaatttttcctgttattttaataatatggaaatattagcatagtgtttcttttgatagtgatagactataatccatatttaaattttatagagaagaaattttattgtactgtgatgtagatatttattatccaggtaaggatttgcccggtgtgtattttttacaattgagacattttactttaatctttaaaaaaaatgcattaaaaacacactcaaaaaaaaaaaaaaaaaactcgagggggggcccggtamccaattcgscctatagtgagtsgtataaaatcactggngtcgtttacaagtcgganggggaaacccgggttaccna

SEQ ID NO: 118 - DNA, 1121 bp, Homo sapiens
  misc_feature (286)..(286): n equals a,t,g, or c
  misc_feature (1102)..(1102): n equals a,t,g, or c
  misc_feature (1105)..(1106): n equals a,t,g, or c
gtttctttattcctaatgcagttagaaagacctttctccttgagctctttgactcccagaaggtaccccagtccccagtgtacttagaaaggatctcgaacattgctggacgtcctcatagtactcacaaagggctagccttgaatgtcactcgcccagtcttcagtctcctgacttagagatacaatcacgtcacaggtctcttggcctcaatctgaaaactgctgccgccgcgccgaggagactcgcatgccgccaccacctcactgggagggcgccgagccanccgtcgccccctagaccctgacagctgcagctgccttgccttgccgccgcctccctgcagggcccctgttccaatgaaaaacagaacacaaaagagcagagcacctaagcctgtctctgcctccctgtctaccggactggccagggccaagacccccgctgctccactgcggggctgggcgggctgactccctgcttcctccargctgctgcctcccctgcagccagggtctgggcagggtgcagccggtcctcgggcgcacgcagcttccttcaagtacactgtgtgtgcttcccggacctgcggcgatgccacgggcctgccttttctatgcgcctcactagcttaccaccctgtgcaggtaatgcaactgactttgtctcatcagtctttttctttccctgccaccctttatttatcaagcgtaatgttacactttaaaggacagcaaataagaactttgtagaatcccaccaggactttgctaacaataatgtttggaaataaagaagtgctctgaaaaaatatcagccaccaaaatagttatgttggcactgtgttcacacgcatggtccccacacccccaggttgggtgggtttttttgttttttgggtttttttggggggggggctttttcatgttacatccatatctgtatttatatcttatttgtttcactttcaagtgtatcatggcaaatgtacagatttttttgttaataatgtgctaggatttgctaaaaaagaaaaaaaaaaaacccttttgagtttgccctagaataaatgagacttaattcaaaaaaaaagggaaaatgnagnnggaaaaaaaaaaggg

SEQ ID NO: 119 - DNA, 1820 bp, Homo sapiens
ggcacgaggtcaatggcttggacagacagacgggctcagtggcatttggaaccctctttggtgccctcccattctctctggaattgtttcaagtctgctggttttcaaacaagaaaagacctttctggccatagggagaatagcagggagtctatgttttggtggttacattggaaacatcttaagcaagagagggaaagttgattttaggcacacatgtaccctccttgacagcaggaactcagacttcaatcttgggggtctaagaccagaatattttccttctgccagaaaagaatcttgcacatatactcctgaggcatgagtgtgtggtccatggcaagaaatagctaaaggctgctttccaggacccaaagccccatttaatgcaagaaccagagaagtgttctaggccattagtggacaatgtcatgtttggagaaagataacaacacaaataatgtaacctttccttaaaaggcagaactcaatccattttatttgatgcttattctaaccctaaccctgggtcacctggaatgaagaactctatgaataatatttgattttacaacgtgttatggttatgtgaaaactaaacatttgccttttataaagactgacaaaatataaatctttattctaaccctatccccaaaactagccaggccacaccccagatgttcttattgactattgggaagatagaaaaggcgttgtgttttttgtttttttgttgttgttgtcattgttgtttttttcagaagaccagtgtctcagttctgtcttagtagtaccacacccgtaaccgtgttttaaaagtttgttttagcctagagacagatcatacgagttcaacaatgtacagtgtgattgaaaagacaggttggtgtctatttttctttttaaaatatctgaatgtgtatttgtaatacgtaaaggtaaaaaaaaatagtgccaaaaatgtgcaaggcatctcattacagctcatgtacgtctgtttttataagatcaatattaaaacccattgggattaaatatttttgaataggatacactcttgrgaaactcgrgaatggactgagccttcctacaagccactctttgtttttaaaacagtggggaaatacgtttacagagattgtgagcttcagagaatgcatgtgatggtgtgtattacatgctaattcatataagctgtatctgtcagctaccaccctgtgctttaaaaatgcacacactcaaccctctttagcttggagctcagctttttgcttttttttttttttttgtagaattatttagctaacataagtattctgawtgctacctgatggccattcttacttagtttcatagatgtgctttaactatgatcctttgaagctcaccccttggagascctacagaacctcaggctgatagctttgaagactgccaaacagcccagaaggaagcaaagcatctgcataatcaggagggttgtataacaagtagtgatttggcaaatatgtgggtagctttaggctgaggcacgggcctcaggcaaaaatgcccttcgagtgaatccgaagggcatgatcttcctatgtccttgactaggcatgacgagtcatttgaggtcagatattatttgagttgttcagcacccccaaaggtaggcattctcctgggaaattttcatttccattttatcgccaaacaaaataaaaagcaaaacaaactttctaagctagaataatgaaattaagtcattttccactttgtatatattgatgctaataaaacagatgaaaaaraaaaaaaaaaaaaaaactcga

SEQ ID NO: 120 - DNA, 1573 bp, Homo sapiens
  misc_feature (1549)..(1550): n equals a,t,g, or c
gacaattcctgcccctaaagcctaggagatccctctcccttgctagagagccacccccaaatcaaaatgtgaaaatccctagaaagcaatagccttcgaggtaccttgcactgaatttcccaccccagcccttccacccgatgggaggctgtaacttgggcactggggtgactttttccatgcccttgtcatctccagggtgggaggcaggccccacttcccctcccctatcccccacttcccattgttgttgccccacccctaatctccagactgaacccagatggagatctgagtgccaaaacaattcttgatgtaactttgtacatatcttctactaccgttgggggctcttggggttagaggtgggggcggctctgtgggccattgctcccctccacctctcaaaagaccttacagtatttcacagtatctctacccgcacgcgagtattacagtatctagctggaatatccccctacagccccccaggaccctatgaggaagggaaggagccagggagagtgaagtaaggtctgggactggggaggtgggatctgaatgaactcatttgcatatcatttgcatcctccgcttggcagccgctttctacaaactcattcactggagtctgggtcccaatcagccgggtccaggactcctctcacacagacacatctccggaggctgggcctcctgaaaagtgtttgcttggggtgtctgtgtaacaacccctccctattcatatttcttggggaccccctacccagccagccagggtgatctgaaaggtatactttgctagctcagtgagctagttcactcaccatgttggtgagcagagagccacacctttccccattttaccytgggaaactcactccaccatctttgccatctcttgaaagtcccttctgcaatctgacctcaatcttttgtgctgcagtttgtccagaggggacacagatgtggggtcagggatgaggattattgraaaacccatcatctctttttttttccccgtctccctattagccaatccgatctcagagtctctgagtggcctccttgcacccttctcttcagcacccagtaggtgcttaataagtgtttgctgcattgaattatctccctattccttctcatttgccctctagcttcccataccttctccaagtgtcttcctccctttctttgtctggctccctatgactttctatttttttttcctccgtgtggttcccattgttttctgtcctgtctctatcttagtctttgtctgtcttcctcctttcctcaaatgtctcaactctctctccccaatttccccatttaaaaaaaaaaaaaagtgccaaacttccttggaactgagccgctctggggggagaggaccttggatagaggggaggaaatgggaccatttctctttgaggaggtccctaagaggcattgcaaaagtgtggacatggagctaaattgggtcccccttccacagccctcccaccctgagtttttcttagaatctttgtaaaaaaaaaaaaaaaaaacnngaggggggggccggtaaccaatt

SEQ ID NO: 121 - DNA, 1304 bp, Homo sapiens
  misc_feature (41)..(41): n equals a,t,g, or c
ggcacgaggttgggccaagggcagagggggctgcacctgcnggcctgggaagcattgctcagggtggggggctgggaccatggcccgcagaggcactgccacagctgtgagggccaagatgctgtccccccatccaaaacccgtgcgccactgcagtgagtgttgagggcacctctcctcccctcttacacctactcagatgaggcagcagcagacccatctcgcggcgggggttttgttctgttgccgcctaactttctcatcctcggtctctggaaagtcaggctgagaaatcctttcccaggccaggccgctgcggtacactggatggttctgaagctggcccattgaaagagcctcttaaggcagctgggacagaggcctggtggccctgctgggcagcccaactgctgggggagacgtttctgccaccctgggtgatgagcagcttttcccccctggctttctgggggaggagtgggcctccttagggagacaggtgaccctgggtgccacccctgccccgtgtgtgccccgggtgttctcagtggttgctgaaggcaggtagagggtgctgtccagtatcccccatgtgaaggtcacttcccttctcatggagtcagctgagcatcagctcagccctgccatgtccccactcaccctcctcgcctcctgtccggccctgggtttctagcggtgcctgaggcatcactctggcccattgacagatgagaggtctgaagccttcctggccacaggcatcactttctcctcctcctcatgccctgccttgtccttgtcgtgttgccatggggttctgagaggctgggagttcacagacctcagacacagctgagtccgacaaccattggggtggggctgcatcagtctccggagtggcccgccacctcctgaagcagggcctggcccacccaaggtgcctggggcaggcgggcaccgtcattcgctgccattggcttctcagatgtatttcaaggactaaagtgggctctaagatctaagatggcccggcgcggtggctcccgcctgtaatcccagcactttgggaggccgaggcgggcggatgagttgaggtcgggagtttgagtccccgtctctactaaaaatacaaaattagccggacaaggtggcgcatgcctataatcccaggtactcaggaggctgaggcaggagaatcacttgaacctgggaggcagaggttgcagtgagccaagattgtgccactgcactccagcctgagcaacaaaagcaaaactctatctttaaaaaaaaaaaaaaaaaaa

SEQ ID NO: 122 - DNA, 1867 bp, Homo sapiens
ggcacgagctaaccacaccatccatctgcagatagaacatcatcagcaacattgaaataccccatgtgctctctgcttcctaatctcagcgccctcctgtcctccatgatgaatgtttctcttgaaatttactttgttgtctttctttcacttttctgtgtcgttttaccattacatgcattattcctaaagtcgttcttttttttggattttgcttgctttcaaattttatgaaaatggcagcaaaatgtttatattcttctgccacttgctttttttcatttaatattgttttgaagatctatgcatactgatgcacactgatcatattttcagtgttgtactaattacagtttatgactattccacaatttgttcatccatttattccctcatttttgtgtatttggtttgttggaagatttcctggctttttttttctattatcaactgggctgccacatatgtctttatgcctgtttcatgataaatacgtgcaagaggccaggctatgcaaagtgccagctttacaagatcatgagcagctgttttgctacgtggtattgccaatttagactcacacaagtggtaaagaagcatccccagtgtcctaaatccttgccaacacttagtgtcaccaggcttcttaatttttaccaatctggccagtggataatagcattgaaaagttatttttattgtgatttggagtccaatattttttctgtaagaaatgcatgtacaatgttataagaacatgcaaaaatcaaaatactttataaatgttcactttataaaaaatgaatgagaaaaacataacgcattttacataaagaaaatctgtaatgcttttgttattggctgggtattttcacaccttccaagtggtggctgttgataaattcagcaataatacctttatgtttattaatattaaatgataatgtcgaattaattaaatgaagttcaatttattgatagttattcattatatcctgctgttctaactcatcctggaagagaatagagtgaaagagaaattgcctttatatataaatgactcatagaatttcatatactgacctaaatagatttcattgcaaaggtattatagaggtaataacacagtaactcttaggactgttttgagattttcacaatttgaaaaatccttttagatccttggttgacaaatgccctggctgtgctaattatatgacatttcctgacactagtgacgtggcatggcctctcccggcttacattatagattgttttctgcccccatgggatctgatttgttaaggctcattttctattttaatgtggtggaagaattttagaaaccctagaaccccactttcaccctccactgaaacaaatagaagcagtgtattagtcagttttctcactgttatgaagaaatacctgagactgggtaatttatgaagaaaagaggttgaattggctcatggttccacagctgtacaggaagcatggcaacatctgcctctggagaggcctcaggaaacttttactcatggtgggaggcaaagtgggagcaggtgtcttatgtgacagaagcaggaccaagagagagacgggggaggtgctacacactttttttaaaacagagtctcactctgtccctcaggctggaatgcagtgatgtgatctcggttcgctgcaaccttcgcctcccaggttcaagcatttctcatgcctgtagtcccagctactcgtgaggctgagacaggagaatcgcttcaacccgagaggtggagtttgtggtgagccgagatcgcgccattgcactccagcctgagcaatcagaacgaaactctgtctcaaaaaaaaaaaaaaaaaa

SEQ ID NO: 123 - DNA, 419 bp, Homo sapiens
cggcacgagcctccaagcccctgtacataacctggagcgtgtgaccttcagagcttttcactttatgcaaaatggctcctgtgagggctgcaagctggagggtggtgcaggccttgggccacagggaggcgcctgtggaatagggggagttcatgcaccccttttttccccagaggggctggactcaggttagtttgggggtgggggctcctgcactttgccacaggcacggggagggttttctcctcaccccctctgccctcccaacttgggttgtactttctaagaaggtgattccccctgcccttgcccccttccccagaacaaaacatgttgatcatgtgcaatatttcttactgtgccgagaagccgcaatgagcgagattaaagctgtttaacacaaaaaaaaaaaaaaaaaa

SEQ ID NO: 124 - DNA, 2168 bp, Homo sapiens
  misc_feature (676)..(676): n equals a,t,g, or c
  misc_feature (735)..(735): n equals a,t,g, or c
  misc_feature (1551)..(1551): n equals a,t,g, or c
ggcacgagccaggtagccccatcccacacactttccactagtgcctatattgggatgaatcttctggcaatcttccttaaaacttcaagagacctctttaagattctgtagttgggtgagcctgtctgtgcccagggtagcctgaagttaaggtgagggcttaacagtggtaccaggcagtttggatcccaactagctagctgtccttgggcaaatgactactttcctactactgttacttcttgtttctattttctcctctgtaaactgtgggtaatgaaaagttgcgcaaagtagggtgggtgagtgacagctacaggctcactgttcctgaaaactgcaattcgaaattccacagccccctgaaaataaaaagtctttcagtgaatgttcagcaaactcccttggtgggcaaaactgacttgaattaacatgaggctatttatgatattttgtaaatctcagttagtgagactagttgtacattttactgtagaaatatccatgtgtttgatttcagagtactaccctgaaaatacccaggtatttggaagcatagaatatatgaattaaatgacttttttaaaaaattgtggtaaaatacatataacacaacatttactatcttgaccacttttaagggtacagttcaatagtgtttgtatattcacattgntgtgcaaccaatctccagaattctttttacttattaaactgaaactctgtacctatcanacaactccccgttttcccctttccccagcccctggcaaccaccatttgactttccaaatttcttttagaattgcaaaaattccaaattccaaaacacatctggcctcacaagcatttcagataagggattgggaaacttaattagggaaggggaatgcctamcatttgatagagtcaccacctttcgagatgatcctggaagagggagttcttccaatcttacaggggcctgtcaaccacagcacactgcttcccaaywtcgatgcccttttgtaaaagatggcacagkrgcaagaacaagggccattagattctgaccagagcaaacagaacgcaggtacttgcatgggatgtttgataccttccccttcttttctgtcattcccttgatctcagtttttytcagtaagtagaagtgcacatgttggcagctggttctggcatctactttttatttccattccagggaccatgatggaggatgcttttacagtgaaaaggcatgaaaacctttatgcagactgaactcatggggaagatgctgacagtctgtttagaacttgctggaagccattgaaggccagatttatccattttgcagaactctctaggaatcttcagaaaagcagtagggcttactctgctgttccccagcagatcacagtatggagaccggttctgagtcatgctccctataactggaataacacagggaattcttcacatgtttcataatgtgtgtgagtgaaaggacaacccagacttgktattgaaaaacccgmcagtggtcaggcatcattattggaatgtcttctnccacactgcccattctgtaaacatcctggggaaatgtcgaggttactttctgtgtgaggsttgtgckttcttwtcctgkttgtaaataccagggatgaaagtggatgccttyaraattggagccctgaacmcaaaattctgcagaatacaaaaccctctgatggaccactcctgataaatataaaataaccttagtaccagaacttctacttttgggttatggaaaatatgccaagaattttatgttttaaaaacaaactacaggctgggcgtggtggctcacgcctgtaatctcagcattttgggaggccaagccaggtggatcaactgaggtcaggagttcgagaccagcctggccaatatggtgaaaccccatcactactaaaaatacaaaaattagccaggcatggtggtatatgcatgtgttcccagctacttgggaggctgaggcaggagaattgcttgaacccgggaggcagagtttgcagtgagccgagatcgcaccgttgcaccacagcctgggtgacaagagtgagactctgtgtcaaaaaaaaaaaaaaaaaaaaaactcgtagggggggaccsgtacccaatccgaccctgtgagtgtattcgta

SEQ ID NO: 125 - DNA, 1260 bp, Homo sapiens
gtcgggttggatttttcttttgggaatcagtcaaaacccactgtgggttattaagagtagaagatgacttataaagggataatgaggatagcctccttttgctgggaagacagaatttttcattccaaattctaatctccagtgtcaccttgcatgtccatttctggatttatattttgtattttagtatttatatcccatgtttcatttgactctgggatacaagcaattgtcagatgcaccattattttccagaccactaagaaaggaaaaaaaaaacctaccgattaaactgtgacacaccattgattgtaagacacaccctgattggtgaggtgtaaaaatgggggaaagtggctctcttagaatgaaatatcttagaatgaatttgtgtgagtcaggggcaggtgaaagtcattttgcaggattctaatggcttctccatacacctctctccgaagaaagaaaggacttggggtgttttgctgactcctggcagcattcttggcccaatgtattctgggtttgctcttccccgttggagagccctttgccagagaacagccactggcttgttgagccaggaagcttaccatgtgagtgcagcttgtgtctgaagaggctgggccagtacagataatacgaatcacatttcactggctttttgatcggctgtttagctcctggcagcttgttcccagcattcatgtttgctgtgagtaggaaacacaaagaacctcgtcttcagaacgagaaagacttggggctggattctagctgtgcccgtggctggcttagtgctcatgattgtggccctgtgcagaccactttgcctccctcagtctcagtttccccatctatcaaaacggatattcattcctgccttgaatgtgttatgtaataatgattaaggaaaataaaatgcaagtgttgaagttgatacaggatctttatttcattccagaaaactctgtaaagtttcctcatttaaaaattccttccttctgtggccgggtgtggtggctcacactgtgatcccagcagtttgggaggccgaggcaggcagatcacttaaggtcaggagttcgagaccagcctggccaacatagtaaaaccctgtctctacaaaaaatacaaaaattagtcggacatactgtcttgaacccaggaggcagaggtttcagtgagctgagattgtgccgctgcactccagcctaggcaacagagcgagactctgtctcaaaaaaaaaaaaaaaaaaa

SEQ ID NO: 126 - DNA, 1614 bp, Homo sapiens
  misc_feature (28)..(28): n equals a,t,g, or c
ggaaggatcgatcttatttaactatgtntggaacaacccagtgaatatcagactcggaattactatttcattctatttcaaatgcttataaagctactattgtagattatagtgttaatgcaaagtttacagacttttgatatggaaaaccagataaaacaatgttacaaaaggcaaatataaagagtawgttttctttttagtgctttggaaaaatttcacttaaactcttattactgtatagattaagccctataatgctatttatattccaggggaacgaaaatctgaatttgttttatgatttaaagcatctggtttgcatattgtattgtaatactgatacagtttggctgtgtccccaccaaattgaattgtgttaatagttcccataatccctacgtgttgtgggagggacccagtgggcagtaatttaatcatggtggtggttaccctcatgctgttcttgtgatggtgagttctcatgagatctgatgggtgtttttttttgttttgttttttgttttttgagatggagttttgctcttgttgcccagactggagtgcaatggcacacgatctcggctcaccgcaacctctgcctcctgggttcaagcgattctcctgcctcagcatctcgagtagctgggattacaggcatgcaccaccacgcccagctaattttgtatttttagtagagacggggtttctccatgttggttargctggcctcaaactcccgacctcaggtgatccgcccgcctgggcctcccaaagtgctgggattacaggcgtgrccactgctcctggcccaagatctgatggttttgtaagggaattttccccctttgcttggcacttcttcctgctgccatgtgaagaaggatgtgtttgcttcccttccaycatgattgtaagttycatgaggcctccycagcctgtgggactgtgagtcaattaaacgtgtttactttataaattacccagtctcaggcaattctttatagcagtgtgagaacagactaatatgaataccaatactgaaaaattgtttcttgcctcaccttgtcctatgaacaggaattaaattttaaagtattgccttaagatggctgtgctaaataataatcattgcaagagcaatacttttacctgtttctagatgacaatattactaaaatttctcaaatgaagactttgttttagcttcaattacttcagaaaatataaattttaaagatgactatgagataaatcatgaactcagtggaattttcagatgagatggggcgcgttcagggtggtatgactgtagacggaattttcagatctttgtyatttagaagcaagtataggtataacgtggactatcaactgatatctgcaaataatttggttaaaaagaaatttgattgtagtatttgttgctgtaggattataaatgtcaaatatcattgtaaacatttctatatttttagaaatatcttgggtggcctgaaacagaagtgaggaaatcaattttttaaggtgagccatttggcttttttaaaaaattgagattcaacttacataccataaagttcactcttctaaaaaaaaaaaaaaaaaactcga

SEQ ID NO: 127 - DNA, 939 bp, Homo sapiens
ccacgcgtccgaaacgaagctgaattccccttcacggacctgaagcctaaggatgctgggaggtacttttgtgcctacaagacaacagcctcccatgagtggtcagaaagcagtgaacacttgcagctggtggtcacagataaacacgatgaacttgaagctccctcaatgaaaacagacaccagaaccatctttgtcgccatcttcagctgcatctccatccttctcctcttcctctcagtcttcatcatctacagatgcagccagcacggtgagctcagagaacgcaaagggagagagggggagtgaaggattttctcggtaggtaaattcctcctgcattttttgtaggttcatcatctgaggaatccaccaagaggtagatgcttggcatagctcatgctccacttagttcccatgtcattctcaagggaacccattggcacatccgggattggcaccctgagcccccaccccagcccattctgtgaccttcctcctctcccttcttctcccttcctctccctacattgccctcaccctctccccgaaatcttcacatcccatcctttcacgtgtgtctctctctttcagaaccagccattccaaacttccagagcaggaggctgccgaggcagatttatccaatatggaaagggtatctctctcgacggcagacccccaaggagtgacctatgctgagctaagcaccagcgccctgtctgaggcagcttcagacaccacccaggagcccccaggatctcatgaatatgcggcactgaaagtgtagcaagaagacagccctggccactaaaagaggggggatcgtgctggccaaggttatcggaaatctggagatgcagatactgtgtttccttgctcttcgtccatatcaataaaattaagtttctcgtcttaaaaagaaaaaaaaaaaaaaaa

SEQ ID NO: 128 - DNA, 746 bp, Homo sapiens
gcgccaggagccctgtaacatcagccatcgtcaaccccaccgtgttcttcaacatcaccgttgacggcaagcctttagacctgcgtctccttcaagctgtttgcagacaaggttccaaagccagcagaaaacttttgtgctctgagcactggagagaaaggatttggttataagagttcctgctttcacagaattattccagggtttatgtgtcagggtggtgacttcatacgccataatggcactggtggcaagtccatctatggggagaaatttgatgatgagaacttcatcctaaagcatacaggtcctggcatgttgtccatggcaaatgctggacccaatacaaatggttcccagtttttaatctgcactgccaagactgagtggttggatggcaagcttgtggtctttggcaaggtgaaggcatgaatattgtggaggccatggagtgctttgtgtccaggaatggcaagaccggccagaagatcaccattgctgactgtggacagctcttataagtttgacttgtgttttatcttaaccaccagaccattccttctgtagctcaggggagcaccctccaccccatttgctcccagtatcctagaatctttgtgctctcgctgcggttccctttgggttccatgttttccttgttcccttccatgcctagctggatgcagagttaagtttatgattatgaaataaaaactaaataacaaaataaaaaaaaaaaaaaaaaa

SEQ ID NO: 129 - DNA, 1647 bp, Homo sapiens
cccacgcgtccgaggtgaaaaccatcctttattgttgctggcacaacttgatatatagtctgactcagaactgaagctcacatctcaaattcatttcatgccagtaaatgtggcaaagagaagaaaggcccaagagcgagacaagaagaatggagaagggggcagccaagaagaacttctgggttcagggtactgtttatttgctccttctcttcatgcctgtggctggatgtcccacaacactataagaaatataagtcaagccctttgtgttaagcaagaactacagactccatcttttcacccaaatcatgaatgaccaataaaaagcaagttattccagaggaagaagcagcccttgaaatgttaaggcttaggcttgaaaggtgaagagcaggaattctctctttcaaatcctagagcataaacccatgtgtggccaagtgagatcagccctcaagggcacatgccaagggcagagcagcccatgtagacagcttcggagggcatgggggtgtagggagttcggggtagctcctcattaactatttgttgggtgagtaaaggggtgaggctcagtggcaggtacctctgcaatgacaagctgcctcccctctatgtgtttagcatatgttattagaacatgtccgacacccctaccgctgccatttgggccctttaataaagccaagtagagaaatctggcaataaaaggcaaatgtaagcatgctttctttaagacgcatcataaatggttttctttaagtgaatggaagagtttgacagagatacacctttgtaagaaaacattaagaatgctggctggctgtggtggctcacacctgtattcccagcactttgggaggcctaggcaggaggattgcttgagcctgggacttcgagaccagactgggaaacatggcaaaatcccatctctacaacaaaaatacaaaaattagccaagtgcggtggtgtgcctgtagtcctagttacttgggaggctgaggtgggagaatcacctgagcccaggaggtggaggctgcagtgagccatgccaatgcactccagtctgggcaacagagtgagaccctgtctcaaaaataaataaataaataaatgaataaagagaatgctaatcatttctgggttcactgcgactcactgtagtgctggggatcccccttgtaacactggaactgaaagacagtgatgaaagctatgtcaagcattcattattctgaagaggaggagaaatgccacatacctttcccatgggacctgtggtggaatgaatccatacttctgcctcacttcgagcagacttttgttctcggcgctcctcacgatggagtttcatgcttcattttcacatctctctgcacaattagattgggagctccttgagggcagagtacgtgccttaatctttatctttgtaatgccacaatgaacagagtgcctcctggtacactgaggagcttaagaaatactcactgaatgcatgaatgaatgaatgaacaaatgaaggaatgactaaggatgtttgtagtgctataatatagaatgggatttactctgctttaccagttagtttcataataaacaaatagtctgtaaaaaaaaaaaaaaaaaaaaaaaaaaaaaaaa

SEQ ID NO: 130 - DNA, 859 bp, Homo sapiens
gaggtgaatgagctggcgtctccaggtccactctagtcactggggaatcaggggagtcccaacagctgagggcatgtgacagggaaactctgcagcttgcaagtgtccctgagtgtgcatcagatgctctgttcctccacggcagagtcgctccactagagagcctggcgccagtcaccaagactccctgacccttgtctgccaagaagaaacagccaagcctttgctgtctctgagggtctccctcgggtgtccctggcagactgcaccagcctcacaggcatctcccaagccgtgggtcagggatgagtctctcggtggcttggtggctctcagtgtgctcagcagcaggtgaggggcctaccccagggcagtgctcggcattcagaaggccgacaggaaaccagaagtttccgaatattatggccccatctcctcttcagtcttcctttccctgaagctcttgtaaacccctttctttcctagctcaacacaacaaaagaaaaccactggataggccgggcatgctggttcgtgcctgtcatcccagcactttgggaggcccaggcgggtggatcacctgargtcaggagttgaagaccagtctggccaacgtggtgaggccccgtctctactaaaatacaaaaattagctgatgatgcgtgcctgtaatcgcagctactcgggaggctgagacaggagaattgcttgaaccgaggaggcagaggctgcagtgagccgggatcgtgccacttcattccagcccgggtgacagagcgagactccgtctcaaaaaaaaaaaaamaaaaaaaraamaaaaaaaaaaaaaaaaaaaaaaaaaaaaaaaaaaaaaaaaaaa

SEQ ID NO: 131 - DNA, 2285 bp, Homo sapiens
tgctcctgaccacggctgtagaggtggcccagcgctggcgrgagctggctgagaagctggccarggtctccaagcagcagatggacgcctacgagtctccccaccgggacaggaacggggttgtggacagcgaggccatgtggaagcctgcgtatgacttcttactcacctggagccatcagatcggggacagctaccgggatgtcatccaggagctgcacctgggcctggacaagatgaaaaaccccatcaccaagcgctggaagcacctcactgggactctgatcttggtgaactccctggacgttctgagagcagccgccttcagccctgcggaccaggacgacttcgtgatttgaatgggtcccctcccctcctgctgctctggagtgcaagccctcttctgccctgcgtgccctgctgtcaccgcggagctgaagagggaggaaggggcggctgctcagacagatttagggcccgccagctaggctacacccatcatgcgccgccctcctccatcgagggagaggcctgaagggactgcctactgcagctcgttgccaatcacatagctttctatttgttaagtataaatttaaatttaaaatcacttttttaacgaatggggggaagggatctatgagaaaggtggtatctaatttttttatggaccataaaggtttaaaagaaaataggggcacaggctgttgaggtttttatgttgttatagacctttttaaattatgttagagatgtatataggtatttaaaggtcactgggagcgtttctgattcccggccacactttgcatttcaacactcagcccggaaagatgctcgttcggttgttggacctctttcactccctgcgtgtaagaaggtgaatcacgtgggaaaaagtggcttttcagtaaacgggtacagctcattctttctgagaaggccccaggtcctgctccctcctcggatttgattgtcttccgtgctttgcctcactcgtagtaaatgaccatccatagaatatgtgaatctttggtgagcttcagtgggcagagtgaagtcccgcattagcatttaggtgccctgagctgtttctgccaatagattagaaagcagccatgagttgacagtctttagggcccctgccagtgtgcaattagtcattgacaagaacaatgccatttgagagtgaggtggtccctgctgctacgaggccattgtactgttttttccttgaggtcaaagcagtgcttcccatagagtttgctgcctcttctgtggacaggaagaaaacttcatgaccgaatcagagccttggtggccactgactctcgtgcttattgcagatgctgtggttggcctcacaagcaacgccttatgctgatgtgcagaggtgccagctgccatttgccaaactctgcatttcatttcatctaaggcttaacccctcttccttcctggtgtacctgtgtctcctcggaaggaagtcatagtttagatgaaaccattttttgtacaatgtaaagatcatctgagcaagatgagcattttgtaaaaatgaaaatgtgactcacataaaatcaggaacttgacacagtgttgcattaataactttagggtgcagacatgctgtgtgaatctcacaatgcgtcgtagatgtcgcgtgttggaagggagcaggaggaaggactgatactggcaaatcagtagagtgaggtgatccttagcaacgtgccaggacacttcctgtgtgcctgcagttgtcagggaccatttgggatcccgaatctcattctctaaaactgctttcttgaaacatgttacttccttagtataatcaatgtatactcccttactggcctgaaacgttgtatagctacttattcagatactgaagaccaacggactgaaaaaaagaacaaacattagctattttatgctgcaagaaccaggacacacaattcgccaatcatcccaccatataaccttcgattgtgcttctcaactccaccccataatttctcccagagaccatctatcaccttttccccaaagaagaaacaaaaccagttgcaccttaaaccatggatattttttcctcaggggctttaaatagtttcctatgcaacgtgtcttgtagcacaaataaaattctacaaaagttgcagtaaattttatttggatattttaacctgttaagtgtgtgtgtgttttctgtacccaaccagactttaaataaaacaaacatgaaacctaaaaaaaraaaaaaaaaaaaaaaactcgag

SEQ ID NO: 132 - DNA, 1533 bp, Homo sapiens
cctgtctggatgacttcttgcggctgttctacccctccccctccccgcgtcgcctgctgctgtcgtcgggaggtgggtgaggtgacgcaaacagccccgttgttgccctccgcgtatcccctcaccacctttgcggccatccacgactttcgcaccttccgccattttcctgcctgtgagggtggacagatcgcgctcgggtctcggcctcctgagtgccggtgactgcgggaggcgacggatgcttctgggggtgtgagctggggaagttcgtggtcacggatgcgtgtggggttgctgctcagtctgtaacggsaggaaagatgaatgggagggctgattttcgagagccgaatgcagaggttccaagaccaattccccacatagggcctgattacattccaacagaggaagaaaggagagtcttcgcagaatgcaatgatgaaagcttctggttcagatctgtgcctttggctgcaacaagtatgttgattactcaaggattaattagtaaaggaatactttcaagtcatcccaaatatggttccatccctaaacttatacttgcttgtatcatgggatactttgctggaaaactttcttatgtgaaaacttgccaagagaaattcaagaaacttgaaaattccccccttggagaagctttacgatcaggacaagcacgacgatcttcaccacctgggcactattatcaaaagtcaaaatatgactcaagtgtgagtggtcaatcatcttttgtgacatccccagcagcagacaacatagaaatgcttcctcattatgagccaattccattcagttcttctatgaatgaatctgctcccactggtattactgatcatattgtccaaggacctgatcccaaccttgaagaaagtcctaaaagaaaaaatattacatatgaggaattaaggaataagaacagagagtcatatgaagtatctttaacacaaaagactgacccctcagtcaggcctatgcatgaaagagtgccaaaaaaagaagtcaaagtaaacaagtatggagatacttgggatgagtgaaaaattacatcattggacatgaaggagtttcaacatccagcttcatctaggtggtcatgattacctgcatgctttgagctcagcagcagtcttcataaacacatttaaaacaagatcctgggtttttgtggtttgacttctatggtgttttaaaaaaacacagatttttagtgttaatattgtgtaaatgtactcaccttagggattcatttgaatgatggtattataccatgattgtatacagtttgtgaaattgttgcaagggcaaagataactcttaaaaaaccgtcgagattacaatgctctagaatcagcatataagaaaataaatgatatctgcatgttgaattggggtggatggggggagcaagcataatttttaagtgtgaagctttgcatcaagaaattattaaaaagctttttttctccaaaaaaaaaaaaaaaaaaaaaaaaaaaaaaaaaaaaaaaaaaa

SEQ ID NO: 133 - DNA, 1778 bp, Homo sapiens
cggcacgaggcaggatgagaatcgtggagtgcggaggcaggtagcccgtggggtgcctcctgtgctcggtggagctggaagccgcttaggtgccagagctttttctgtgaccaaattctggcttttgaaataacccagtaacagttctctatcttttcattctgcccgctcctcccacagcctggtccctcagaggaaaggaaggacaaggagtgctttgcagcacgtgcccctggcggcgtcatggtactttcctggccctgctgcccctgcccgtccgtcttttatgatttttatttactcgtattggtttttttaaattctatttttgcagaactgagcctttttctgccctgcctttctcctgtttgtctttcctttgtggttgatattgtgttgtcttctccaaagtatttgtcattagaaacttacagcaagcgtatactttttagcatgtcagtatttttattatgttgccctccttgtctttgataactgcctgtggacgctgtgtaaactttctggtaaaaatccttttttttccccctgtagtctctccatttcaaggactaaaacagtcttgcgttaagtaaaaacctgtgaccagagctgaaggaagactctaggactgaaaactgcaacagaaattagcacaatttgaaaacaaaacaaaattgcaaaagccttagttgctttttccacctaagaagttgatcaatggagaaaatgtccactggagtttgaataatgaactttgagtttgggtgcaagcaaatgactcagagaagggtccagctctcaagctgaatgacaaacatgctgttgtaaatttagtctcaggtgtaaatacccaagccctctggtacccagggagctggctggtctgtggtgcatgtgtgtccctgtgatggcaatcattgtagttgctggccttcagaagaattgaggatctgatggaggttttttatgtatttattttctgttcaccttgtgaccctgtgtcaaaatttataaagatacaaaaggcattactgaaatggtactttctgtaatttgatactatttggcttaatcatcttcacttgactatttgtaatactgttgtaatgttaactctgttaagtacccaagctgcttgtcttccaccaaagagtgctttattaacaagaatctgtgaaaatcacatttaaacactgttgcatgttgtaagaccaggtggtaccttagtaacctaaaacttgcaagagaatattaatggtagctttagaagactcaggaggagaaactgacttcagagttggaagatgttgcaagtcgttcctttttctgtccttcagggactgaagaactgggaggctgcccattgtttggttgccagtcatacaaattaaaatcatatttccttccatgaatggaagaaacacactattggtttttccccttggaaacagcaatcccaaataatgtcggcttacaaaaaaaaaaagttaccacttttttagagtccttccctgtaacattggattttttttttcccttatgagatccacctaaggccattgacgtggcctgcgatctcagtgacaatgatctgcttctggatctcactgttgcctttggttagggaacacaactagtaactctgcagagtgccttctcccgcagccctactggaacacagcagagtctgtgccatgaagcagttacagaaacagaattgatgtgctgctaaaaaaaaaaaaaaaaaaaaaactcgagggggggcccggtacccaatt

SEQ ID NO: 134 - DNA, 871 bp, Homo sapiens
gtttttccttgtagcatttggaaatgatttactggaattacaaaacctatttttcctttaaatttcagctttggctctggctgctttttagaataatgcaagataaaaatcacacctgagggctgaaaacggagagggaatgggagacttgatatttaagcagcttgaatggtttttcttttctttatttttaaagaaatgcacttgcctatgatactgtctctccagtgaaatgattactcctccattactctattgatacaatattgtgcatgctagtgttgtatttctatacagtagcttgaaattgattaacttatactgtaggtgttatgtattcctatgacaaaaaaaattaagtcttcaaattttttaaaggttttttttttttaatttaattttcccttttgggggtaaagtttgctctaccaaatagtgattgtaacaaattgatctgttttggatgttgctatagtgacatgcagttatatattttgtttttaaaagggggggagcaaaagaaacaccagtgttagcttaatcttaatgtctggtgtttgtcatggtgaaattataactattacagtgtttggaaaacaacaaatatgttctctgaatgagcctttgtgctttttgtcatgttatgcagtgaactatttttaaggtctaatcagtgattatttttccagctccgtgtttctctaaggaattatttcacacacggaccatctttagcagtttcctcagtgatggaatatcatgaatgtgagtcattatgtagctgtcgtacattgagcaaataaacttacagatctgaaaaaaaaaaaaaaaaaaaaaaaaaaaaaaaaaaaaaaaaaaaaaaaaaaaaaaa

SEQ ID NO: 135 - DNA, 1437 bp, Homo sapiens
ggcagagcagctccaccgttaccgctaatataagtaaagtttgtaaaattcatacttaataaacaatttaggacagtcatgtctgcttacaggtgttatttgtctgttaaaactagtctgcagatgtttcttgaatgctttgtcaaattaagaaagttaaagtgcaataatgtttgaagacaataagtggtggtgtatcttgtttctaataagataaacttttttgtctttgctttatcttattagggagttgtatgtcagtgtataaaacatactgtgtggtataacaggcttaataaattctttaaaaggagagaactgaaactagccctgtagatttgtctggtgcatgtgatgaaacctgcagctttatcggagtgatggcaatgctctgctggtttattttaagtggctgcgttttttttagtttggcaggtgtagactttttaagttgggctttagaaaatctgggttagcctgaagaaaattgcctcagcctccacagtaccattttaaattcacataaaaggtgaaagctcctggttcagtgccatggcttcatggcattcagtgattagtggtaatggtaaacactggtgtgttttgaagttgaatgtgcgataaaattattagccttaagattggtaagctagcaatgaatgctagggtgggaagctggtgagccagtggccattagataaatacctttcaagtgtgagcttagacgtcaaccctaaaatacttaaccgtaatgctaattgtgatcattatgaatcccttcagtcacattagggggaaagtagttggctataagtaccgtcattcttagtccagtcagtcttaaaaacatcttgggttacccactctgtccactcccataggctacagaaaaagtcacaagcgcatggtttccaaccatatgtgttttctgcagttatttctcttgttctggccaaacaaccctaaaaatccttaccattccacaaagttggaccatcacttgtgcacccactttgactatgagtataccaccacattgcatttctgtttgcaccatgtcttccaggagactagactactgttgtccagggtcaatttgagtgtaaagaaaatgtagacaaggaattgcccaattttaaattctgactttgctgacttaatttaaatgctcgttctgaaccaattttctcctatcttctctaggggtttcaaaagactcagttaattgatttccaggaagtactcatagcaagttcataaaagttcttgagacctaaatttcttcacaaaaaaagaaaagatcttaagtcatacattttaattgtgtagaggttgttcaactgaaggaataaatgtctattaaactaaaaaaaaaaaaaaaaaaaaaaaaaaaaaaaaaaaaaaaaaaaaaaaaaaaaaaaaaaaaaaaaaaaaaaa

SEQ ID NO: 136 - DNA, 1205 bp, Homo sapiens
ggcacgaggtttgtacattggtgttttagacatgctattgtatacttaatagactgcaaacttctatatgcatcggataaccaaaaaatctgcgttgcttgctttattgcaatattctttattgtggtggtctagaaccaaacctgcagtgcctccaaggtgtgtccgtgtatcataatttttcctttataaagttcctggtatcatggggctaaatgaaaactgtctctcctaaatgcctcaggattactttgtctacctcttgcccgtaattgccttctggggacctattgacatggatgtagttaacgttttcattttatggcatgacagaaggggcagtggagcagcttctaatttttcaagagtatttctcagtaattggggttaatgagtaaaaaaaaaagtgcattgaaatttcacaatatttgtacttgcagattactacaatgcagctagaacgtgaaaaggctcttgaacataagaatcgaatgtcacgaatgcttgaagacagagatttattcgtaatgcgactcaaagctgcacggcagtctgtttatgaggtgagcttgctgatttttgggaaatgtttattcatgagctttctagtattggcctaagggttctcccttaacaaattggtatattctttattgagttactatgtgtaacggtcattcaaataatagaaatttttggatgatatttcataagcaaaacaatcatcaaaattgttctaaaggtgaaagttgaatgcataatttaatacaagttttgtttactgtttttgttagaaatgaaaaaactagatcaaaatgtcctgggcttagattctaatttgaccattgaattattttgtataaagacaaacccactggaggtaggtaatatcaacaatttaaatgttttaaaatttggcctgctgacaagttaatggtcatttggaagttagagtttttgtgctgagaggttgctttcgatgattctgatacacttgagagtcttttgtaaacctaatagctttctggagtttgtgctcttgacaaagtgtgccctttttgggttgggggttacttcgattgcaggaaaaacttaaacagtttgaagagcgattagcagaagaaaggcataatcgattggaagaacggaaaaggcagcgtaaagaagaacgcaggataacatactataaagaaaaaaaaaaaaaa

SEQ ID NO: 137 - DNA, 1153 bp, Homo sapiens
ggcacgaggagcatcaccgcagaaacaaaggctccagcctccggacaccatgtctgtgcgcttttcttctacctccaggagacttggctcttgcgggggcactggctctgtgaggctctctagtgggggagcaggctttggggctggaaacacatgcggtgtgccaggcattggaagtggcttctcttgtgcttttgggggcagctcatctgcaggaggctatggcggaggtctgggcgggggaagtgcttcctgtgctgccttcacagggaatgagcacggcctcctctctggcaatgagaaggtgaccatgcagaacctcaacgaccgcttggcctcctctctggagaatgttcgagccctagaggaggccaacgctgacttggagcagaagatcaagggtggtatgagaaatttggacctggttcttgccgtggccttgatcatgattacagcaaatatttcccaattattgacgaacttaaaaaccaagtataatttctgcaactaccagtaatgcccatgttgtcctgcaaatgataatgcaaaactaacagctgatgacttcagactaaagtttgaaaacgagctagcgcttcaccagagcgtggaggcggacatcaatagtttgcgaagagtcctggatgagctgaccttgtgcagaacggacctggagatccagctggaaactctcagtgaggagctcgcttacctcaagaagaatcatgaggaggaaatgaaagctcttcagtgcgcggctggaggcaacgtgaacgtggagatgaacgcggcccccggggtagacctcacggttctgctgaacaatatgcgagctgagtacgaagccctcgcagagcagaaccgcagggacgcggaggcctggttcaacgaaaagagcgcctcgctgcagcagcagatctctgacgacgctggcgccaccacctcagcccggaatgagcttaccgagatgaaacgcactcttcaaacccttgagattgaacttcagtccctcttagcaacgaaacactccctggagtgctccttgacagagaccgagagtaactactgtgcacagctggcacagatccaggctcagatcggggccctggaggagcagctgcaccaggtcagaaccgagaccgagggccagaag

SEQ ID NO: 138 - DNA, 990 bp, Homo sapiens
ttaagacacgcgtcccaggtgtggatgtgtgggtgcttaagacagcagactgctgctttgctgggccaggcctgggtttatttattacaagcagttcaggaagcacagacatcacgttgttcacttgcttcactgatgaatgtaataattgttctcgttcatgccctttgcccctggtgtcggggctgtccacactggggaccattggtgcccccatgattattagctccctgaagcctggtgggtcgtcagggcttctgtccggtgtttaaagacccatcccagacaagcccaaaccacctcagtttgaagagacatagagggacaggcagacggggcctcagagggatccagcctcatccagcctcccggcaacctcaggagagcaggccagatggggcctcagagggatccagcctcatccagcctcccggcaacctcaggctggttcccttccagtgccgactccacagccctgctggttcccttccagtgccgactcccaggctgagtcgctttgcagcgtttgggacgtacgcagggcctgtgctgtgggccagccacttagtgcacttcctgagctcagaaacacgcagtggttcagcactgagtcatgcttgcttctctacgcactgatttgttctattccagttttcacgtacatcgttttggtgacatctctgcgttatcatttatttatatggagtgtattttctccaaaacttctctacgagggaatgcacctgctcattacagctgctgtctgtgtattcttcacggcaatggatcaaaccagactcacacagtcttagactaagctgaacactggaaaaataatacatgcttaaagtctgctgttattctaaaatgaaagatatgaattcaacaaagttgatggataactttctttgactgctctacctgaatttagactaagcagtaaatagtttaataaaagatcactttaatataaaaaaaaaaaaaaaaaaa

SEQ ID NO: 139 - DNA, 1275 bp, Homo sapiens
gcaactagtgacaagagctggtcgcaacacttagtaggaagcacagtggcataaggaaacctggactagtggggcctttatatctaaaattatgtattattccttatakgcagaatctgtaagtacgttatgactgctaatgacttttaaagcaaacatgttaacgatctttctatggtaaaaactgttatttggggacatcaccagatgatgtggacattcttgcaggtattttggcatacccaggcaagctgtcattggtgtatattccagttaacctctggagatgatcgtaacagtttacagggcctttccatttgggatggatatatcaagagggagacaaactggtccaaatcaccagaaagaaaatctcacagcaccgacttggcatctgtgttaaaaaatagcaactatatttaaaataaactgtacaacataaaaaatttaaattaaaaaatgcattaagcaagttgcctttagaaatgtgaagacattttaaaacactacaagataatgagcaagtctcacctacataatcatggctccacagacggtgccagtccatgcatccaccatttctcaacacctacaaagttttaagatctgcttggttcagatactgtccagccacagcagctccctctgctgtagagagcagcatattcagctttgcctttttatttcagatactgaatatcctttggcaatttcagatatcacagcaaaaaaaaaaaaagttccaagtgtttttggcaatcatattggtgatagtgtttttgttactcttaagaatgttatggtggaggtgggaggatggcttgagcctaagagttcaagaacagcctgggcaacagttgagtgactttgtctctacaaaaattaaaaaaaattagctgggtgtgttggtgtgcacccgtagtcctggctagctactccagaggctgaggtggatcacttgagcccaggagtttgagactgcagcaaaccatgattgtgccactgcactccagcctgggcaacagagaccgtgtctcaaaaaaaattgcacatataacagataaagtaatgataaagtaaatacgtaaagtaaatgagtaattatgggacattctaattcctcatcccctatgtctttaagaattaaaaattctcagtgtagaaggaagagtgtaatacagaattggttaaataaaaccctataagctttgaatttgaattggatatacaattggtaaaataaaaaccctatgagctttgaaaaaaaaaaaaaaa

SEQ ID NO: 140 - DNA, 1157 bp, Homo sapiens
ccacgcgtccgcttggcattggtttacctgccaggtgtgatagcagcaattgtccaacttcataatggaaccaagtataagaagtttccacattggttggataagtggatgttaacaagaaagcagtttgggcttctcagtttcttttttgctgtactgcatgcaatttatagtctgtcttacccaatgaggcgatcctacagatacaagttgctaaactgggcatatcaacaggtccaacaaaataaagaagatgcctggattgagcatgatgtttggagaatggagatttatgtgtctctgggaattgtgggattggcaatactggctctgttggctgtgacatctattccatctgtgagtgactctttgacatggagagaatttcactatattcaggtaaataatatataaaataaccctaagaggtaaatcttctttttgtgtttatgatatagaatatgttgactttaccccataaaaaataacaaatgtttttcaacagcaaagatcttatacttgttccaattaataatgtgctctcctgttgttttccctattgcttctaattaggacaagtgtttcctagacataaataaaaggcattaaaatattctttgttttttttttttgtttgtttgttttttgtttgtttgtttgtttttttgagatgaagtctcgctctgttgcccatgctggagtacagtggcacgatctcggctcactgcaacctgcgcctcctgggttcaggcgattctcttgcctcagcctggccaatatggtgaaaccccgtctcaactaaaaaaatacaaagagtagccgggcgtggtggcatatgcctgtagtcccagctgcttgggaggctgaggcaggagaatcgcttgaacccgggatgcagaggtggccatgagccaggatcacaccattgcactcttgcctgggcgacagaaggagactccatctaaagaaaaaaaaaaattagccgggcatggtggcgggcacctataatctcagctgtgtgggaggctgaggcaggactattgcttgaatccgggaggcagaggttgcagtgaaccaagatcacaccactgcactccagcctgggcgacagagtgagacttcatctcaggaaaaaaaaaaaaaaaaaaaaaaaaagg

SEQ ID NO: 141 - DNA, 1885 bp, Homo sapiens
ggcacgagtacaaggtggcggcgctgggcctggccaccggcatcgtcttggtgctgctgctgctctgcctctaccgcgtgctatgcccgcgcaactacgggcagctgggtggtgggcccgggcggcggaggcgcggggagctgccctgcgacgactacggctatgcgccacccgagacggagatcgtgccgcttgtgctgcgcggccacctcatggacatcgagtgcctggccagcgacggcatgctgctggtgagctgctgcctggcaggccacatctgcgtgtgggacgcgcagaccggggattgcctaacgcgcattccgcgcccaggcaggcagcgccggggacagtggcgtgggcagcgggcttgaggctcaggagagctgggaacgactttcagatggtgggaaggctggtccagaggagcctggggacagccctcccctgagacaccgcccccggggccctccgccgccttccctcttcggggaccagcctgacctcacctgcttaattgacaccaacttttcagcgcagcctcggtcctcacagcccactcagcccgagccccggcaccgggcggtctgtggccgctctcgggactccccaggctatgacttcagctgcctggtgcagcgggtgtaccaggaggaggggctggcggccgtctgcacaccagccctgcgcccaccctcgcctgggccggtgctgtcccaggcccctgaggacgagggtggctcccccgagaaaggctccccttccctcgcctgggcccccagtgccgagggttccatctggagcttggagctgcagggcaacctcatcgtggtggggcggagcagcggccggctggaggtgtgggacgccattgaaggggtgctgtgctgcagcagcgaggaggtctcctcaggcattaccgctctggtgttcttggacaaaaggattgtggctgcacggctcaacggttcccttgatttcttctccttggagacccacactgccctcagccccctgcagtttagagggaccccagggcggggcagttcccctgcctctccagtgtacagcagcagcgacacagtggcctgtcacctgacccacacagtgccctgtgcacaccaaaaacccatcacagccctgaaagccgctgctgggcgcttggtgactgggagccaagaccacacactgagagtgttccgtctggaggactcgtgctgcctcttcacccttcagggccactcaggggccatcacgaccgtgtacattgaccagaccatggtgctggccagtggaggacaagatggggccatctgcctgtgggatgtactgactggcagccgggtcagccatgtgtttgctcaccgtggggatgtcacctcccttacctgtaccacctcctgtgtcatcagcagtggcctggatgacctcatcagcatctgggaccgcagcacaggcatcaagttctactccattcagcaggacctgggctgtggtgcaagcttgggtgtcatctcagacaacctgctggtgactggcggccagggctgtgtctccttttgggacctaaactacggggacctgttacagacagtctacctggggaagaacagtgaggcccagcctgcccgccagatcctggtgctggacaacgctgccattgtctgcaactttggcagtgagctcagcctggtgtatgtgccctctgtgctggagaagctggactgagcgcagggcctccttgcccaggcaggaggctggggtgctgtgtgggggccaatgcactgaacctggacttgggggaaagagccgagtatcttccagccgctgcctcctgactgtaataatattaaacttttttaaaaaaccaaaaaaaaaaaaaaaaaaa

SEQ ID NO: 142 - DNA, 1031 bp, Homo sapiens
  misc_feature (1024)..(1024): n equals a,t,g, or c
acagcatgagcatgagctgtccctggttgggcacctgggcagtggtctgtgcttcacctagacaaagaaatgacagtcaaggaacagatgctaggggaggaaacagagctgaccagaggttacctgggcacaagaggaatctggaagagcgcacacctgctgagcaaacctaaggcagtgacatcagggtggaaaaaagaatacatatgcttattgttagtgttcaccaaaaaaggttcacagtgcgttgctctaaaagytcagttagcttctctaacacaaggtagatacagtgtgaagtgccaaactcagtttccataaaactttttacaagcatgtaagttccttattgactttttcaaaagaaattcatgtaggaaatgcatcctaactcattctatgatgccagcattmccctgatactaaagccagccaaagacactaaaagtaaagaaaactgtagagcaatatcccttatgaaggttgatgccaaaatcatcaacwaaatactagcaaatcaaattcagtagcaggctgaaaggattatacaccctgaccaagtacagtttgttcctggaatgcaaggatggttcgacacatgaaaactgatcagtgtaaacagaatgaagggggaaaaacacatgatcatctcaattgatgccaaaawaaaagcatttgacaaaattcaacatctttcatgatgaaagcactcaatatactagaaatagaaggaaactacctcaacataataaaagttatatgaaaaatctacagcaaatatcatactcaatggcaaaaaaactgaaatcttctcatctaaaatcaggaacaaggcaataatgcccacttctattcaacatattactggaagttctagctagagcaattggacaagaaaaagtggggggtgggggagaagaggcatccaaactggaaaggaagaagtaaaattatctctattcccagatgatgtgatcttatatgcagaaaaccctaacagttccacaaaaaaaaaaaaaaaaanactcgag

SEQ ID NO: 143 - DNA, 779 bp, Homo sapiens
ggcacgagatagaataatgcagtggatttctatcatgctaatttattttgctttggagcaggtacctttcctctatggcattattttcttgcatttctcataaaggggaggatgcatcccaactgaatggctcactggcatgtcttttatgtgttcagttgccattcctagctttggaaagtttctatctgtccatgtgtatacaagtcaatgccccatttttgtttttcttttaaccgaggtgtagataaggaaaagggacatttttaattacttaataaccggaaatgcagatgtgtaaggagaatgagaggaatgagttaaagtggttatgcatttttctatagatgagccattacagcaaggaattttacagttgacttctctgaacctagctttaccacagtgattaaatcctatttagaaaggggaatctgatttaaatgtgtgattccttgtatttgctcctatcacaaagatatattaaaggaggtatgccattaatgaaatccactgtcctgagtattatctttcctcctgttgtactttctcagagactatggcagaatatctggatcttccttggattttgtacacatattgtagtgaaatgtgtcctacatctgaaattgcatgggactcatgcccagcaatctggttctaggcctttgacacctgataatatgagagcaattggccagccaatagccataagcccagaggattttagagcttcatgtgtggcttttaagagcaggtttgaaaaaaaaaaaaaaaaa

SEQ ID NO: 144 - DNA, 2644 bp, Homo sapiens
  misc_feature (428)..(428): n equals a,t,g, or c
  misc_feature (430)..(430): n equals a,t,g, or c
  misc_feature (433)..(433): n equals a,t,g, or c
gctttaatccacataataaccctatgggatagataactgaggaacagagaggttaggtaatttgtctaasatcacagagctagggaatgatggcaccakagtttraactgcatactgactccagcaacttctggggaaaatcacactcagtgttttgtagtaagatttggatttagggggtaaacagtactaacagagagttacagaactttgtacttctctcatctgctatttagttcattggacttgaactatgggctaggagagtgagaatggatcttggagattatctagttagcagcccttatagttcatggaactaagacccaggctgtgcagtagcctgttcagggatatgcatatgggaaaagctcaagccagaatggagtgcttttttactgaagaattctaaaatgtttctgcttcananaanatcctctctctgtcctttttccccttctttctccttgtcttctctccctttttatttatggtgctatcatgtgttagaacaacaataatagaaagtacatggaaaagatcacttaaaatcctaccacaccatgttttaaactattttcatgtattgctgatttctgaatctgttatcttgttagattatgacattgatttaagtttcatagctcaaatatggaacctctataaagaagttccagggagtggaaagggaagggaaaggaattgctgttatttattaagagcctactgtctgtcagtcactctgcctacctgctgtctctgatgtctcaaacttccttcccactttatgggattctgtaggaggaccagcacaataccctgcacaaagtgagcattctgcaaacctaaagaacgaggaaatgaatgaaaggaagtgctttgaattcagcagaagaaagagataacaatcatgtgcgaactactcccagctattgcctattgactgttagctttcagttcatttttgtacaatttaaccattgaggcaaatgtgtatacaggatmccatggaatgctgtttacaggtatagattttggtctkgtacttttgaagcagctgaatmctgataaggcctgtgtccagaaactatttttttccttcatttaatcaggtttctttacttccttgaccacaaatattatttgctaaggaaatttcttctttggggtggtatttamccatgcaagtggggaaaattgtgctacgatactgttctgacagcctgtggacttgaggaaaaaactgcaggagcagagtttcctttcagcagtcaactataggctcagtcacttcttgacaaaacataagttaaaatagtgctgatttctttttgaacataatcaattctaatggaaactgttccagctgagtttggaaacacacagaagcagccttcagttaccattgaggctattattgccctagtaataccaaagagactctttcagcctacttatttgtattggatgcttgtagggctatttcatggggacctggtgttgactctcagtgacttccactttgactctgagatttatcttcaaatgctgatgcattctaagatttatagaagtacaaacttatcttattattgctaatttgtcccattactagactatgccccttagagttataattatgactagcccaattacattttattgtcgtgcccttttttggcaaaaaataaaatttctttgttaaactcaaggatttaaaatttagcacaagttcataaacttactttgatacttcttcatttcctttttaaaaatacatcagtagactcaaaatgtaaaagtggcttagggctcacttgacctctgaaaggtggctgactgacttttagttaaaaacaatatttgtctatatatctctgtcatctatttgtggctactatgtgttgaaactttgtggaacagatatctttctcccttcttcttccctcctctctgcccaaaagacacacacacaaacacacacatgtacacacagagacttgaaggcttttgtgtacatttaccaactactacaacaacaagaaatgaagaacaatacagctcaactctgtaaatctagaatggggaatctattycccaaaggctgtatgcagtatcttttcagcgagtcatggtagcctccaacaactagtagcactctttgtgcatgaggatatttctgactaaaaatccacctttgttgataakgtttgttcactgtaaaggaattgagtggataaaagaggtatacactttcctttctatatcaaggaaggtggaatattcaaacagaacactctatgtgtgcacacgtgcacatggacgtgagtgagagatgatttatagatatagaagagtcctactgtattcttttaagaggtattcagcaactatttgttgaataccttctgtgtgtttatcactatgctgagttcctggtgagaggggaatgagtgtaaagcagggatgttaycactatgctgagttcctggtgagaggggaatgagtgtaaagcagggatgtccaatcttttggcttccctgggccacactggaagaagaaatctcttgtaccatacataaaatacacttaacactaatgatacctgatgagaaaaaaaaaaaaaaaaaaaaaaaaaactcga

SEQ ID NO: 145 - DNA, 3115 bp, Homo sapiens
  misc_feature (519)..(519): n equals a,t,g, or c
  misc_feature (558)..(558): n equals a,t,g, or c
  misc_feature (2101)..(2101): n equals a,t,g, or c
ggttatgggtatgatgtgctggtctcctcctctggataagatgggcaacagtgttaagggaattcacttttgtcacgatcttgtttctctgtgtaatttccataactatgataatttgagacactttgcaaaaaaacttgatcctcgaagagaaggtggtgatcaaagggtaaagtcagtgataaatcttttgtttgctgcatatactggagatgtgtctgcacttcgaagatttgctttgtcagctatggacatggaacagcgggactatgattctagaacagcactccatgtagctgctgcagagggtcatgttgaagttgttaaatttttgctggaacctgcaaagtaaaccctttccccaaggacaggtggaataacactcccatggatgaagcactgcactttggacaccatggatgtatttaaaattctcccaagaataccaagtcccagtacacacctcaaggagattctgacaacgggaaggaaaatcaaaccgtccataagaatcttganggattgttgtaatggkctccaaatcccaagatttaaatncacttacctatttaattgtggaaaatgattatgaagaacatgtgtatttctatctggtagtgatgtatattttacatttgtcatttcagtgttactggagttttcttcattgtgcacacaggacaaatctgatctctttgggaaaaaatagaaataaaacaatctccctccataatgtgagcaatattacctcgtgcattgtataatttgatgtaaaagaaatagttaccaatgctagcttgtgtggtcttccatgatttatttgtgttttgtgaattttcaatttatggtgatgatctgctgatatgcatttataaagtaagctctgttgtacagtctgtccaaatgggtcaaggttgcctttagaagcaaatagtgtgattttcaagacttcaaatacaaatttagtttaagtgtttgaacaactatatgcacttacggttgtgtgtttaaaatgtctctctcwcmccctagcttcatgatgtgactcttaaaaaactataatagttaacaactgttagtaagatagaccaattctgattagactttatcagggaatctgtttaagatatgtttggtgaccaaaacgtatgtgtgaatgtagttataatgcttttgaaaaattttcctttttctatatccccttagtccagcctctcttctcagacatttagctatctgcctctttcctttagctgggaaagtgagagctggcatactatgcagtttttatgttttccatagtaagtcagaaaakgcctcctatttctggcatcagaactttgccatttgtctacagaagacgaaccagagacaaaattactaagtataaattagtcaagtttatcagtctaaaaagcgaagggatgtgcaactgcagctctttaagaagtttttttttttagcttctagggtaaagataaattcagaaatgctctaagctaccaragttattctgaaagtatgggaactgctacaactaacaaacatttgtttccaagcctgtcattaagagtctgcatcaagagatttgtcctccttgggggaccactggatcattccagatttcttgtgatttttctattgtgtaattcttggtgggctctgtagtttaataataagaaaaaggccatttcattttaaattgtgacctataattctttgtcttgggttggtaattcaggattcatttggaaagtgggtaaaaggggcttcaaaaaacggatagaacaggattttctaggagttacacatacattttatcctgtcatacctcgagataaagtggcatgttagtgaggagttctgatattaagcacacacacacatgcacacaaatggacttctctgaagctgtgtttagtgaaatgagctcaagtacatgaatgttagttgttatcacatacagcaaattcctttttttttctttttctatgagcacactctgctgcttctaaactttacatgcctgatggcaccttactccagcagcctccaggtgctttcattttcacttccagtctaagccagtggctcctgccantgccctcccattacctagatggcacctcctttggtgaaaccacgggccaatgttccttagctgcaccaggcccgaagctgttcccatgcttgagcttccatggggaggatgctgagtgagcagtttcctacsccgtgggatctagcaagccatggagacaggtagcatttgtaagatgctgcacaggagcagcattatccccaaagatattacagggtagacacgttttaactgaaatcaatcaagataactttattcaaagagcagcccgctttgtgtgactaaaatgaaacaagacagttgaattgtgtgacttgaagattaccaatgattttgaggcttttctataataaaaagaggttctaaccattatttgggaacaaagagagttttcatcttttttcagatcaaaaccattctgtaaaatctttgttgtttaattaaatgtgccgttatttacccctgatgttatttatgactatgtgccgattcctgcttgggctgtttgctgttggctggtaataatatatttgatttaaatgctgttgactgtgctattaactgctgccgtcagtaaactccaaagatctttttgttttggctttagtatcatatgtgctttttctgtatcctgagcgctctatatgatcatgttaatttaaagctttatacacattgttgtttttgctggtctcatctttggtaatatgctataccccactgctgcccgacactgccctttagctgcagagctggattagctgttgaccatttgatgctgttgtctgtctggcagggactgaatgacctgatgtcagatttagattcttcctggggattacacagctatgaatgtatttgcttctaaaacctcccaaagtgaatctaatcttaaaactacaagttgtaagtattctgaaattgggaaacatttattttaaatgcaatcaggtagtgttgctttttacagcataataaatatatgtatcaaaaaaaaaaaaaaaaaaaaaaaat

SEQ ID NO: 146 - DNA, 518 bp, Homo sapiens
ggcacgagcaacaatggcaccccagtcgtggccaccacatactcggtttctgctcagagctcgatgtcaagcagacagatgactgaagacttcctgtaagagaaatggaaattggaaactagactgaagtgcaaatcttccctctcaccctggctctttccacttctcacaggcctcctctttcaaataaggcatggtgggcagcaaagaaagggtgtattgataatgttgctgtttggtgttaagtgatggggctttttcttctgtttttattgagggtgggggttgggtgtgtaatttgtaagtacttttgtgcatgatctgtccctccctcttcccacccctgcagtcctctgaagagaggccaacagccttcccctgccttggattctgaagtgttcctgtttgtcttatcctggccctggccagacgttttctttgatttttaattttttttttttattaaaagataccagtatgagatgaaaaaaaaaaaaaaaaaaaaaaaaaaaaaaaaa

SEQ ID NO: 147 - DNA, 1941 bp, Homo sapiens
  misc_feature (499)..(499): n equals a,t,g, or c
  misc_feature (558)..(558): n equals a,t,g, or c
  misc_feature (1890)..(1890): n equals a,t,g, or c
  misc_feature (1938)..(1938): n equals a,t,g, or c
cagtatccaaccatcctctccattctcctctggacctcaccactctcagagctgcttgtcctggcagaatctacarttcaccccaactctatgccttacccctcccaacccaacagcatttgcagtttgcaaaatatacagacccaagtcctgaggggactgaggacatgatgctgggcccaagtctcctgctcagggcttctctccaatgccagccctgccactccttcctcaccctccttggagcctcctctgctgcttgtctatcccaacggccctgctcccctcccttcctgcccttcaccagctttctggacaccakgcmswgrgraagggacctttggttttytctaaacatctttraagggctgaggcagtcagggctggctgccttgtmactctttatttggaagccactcaaaccattcccaagaagagggaacctcasctggcaatctgggaaacctggcccaggtctgggcmgatgtyttcacttctncctaccttcccagttcttgtgaatcctgtgaatgagcaccaggatgggccctgtgggtnccctagaagcaccccttcatggctgtagggtcctgcagccccatcctttctctactgggccctggtatcctggctcctctctcagctctgccactgatctctgtgccttagtttacttctctgcacgggggactcaccccaagaccatttccagcagcttcccaggtgatgtggtgccccaaggctgggctttgccagctgtggcccagctccttagtgctgcccaggagacaccaggctgctcagaatgaggtgactgcgggcaccattctcagccagtggttcttgtattgcattccagcagcaggaatatcacctgggaacttgatagaagtgcagattagcagccccacccaagacccactgaattagagcttgtggagtggggccctacaagctggggttttaaggagccctccaaatgattctgacgcataagaatatgccaactgctgatctgggctagccattagtagagcctggggagggactgggactggctaggccaagaacaggtggaaaacaccagccttatctggactcctgagattgggaaccaccaccaacaaaaaccaaccctatagtcgctcctcttggaagaggaagagaagttgaagggcctggagaaagcacacattgtttgtttccctgctcctgctcacctctctcacttgtcttggttttacaaaaggctgtgtggatggtgccagccagggagggggtgggagtcctggggaggcaggaggcagaagaccctgactgtttctcccttgggaacctcaccataggccagatagcgcctcttcaaactgaaagaaatcttaactccacaaagaaagcatcctaaatccccagttcctcctcctcccaaccccagggataccttgtagacagtgccaaaaaacagctccaacccccagcagctgggaagagagccagaagctgcccttcctcctcatcctggcccctccccagcccccgccaatactgtgaacccccttcccactcagcctggtttcctggtgagggtcctgcagtcatgggccctgggggacccccaggcaaggcccatgggagggaagggaccaagggcatccttgggccaactgtccacctctcttgtccactattctctcctttccacttctgtcttcaaaaggctccttcctaggatggatcgggtgctaggacaactgcagtccaatccaccagctctccctgcccctgtgtcttatttcagacatgagaataactgtacagtgtaaacttataaagcgtttttaatggttgtagattggaaataaagtatgtcatatgaacagctgctgtggnaaaaaaaaaaaaaaaaaaaaaaaaaaaaaaaaaaaaaaaaaaaaaaangga

SEQ ID NO: 148 - DNA, 820 bp, Homo sapiens
ggcacgagattaattacagtttaagccaaagcatgagtggctttttaaagtgcatctgtggaggggatgtggcaggtagcccctgttcacttgctgtaagataagtgttttagtatttcagccacccttaggcacaactcagccaggcctaggaagcaacccaacgtcattgccatgaaccatttacacaagtcacaccaaaatcaactgacacatttttttcctgatggaacagttaaaaaaacaaaaaactatacagtcaaagtctggggttgaagagcgtgaagttcacagctcctccacacacgcccaactgagcatgctcatcctgtgagggggaaccagagccttcctgtaaaccatgagagcttaccaatgtctggtatacaaaatattctggcccataaactcaacctgtttttgaggggtaggggattttccatcttgtacataaagaaagaaatctgggtatccttcaggttagaaaggcattctgtaagaatagtgttccagagttacaaatcatactggtaagagaaaagcaattcttcctcttggggaaaaagaggaaaagaaagaagaaaagagaaaaaagaaaaaagggggaaaaaagaaagcctatcaatgcttaatctgttctttcattcccactgtaaatcacatcaatacatttggtgaaactgcaacggaccaccatttacaaggtagttgaatgcagaaaccgaaacgattatgccccctccccactctaaaggaaaagacacagagtacatttcacatattcagagagtggctcagtgggctctttcaagcggcacga

SEQ ID NO: 149 - DNA, 1236 bp, Homo sapiens
ggcacgagaatgaaacaacagatatgtgtgactccactgttagaggactctggaagcttatacctggtttcccccagactttgcctctgtaccttttctctttgctgttttgcttcatatgcttttgctgtaataaatcatagctgtgtgatgatatgctgagtcttgtgaattctcctagcaaatcatggaacctggaggtagtcttggagaccctggcatacaaagcagttcctaagtgtttactggtagctgtaggaataggcaaagaagaaacagcaaagaaaaaggcacactgtggtataactttggaggtttaccttgcaaaatgctcagatatttaacctatcagaggttattgtgcatataaaagagagtgatatactaacaactgcctcaggatatactctttttaatcagtattgtaactaaccttggcttatttcacttttagacttggggttctattttgctttaaaacatgtacatcagttttgttttttgttttgttcttttcttttcttttttttttttttttttttaaagacaggatctcactctgtcacccaggttgctgagagtgtggtgtggcccgatcttgacctcactgcagccttgacctctcaggctcaagtgatcctcccacctcagcctcccaagtagctgggactataggcacgcgccaccacgcctggctaatttttgtattttctgtagagacagagttttgccatgttgttgaggctggtcttgaactcctgggttcagacgaccctcccgcctcagcctccgaaagtgctgggagtacaggtgttagccactgcgcctggcctcattgtactccttaacacaagaagacttcaacaatgataagtagttgtttataaggaagcaggatcattaccaaaataaatcctgctaaaacaacaggaatcatgttttaaagcctagtttgctaatttttgctagtaggataagagtgatcgtaatatctcgaacattacatagacacttaaaacctttagttgtatttcatcaaaaatctgttcataccccacgttggtttcaaaacatactatgctttttcttcgtgttatttcctatattcatttttgtgtgtatgtgtatgtcacaaatattgatatgcctggttgtttatttttgttttctattatgcctttttcaaaatataaaaataaacttgtaatttctaactaaaaaaaaaaaaaaaaaaaa

SEQ ID NO: 150 - DNA, 1520 bp, Homo sapiens
  misc_feature (1507)..(1507): n equals a,t,g, or c
cacctcgcattctctctgtgttacgtgttggtggttctcacgatctttcagacttttttattgttatgacacctgttacagtgatctgtgatcagcgatcctccatgttagcattgtcattgttttgggcaccacagaccggacccggcaaccttcatctatgaacgttgtgtgttctggctgttccgcccaccagcctttcccagcctctctcttctccccgctccagcctccctattccgagacacaaaaatatccaagttagtccagtgagtaaccctacagtggcctcgaggtgtgcgtctgtcactttaaatcaaaagctagaaatggttcagtttagcccgggctcggtggctcacgcctgtaatcccagcactttgggaggccgaggcgggcagatcacgaggtcaggagttcaagaccagcctggccaacatggtgaaaccccatcgctactaaaaatagagaaattggccgggcgtggtggcgggcgcctgtagttccagctactcaggagtctgaggtgggagactcacttgaacctgggaggcagaggttgcagtgagctgagattgtgccgctgcactccagcctgggtgatagagactgtctagaaaagaaagaaagagggagagasagaaggaagagagagagagagagagaaaaaaaaaaagaaatgatttagtgtagtgaggaaggcttgttgaaagccaagataggctggaagcggagcctctcctaccagttagccaaattgtgaacacacaggaaaagtgttttaaggaaattcaaagtgcttctccagtgaacacaagaatgataagggaaacagccccactgctgatatggagaaagtttgagtggtcggataaagatcaaaccagccacaacgttcccctgagccggagcccaatccagagcaaggccctcgcactctgcaagtctgtgaaggctgagagaggtgaggaagctgcagaggaaagtttgaagctggcagagatttgttcatgaggggtcaggaaagaagccgctttcataacagaaaaaggcaaagtgaagcagcaagtacggayssagaagctgcggcccagttgtgcagaagatgtagcaaagactgtaaaggaaggtcaccgcactaaacatcagatttttggccaggcgcggtgctcacgcctgtaatcccagcactgtgggaggccgaggtgggtggatcacttgaggtcaggagttcaagatcagcctggcctacatggtgaaaccctgtctttactaaaaatacaaaaatcagccaggcctggtggtgcacatctgtaatcccagctactcaggaggctgaggcaagagaatcacttgaacctgggaggtggaggcaagagaatcacttgaacctgggaggtggagcttgacagtgagctgagatcgcgccattgcactccagcctgggcaacagagccagaccctatttcaaacctcgtgccgaattcgatatcaagcttatcgatanycgtcgacctcga

SEQ ID NO: 151 - DNA, 1001 bp, Homo sapiens
ggcacgagcatggtgtctgatagtggctcaatttcagttttttttaaattgtttctgaggcgtgtttcaaatatttgactttttcccactggtctgaatagtgcttctcagatacggcaagtctctaggtttgcatgagtcagcctctgtgccctctgttcttttcccctgatgttctttttgcttcttcttatgctattaccacactgtcttaattactatattttattaacaaatctcactttctggtagaccatttccttcacctacttcttcactttccttcaggaatgtcttggatattgtaactcttttccttatgatttagcatcagcttgacaagtttaataaaccttgttaggactgagataaaattagaaagattggacatctttaaggtactgagttctcctagccaggaatgtggcacgtttccctatttctttagggaattgtaaaatgtctttttataaagttttataattttccccatagagatctttaaaatattttgttagatttattcctagcaccttatatattttgttactcttgtaaaaagtatcctttttttttttttttttttagaaacggagtctcgctctgtcgcccaggctggagtgcagtggcacgatctcggctcactgcaagctccgcctcccgggttcacgccattctcctgcctcagcctcccgagtagctgggactgcaggcacctgccaccacgcccggctaatttttgtatttttagtagtagagacggggtttcaccgcgttagccaggatgttctcgatctcctgacctcgtgatccgcccgcctcggcctcccaaagtgctgggattacaggtgtgacccaccgcgcccggccagtatccatttttaaaaactacattttctctttgttgcttgggtagagaaataaaatcaatttttaatttatcttatatctgatcattttctcgtgccgaattcgatatcaagcttatcgataccgtcgac

SEQ ID NO: 152 - DNA, 1316 bp, Homo sapiens
aggaattcggcacgagctttgactcccctcctttctaacagaatgttgccaccactgcttgagtgggctgtgtttgttcctctgtcccagcttctgttgtagaaaataacattgttaggggaactcaggctagtgtcagcgtcttggtttggggagaaaaaattaaatgtttcggtttttgtttcttttgctgttttgtttttaccttgttactttatcatattgactttagggtcaaaggcaacatcagaagaagtcagatatgtatagtgacattccaggggtggggaaggtgtagggatccagggttctcccggtcttggccacaggcacaatcatcaccttcatcgttccagattcctggggagaaaactgagaagatcgttacctgccagcctcatacagagcaaaagctctgtcctcagggccaagttctaaccactgctctgtagaccttctctgcaatcaagtggcctctaaggagcatgcctgaggacaaataactgtgcctcagtttcctcacctgcagatggggttatcaaataacacgaagtgtgcagcctgacctgtaggaggtgtgagtgtgttcccaaactaaagccccaggctgccatcatttacaggcttggcttgccccgggcccctcacccccgtttctgaccatcccaagtctctctgggacaggcaagtcactctggttctttaataagcttggaggtgttgggaagcttcagtggtactggccaggccaggaggaatcaggccaccagggctccatctctatcctgggatagcattcaccccactcctcctcagggctgaccccgactcatggcccctttaaaccctgaaggccgattctgccccttcctctgttatatgcacaactgaggaaggaggtaaaagtgggctcctaggtgagcccaaagtctcctgagagataagggaaaagaattggactgtaggtttaaaaaagttgctcttggccgggcacagtggctcacgcctataatcccagcactttgggaggctgaggcaggaggcagatcacctgaagtcaccctgaccaacatggagaaaccctatctctactaaaaatagaaaaattagctgggcgtggtggtgagtgcctgtaatcgcagctactcaggaggctgaggcaggagaatcgcttgaacccaggaggtggaggttgcaatgagccaaaatcgcgccattgcactccagcctgagtgacagagcgagactccgtctcaaaaaaaaaaaaaaaaaaaaaaactcgagggggggcccggtacccaattcgccctatagtg

SEQ ID NO: 153 - DNA, 1738 bp, Homo sapiens
ggcacgaggggagagaaaggagacctgggtctcccaggaagcaaaggggacaggggcattagtatcagtgacaccagcaatgtaggttcccagccccttcccagtggcagcttgtgtgtccaggagataggacatcatttaacgcatcagcaaagtagcagcagatgccacatacagagtagagcgaaggcatttggtggatcggtcactagagatctatcttgcagaaagtatgtttttcctcataaaagtgcctcttaattggccattgtaccagccacttgtcctagccaaatgtccaaaacacgcccttgggccccgccacgttacaatccacagattgtctgtctgagtcgtttaaggcatttcctggtgcttgtgttccatgaataaaaggacaaagtcagaagatcactgatgtcttactgtcaacagagatattttaaaagagagaagcaggaaaagatcttcctttttttgatctacaacttatatagttttctgattatgcacataatagatatgccttccagatgcataaggcaaacatctggaaagaaatatacccaaatcttagcaggggttatctttgggagtggagtacatgggattttgctttcttcatttttataattttatattactgtcttggaagatgtgtttatgtgtgtgtgttacttttacaatcaggaaaacatatttaataacatatagtcaagaaaacagacttaaaaataaatactatgtgtccattgagaaaattcacaatataaacagaaatacaaataaatacatacacaattttaaagtcacctgtagccctacccttagaggtacccagggttaacattttggtggtattgtcttatcaatttttccgttgatacattcagcaaatttggagcacattgaccatggagttttgtgtccaaatccaatctgaatttacctggaagaggccttgacacctgcatggaaatgagctaagaaaaccactggagccttgggagctctttggcctcctggctggcccagtaatatctgagctcctttggttaatttataactgatataaaactacatcttctttataatataaattgtacctgtgagtctagaagctttaaatgtgtttaaattaaaatattcaagctaaatgttactgctctctcccaaattctgtaagtttgactcccgttaccccaattagaagtaacttctttgtttcatgccacttttatagcatttggtaattctgctataacacatcttgcccctattattaactgtgcacagtacacaaaggtgtgcctttacgtgggaacatggattgtgaatgactctgtaatgaggcctgagtattagttatctttccactcactccccgttcccctttccaaccccaaaggctcacgataggggctcactaaatgtcagtgtttcaccaaagtattttttccattgtattaagagtccagtcactgtatatggaagtattttattttttatttttttatatcacttgagtccactagtagtacttccttgctctgtttgacttgtcagatacaaagacacgggattagattttgggtggtaaaattgtgatacgcatggctgttgatggagtggaacatcttagtgatgtgagaaaggtcattttagttataaatgtaaaccaattactttagcacaacaataaagatgttctggaaattacaaaaaaaaaaaaaaaaaa

SEQ ID NO: 154 - DNA, 594 bp, Homo sapiens
  misc_feature (587)..(587): n equals a,t,g, or c
ttgaataaatagggaaaggggaaaaactggaagggggaatcattaggacccagctgcacagacatttgcagctaaaggagtggagatccagacgatctccgtgggactgggagcagctgtgtttaggattgacactgggggaacaggcagagggaagcatggtcttggcattggcagttttcacattgttggcttctgtctgttgccagcttcattctcattctttctatccttgtatgtcctgtttttactcttcattgtcattttagtgggtttccaggaggcagcagtgataaactgcatgcgtttagtatgccatgttttcctggagatcccactgactttactttcagtaacagtggttttcatttgccaactctggtgtttccccaccatgcaggtaagatagttaggctctaaacctattgaaatctggggttttcattttcatagggcacttatttatccttattcatatatgggaagkttatctctctgtgccaataggcagagtttttggctcatttttatggagtttttagctctgtgagagaacttgctttatacaggggtttcacttcaaaatntcttcct

SEQ ID NO: 155 - DNA, 1589 bp, Homo sapiens
acgcgtccggcggggcgaggaggagggtgggtatgaggcggtacggaccgcggagtcgagacctacccgaacgacgcgggcgagcggggctttggacgccggtggagacgcaggcgagcaggaagaagatgagccttaggtctgaacgccgaggaattcatgtggatcctgtgcaagaaaggatgtggttactgtggcaaccctacctggcagggtttctgctccaagtgctggagggaagagtagcacaaagccaggcagaagcagattcaggagtactgggagctggtggaacgactccagcgggaggaagaagaggcctttgccagcagtcagagcagccaaggggcccaatccctcatattctccaagtttgaaggaaagaaaaccaacaagaagacccgcaaggttaccacagtgaagaaatcttcagtacgtcttccagggtcggatcaaagaaggatattgaaatggattccaggcgtgtgcctcgagacaagctggcctgcatcaccaagtgcagcaagcacatcttcgatgccatcaagatcacctagaacgagctggcgtcagcagatgacttcctccccaccctcatctacattgttttgaagggcaacccccatgccttcagtctaatatccagtatatcacgcgcttctgcaatccaagccgactgatgactggagaggatggctactatttcaccaatctggtgagtaagtgagttcttggcgttgtggagaaggactaggaaggtggtggttttggggatgtgataggtcactcaggcccatgacaggtgaatgcttctgtgtgagaaggcagcacggctgaggaagctcactttgcatcagggagcacaaggaccaggccgtacagacactccgcctcccagcacttgatcagagattgtgtttatcctacagaaacagatgacatgtgttgggcatcactccccacggtcctgggtagaagagtccttcacttggcagggctttttcaaccaatgaataaggcaaattatatataagttaataatgccatttcgaaccgagacagatggcagctaaatgaagtttaattaaagaatgagtgctggggccctttttattgggtactgcatctacttcgaccacaaaagacgaagtgaccccaacttcaagaacaggctttgagatggaagaaagaaacagaagcttgccaaggagagagctgggctttccaagttacctgaccttaaagatgctgaagctgttcagaagttcttccttgaagaaatacagcttggtgaagagttactagctcaaggtgaatatgagaagggcgtagaccatctgacaaatggaattgctgtgtgtggacagccacagcagttactgcaggccttacagcaaactcttccaccactagtgttccagatgcttttgactaagctcccaacaattagagaattctaagtgctcagagcttggctgaagatgatgtggaatgagaaacaaatgttaacataataaaatctcagttaaaaataaaaaaaaaaaaaaaaaaaaaaaaaaaaaaaaaaaaaaaaaaaaaaaaaaaaaaaa

SEQ ID NO: 156 - DNA, 3168 bp, Homo sapiens
ggcacgagtttgtatttatattgaatgcatcccttccttaccatatgttagcaacctgtgcagaagccctacccagacctaactgggaactggctctgtatatcatcatctcaggaataatgagtgcactgtttcttttggtcattggaacagcctatttggaagctcaaggaatatgggagccatttcgaaggcggctatcctttgaggcctcgaacccgcccttcgatgtgggaaggccatttgatctcaggagaatcgttggtatttcatctgaaggaaacttgaacacactcagctgtgaccccggtcacagtagggggttctgtggagcaggcggttcatcatcccgacccagtgccgggagtcataagcagtgtggcccatcggtccacccacacagcagtcacagcaatagaaactcagctgacgtggaaaacgtcagagccaaaaacagttcaagtacctctagtaggacttctgctcaagcagcttcttcacagtctgctaacaaaacaagcccccttgtcttagattcgaacacagtgactcaaggtcatacagcgggcagaaagtccaaaggggcaaagcagagccagcacggcagccagcaccatgcccacagcccgctggagcagcaccctcagcctcctctgccaccgccagtgcctcagccccaggagccgcagcctgaaaggctgtctcccgcccccctcgcacacccttcccacccagaacgtgccagcagcgcgaggcacagttccgaggactcggacatcaccagtctcatagaagccatggacaaagacttcgaccaccatgactccccagccctagaagtgtttacagagcagcctccatcgccattgccaaaaagcaaagggaaaggaaaacctcttcagcgcaaggtgaaaccacctaagaagcaagaggaaaaggagaagaagggaaagggaaagccacaggaagatgagctgaaggactctttggctgatgatgatagctcctccaccaccacagagacctccaaccctgacacagaaccgctcctcaaggaggatacagaaaagcaaaagggaaaacaagccatgcctgaaaaacatgaaagtgaaatgtctcaagtgaagcaaaaaagcaaaaaactcttaaatattaagaaagaaatcccaacagatgtgaaacccagttcattagaactaccatatactccccctttggaaagtaagcaacgtagaaatctcccaagcaagattcctcttccaactgcaatgacaagtggatccaaatcacgaaatgcccagaaaacaaaaggtacaagtaagttagtggataacagaccacctgccctagcaaaattcctcccgaatagtcaagaattaggcaacaccagtagctcagagggtgaaaaagactctcctccaccggagtgggattccgttccagttcacaaacctggcagctctactgatagtctttataaactttctctgcaaaccctcaacgcagacattttcttaaaacaacgccagacctcaccgacacctgcttccccgtctcccccagctgccccctgcccctttgtggcccggggcagctacagcagcatcgtcaacagcagctccagcagtgaccctaaaataaaacagccaaatggaagcaaacacaagttgacaaaggcagcctcgctcccgggcaagaacggcaaccccacttttgctgcagtcacggctggctacgacaagagcccaggtgggaatggctttgctaaagtttcttcaaacaaaacaggtttctccagcagccttggcatttcacacgctcctgttgacagcgatggctcagacagctcgggtttgtggagtcccgtcagcaacccaagcagccctgacttcactcccctcaattcgttctccgcctttggaaactcttttaatctaactggtgaagttttcagcaaactcggattatctcgatcgtgcaatcaggcctcacagaggagctggaacgagtttaatagtggcccttcatacctttgggagtcgccagcgacagatcccagtccttcctggccagccagttccggctccccgacccacacagccacatcggtcctcggtaacaccagcggcctgtggtccaccactccattcagcagctccatttggtccagcaaccttagcagcgcccttcccttcaccactccagcaaacacgctggcaagcatcggcctcatgggcacagaaaactcccctgctcctcacgctccctccacctccagtccagctgacgacttgggacagacctacaacccgtggcggatatggagccccacgattggaagaagaagctcggacccttggtctaattcgcactttcctcacgagaattaaattaagcaaaaaacaaacaaacatagtgggccctcgtctagatcatgatgtgccagtttctgagacatctttttaaggctcttactgcagctcccctccccaccctcctcttctttgcaaaacagacccaagcagggcaggctcagaccactcgcttctttcagatctttcttgcaattatgataacatgagatttgctgttgtgcttttagagaaaagtctggactcagccacaaactctaataagacctgtacatctgagaacctttcccgttactgcgttttcaccacctgtcttccccatgctttatttatctgtatgaacacagatttgacattacagctaaggaaataatttgagttgattcagaaatcctggcatgtgacaattttgttaaattaccaagtttggtttttaataatttctcaatattatgcgccaagatctaattttaaaactgtatgaggactttgtgctgaaaatagagtatttttttaaagtaaggctgtcttggtttaaaagcagattacagaaatgtaagtcaacttaagaacagtgaatgaatgtaaaaacattcagtcgagaccatatgcattttctgtgctgtttgtacttgaggtatgtaacatttgtatacctgaacttattttaaagatgaactgaaatgcacatagccaagtcttgagatacaagattgaatgtgtatttcttaaaaatacaactttgtgttgtactttgaaataaatgatgcttttttcaaaaaaaaaaaaaaaaaaa

SEQ ID NO: 157 - DNA, 1547 bp, Homo sapiens
aggaattcggcacgagtagagagtgatccccagcaggtggtacaccggagtggcattaaggggtgaagatgtcccccttacggagcagaccgtgtctcaggtgctgcagtcagccaaagaacagatcaagtggtcactccttcggtgaagacctcactgttcctggctcttcatcctcttcaaaaaatttgcatgtctgctgtgaattttcatctagttccccaatcgatgctctcagggtcatctcggggatcacagggatccttaaatctccatgtctgtttgtggttgccccctcaacctcccctacacccttcctattctttttcattcttcttgcagttctgggagtaaagctcccagcatatttagataatagggcaggggaagcaccctctttctttctagactggattatgctcacatgctcccttgccctgacatttttgtaaattctgtgccttttgctgtagctacacttcagattaaagtaggagaaagaatgtgctgagtgttttcctccctttgcctctacctggccctcatcccaacagcccagcaaggggagagagaaagagaattcttttctatagaacgagtgggggcggggatgggtagggatttatccaatctaagccctaaccccacttagtgacctcagtgttttcttccattccttcttactgccctgtcctctgccttggaagaggctttgggaatagttcatagggaagggacaacatggaagaaacagcgatttaaattgtattgaacagggcatataaaatgcattctgtaccctgatctggcatatagcttcaaaactgcagtggcgagtgtccatctcttagttagctaccttaactgtccacccttactacctgtgggatcgttgcctggtttgtcttctctgtgtcctggagcaaagccagttcctaaaactaaaactccattctagtcttgggaagaaaagtttctactcagaactggggaaggagtggaacttatgacttgggcctctaggctgtctctgtcccctcagctccccgacatgcatttactctctgccgtgggtctgcagtcgctgcaacctaccctctctctgcctcagccttacacccaagcagtaggtctgtgctctccctgtctctaggtcgctgagagaggtgcttttcttcataaaacctttggggtttggatttccccaggaagatggagaatggaatactcactcttgggtctaatctttccccttgacccagaacttcctccccacaaaaatgcctttaaaaaccttcctgagacttaagcattctgccccacttactaactgccagttctccagcactgaggtggggcagataacggggcatatttaagggggcatctttgtgtaaaagatgcatggagtcaggagaaaaccaccttcataaactgctctgtgcaaagaggaataaaacattttttccaaaaaaaaaaaaaaaaaaaaaaaaaaaaaaaaaaaaaaaaaaaaaaaaaaaaaaaaaaaaactcgagggggggcccgg

SEQ ID NO: 158 - DNA, 2632 bp, Homo sapiens
ggcacgagctgctggccaccgtcaccgagttgtcttttgacatgtggggactcgtcagcgccctcgccgccacgctgtgcttctcgcttcagaacattttctccaaaaaggtcttgcgagattcacggatccaccatctccggctgctcaacatcctgggctgccacgccgtcttctttatgatccccacctgggttctggtggacctctcggctttcctggtcagcagcgacttgacctacgtctaccagtggccctggacgctcctgctcctggctgtcagcggcttctgtaactttgcccagaatgttatcgccttcagcatcctcaacctcgttagccccctgagctactcggtcgccaatgccaccaaaagaatcatggtcatcacggtgtccctgatcatgctgcgcaacccagtcaccagcaccaacgtcctgggcatgatgaccgccatcctgggggtcttcctctataacaagaccaagtacgatgcaaaccagcaagccaggaagcacctcctccccgtcaccacagcagacctgagcagcaaggagcgtcaccggagcccactggagaagccccacaacggcctcctcttcccccagcacggggactatcagtacggccgcaacaacatcttaacagaccacttccaatacagccggcagagctacccaaactcgtacagtttgaaccgctatgatgtgtagagtccaaaggacaggaccagactgttggtgactccttccccggcccccacagcagtatcagaaacttctgacaatcagtgaatgtacaacccagccgaggggacggtgcataactctccatcagaagccctggggttcctggccccccgtgagccgcaggaggatgcgttgcctgcagtgcagacggccgtgagctctgggcaaacctaaacagagaccagtgtctcatgctctttcttcctggagtctgtcatctgagggccgtgtccctgcggagatcttggcacgttgtacctttcatgtggaattattccccaagcagtgttagctcagagcacttgtgtctgcattccagataacattcaggacctgtgtgaaaagctggggtcactgtggctgtagaccatgaactggcagtgggggtgtccagggcggtgcttgagaacgtcagactggctagtttaattccctggcgcagatacgcataggaccaacagggtcaccaagcagacagggagcccgcgagaatcattcaaaacatccccagccacagagatggatccagtttcctggtcatccccttagcagttcacaagttcctggcaaatgttccaaagcaaaaagcgattgcaattagcatccagttcctgcagcctggtgctctgccctgcacgtcagggttggcatccacccagatccagatggaagggaaacttctctcttctcctttgcctcctcttccctcaccagagcagggcgcttctcttggggtggtgagaaggatcttcgagaaatcgtgttcagtatttcaagctctatttctgtggcacatgtcttttgagaggcatcttcacctcttctgtgatgacttggtatgttgtttggtagatcttgattttcggaggatcttgcatttttctagggaatattttgtagttgtgtgtgtgtgtttttgccttggtccccattatgggatgcattaggactggcctatgcatcgaaaatctttttgtttgtaaacgtttaaaaacaaagttccccggccaggcacagtggctcacacctgtagtcccagcactttgggagccaagatgggcggatcacgaggtcaggagttcgagaccagcctggccaacatggtgaaaccccatctctactaaaaatacagaaattagccgggcatggtgtcgcgtgcctgtagtcccagctcctcaggctgctggggcaggcgaattgcttgaacctgggaggcagaagttgtggtgagccgagattgtgcactccagcctgggtaacagagcgagactccatctcaaaaaaaaaaacaaaacaaaaccaagttcccactggtgatgcctgtctgacacgttttggtatttagtaggaaatgaagtgtttcgaagcttcgagagaagcttcaaaattgtcacaattgctgaaaacagaatgaatcgtgaacattatctcaatattttgtataatagacaagaccacagtgttttggttccctgacctgtttttgtgtttatgttaggatctgaatcatgttctgggtaaggggacgaggagcgaacactgcactaagatttggtttgccaaatcagattctttggtcaagagtcagtttggggccaggcgtggtggctcatgcctgtaatctcagcactttgggaggctgaggtgggtggatcactggagtttgagaccaccctggccaacatggtgaaaccccatctctactaaaacaaaaattagccaggcatggtggcacctgcctgtaatcccagctacttgggaggctgaggcaggagaatcacttgagcccaggaggtggaggtttcagcgagctgagatcacaccactgcactccagccttggtgacagagtgagactctgtctcaaaaaaaaaaaaaaaaaaa

SEQ ID NO: 159 - DNA, 1816 bp, Homo sapiens
agaaagtacaggaagccgttcttgacaaatgggtgaatgaccctcaccgcatggacaggcgcttgctggccctcatttacctggctcatgcctcggacgtcctggagaatgcttttgctcctcttctggacgagcagtatgatttggctaccaagagagtgcggcagcttctcgacttagaccctgaagtggaatgtctgaaggccaacaccaatgaggttctgtgggcggtggtggcggcgttcaccaagtaactctgctcggggtgaaccattctcctttctctcaagtaaaccagtagtttttcttctgttgacttctggttttctgtaatttgtactttcccacactataattggcttctgttttacaaaatggtgggtggctttttcttttttgtacgtgtacaggattctgctggtacgagaggccttcctctttctgtttttaaaaaaagttttactgccatattggcattccattccctgttgccatcctcactgttacctgttttgggtttctggtctactttgactttcaaagtacctccagcctcctcatacgcacagcttttggatgactcagcttgagtttctccatatgtgcatgtacatctagcatctgcctacagttcagacagaagtcacaaaaaggccttcaactcaccaaaggtaaatatctgtatctattaggacatttttttacatagacttcagttgagatgtataattagcaaaattatttttaaattgaaacagcacagtaaatacttaatataaaatgtcccttggattttgcttcccatgtaaatctattgtattattacacttgttataattttaactataaaggtccaattgtttcacagagccagtttgggatgggctgcattccatttatgctgtatatagtttgaattatatataaattaccccttcttctggccacccctgctcccatcttagtattttgcaagatctaatcagttgtacacctggtgcccctcgcttgcttcaatcatggttatttgatggcaaaatcgacctcttgtcgctgaaggagagagaaaagatgtgtgtctgattggtcctgggattttttgagctgtgccatttatggtactctttgcctatgcatcccctttttagattttttttaaattttatcttactgtttttataatttctattgggaagaggcttgtgaccagtaccaatcttgagtttctttttctgtccacaagtaaattaatatctgctctgaaatgtcatttatctactcacacattcttggggaaaaaaatcaaatgtcagtcctagcagatgttgcatgtaaattggtagcaagtaatgattacaacccagaggattaagaattttgtaacagaaagctctatgttttaattttttatatacaattaggataattagcattgtcagactataaacctttgctttttaaagtttatttttactatttctttatcactttattgtatcatcaccattggtttcataatgtaaatactatatgttgaacaaattaaatgtcaaaattttttattaccatagtccatgttaatagtggggctttcaggtgtttagagattttttttgttgttgttaacattcattgcaaaagtactagatggtgtataactctagagttgaattttaagggattccctaatatgtatactatctttttatctgaagtaataaataaacaatgatcttgaaagtgcctgaaaaaaaaaaaaaaaaaaaaaaaaaaaaaaaaaaaaaaaaaaaaaaaaaaaaaaaaaaaaaaaaaaaaa

SEQ ID NO: 160 - DNA, 575 bp, Homo sapiens
ggcagaggcttttgaagttaatccttttgtgtgatacaggatgaacttgggatgtttgaaccctggacattccaaataaagaataggcccctgcctggctcctgggagataacctctaagccattagaatatcttgcctgataagagtgtttttgtttacctgtgggccttgggccatgcagtatcagcttgaccttgcaaggtcaagctgaggagactaagttagccatgtgggcagtgaagcatgccaatgtgatcaatccctagtaaaagccctggacacctaggcatgggtgagctactctggttggtaatactctgtgcacacatcattgtagccacacatcattgctgggagaattaagcattatcctgaagactctgccaggagaggataattggaagttctcttggaccttaccttatgtgcctttcttcattgctgattttaatctgtatcctttcactgtaataaactgtaactatgagtgcaacacttaaaaaaaaaaaaaaaaaaaaaaaaaaaaaaaaaaaaaaaaaaaaaaaaaaaaaaaaaaaaaaaaaaaaaactcgag

SEQ ID NO: 161 - DNA, 1584 bp, Homo sapiens
ggcacgagaaaattttataattatgataggactcctagctcttataagaagtggcctttataatgccacctttagtacttttcagcattctacaggtggacaattcaagaactatatttgtaaaataatgttttaaagagagccaacggtaaaggcaggaaatcactcaaaacattttgtatgttccagagactactcaaatattaatcctgttttcaggagtaacttcgtaggcgtggaaaagatttttgtttatttagaccaattcattatttattaacttcattcaataaatagttacattgtacctactacatgccaggcactatgttagtgagtttgttcactcagtcagccagctctgtaacatggaaagaaatgggaacaatttcacctatctcatagccacctgaaatagctcagcatagatagttttctgttcatttgcttctcaggctgttccctcactcactcattcactcattcatttgcttattcatcaagtacccattgagggcattctgggtgctgaaccctgtgctgggtaggcactgtgcgggtgtgagttgtgttctgaagggtgaaggctgaggatcttgagagcccagaggagggatccagcccgacccgagggaccaggaagagtggtctggaaccagcaccctttggacctaggctagaggccgagcaggaaccattgaggagagaggcaggaggtcagtggcccaggcgggaaccctcacacccaagccccaacatttttattttgttttgggaaatgtataggattaaagtaataactggaaaggaaataaatggaaacatggaatggaaacatttcctattttccctattgttatctgaagacaaacttaatttttatgttgctactttctctcttaaatatcctcttactaaatagtctgttgtattaattagactgggtagtcctaactcaagaaagcatttggcaattaaaagatggaggactcagggtctgaccgttttccttggccttcatttggctttctctctcttttctcccctccttcttcccaggcctggctggctggtgcctggacaccatttggggctctgagagggttgtggctgccacccccagtcccaatgcctggtcaggcactcgtatcccctgtcctgttcaccatttctcctttctcattgttctcataatttgtcctgcttaaaactcctaggttctaagggacacccctgcattgcttgcctttcctttgctagacaccagagagaggctaaaaagtgaaatgtggcctggtgcagtggctcatgcctgtaatcccaacactttgggaggccgaggcgggcagatcacttgaggtcaggagttcgaggccagcttggacaacacgacggaatcctgtctctactaaagatacagaaattagtcaggcatggtgacccatgcctgtagtcccaactacttgggaggtaggaggatggcttgggcccgggaggtcaaggctgcagtgagctgagattgtaccactgtactccagtctgggtgacaaagcaagaccctgtctcaaaaaaaaaaaaaaaaaa

SEQ ID NO: 162 - DNA, 2352 bp, Homo sapiens
tcattgtatcaacagtacacttgatctccagtacagacatatggtggaacagaagcctggatacaggactcagactcttactgagttggccaggagcagcaggcaccacagcctgtgtgtgtgcagatacagtgtactactaccaaatggtgcccagctggaagtttaggtctcctcctacctggatctcattacttgggccgttttcaggatcgtttaatgtggataatgattctggaatgtggctatacttactgctctattaacattaaggggttagaattgcaggaaacatcctgtcatactgcagaagctcgcagattgatgaagtttttgaagatgcttttgagcaagaatacacaagagtatgttcccttaatgaacactttggaaatgtcttgacaccctgtactgttttgcctgtgaaattgtattctgatgccaggaatgttctatcaggcataattgattctcatgaaaacttaaaagaatttaaaggtgacctcattaaagtacttgtgtggatacttgttcaatactgctccaaaaggcctggcatgaaagagaatgttcacaacactgaaaataaagggaaagcacctctaatgttgcctgctttgaacactttgccacctcccaaatccccagaagacatagacagtttaaattcagaaacttttaatgactggtctgatgataatatttttgatgatgagccaactatcaaaaaagtaatagaagaaaaacatcagttgaaagatttgccaggtacaaatttgtttattccaggatcagtagaatcacagagggttggtgatcattctacaggcactgttcctgaaaacgatctttacaaagcagttctattaggataccctgctgttgacaaaggaaaacaagaggacatgccatatattcctctcatggagttcagttgttcacattctcacttagtatgcttacccgcagagtggaggactagctgtatgcccagttccaaaatgaaggagatgagctcgttatttccagaagactggtaccaatttgttctaaggcagttggaatgttatcattcagaagagaaggcctcaaatgtactggaagaaattgccaaggacaaagttttaaaagacttttatgttcatacagtaatgacttgttattttagtttatttggaatagacaatatggctcctagtcctggtcatatattgagagtttacggtggtgttttgccttggtctgttgctttggactggctcacagaaaagccagaactgtttcaactagcactgaaagcattcaggtatactctgaaactaatgattgataaagcaagtttaggtccaatagaagactttagagaactgattaagtaccttgaagaatatgaacgtgactggtacattggtttggtatctgatgaaaagtggaaggaagcaattttacaagaaaagccatacttgttttctctggggtatgattctaatatgggaatttacactgggagagtgcttagccttcaagaattattgatccaagtgggaaagttaaatcctgaagctgttagaggtcagtgggccaatctttcatgggaattactttatgccacaaacgatgatgaagaacgttatagtatacaagctcatccactacttttaagaaatcttacggtacaagcagcagaacctcccctgggatatccgatttattcttcaaaacctctccacatacatttgtattagagctcattttgactgtaatgtcatcaaatgcaatgtttttattttttcatcctaaaaaagtaactgtgattcttgtaacttgaggacttctccacacccccattcagatgcctgagaacagctaagctccgtaaagttggttctcttagccatcttaatggttctaaaaaacagcaaaaacatctttatgtctaagataaaagaactatttggccaatatttgtgccctctggactttagtaggctttggtaaatgtgagaaaacttttgtagaattatcatataatgaattttgtaatgctttcttaaatgtgttataggtgaattgccatacaaagttaacagctatgtaatttttacatacttaagagataaacatatccagtgttctaagtagtgataatggatcctgttgaaggttaacataatgtgtatatatttgtttgaaatataatttatagtattttcaaatgtgctgatttattttgacatctaatatctgaatgtttttgtatcaagtagtttgttttcatagacttcaattcataaactttaaaaaacttttaataaaatattttccttccttttcaaaaaaaaaaaaaaaaaa

SEQ ID NO: 163 - DNA, 1838 bp, Homo sapiens
aattcggcacgaggtcagaaatgattcagggttatttgaggggaaaaaaccccatagtgccttgattttaattcaggtgataactcaccatcttgaagtcattgtccggtttccgtagcagttttgaaaccttagtacctttttaacagcatgtgggtgtcagtgtcattattagtctcctaataagttcctctgaagactgctatcagtctcttggactggaggtacaaataatttagaaataaaagatgataacctaacactatcatagttattaatgtgatcctaaaattgtttcctaaatcagcatttttctttagtcatttaagaatttaccagaaatatttgctcaatatgatcttgatattcctacaaagaaaaaagaaggggtagggatttggctatgccttcactacaacattagaatattgtaactcacatgccttctaaacgtgaactaagatttcctttggcaatatcatattctaaaagtaataaattccaatacaagttacatacatttaaaaaacattttacagattttatggtactaatgaaatttacagtgatagaacaaaagaggattagtagaaaatacattattagaatataaaaaatgttattactgaggaaagggaggagaggacaagtgtaataaatcaaaattgacctcaaaagaaaatgtgtaacagagttgaggttgttaaaacagaaaaggttctgaataatgaagattaacctaatgcagaattgctaggtaaagaggtcaggggaatgctaagccagttcttaagacttctctgtcctctgctttgctgttatccttaaggcatatactttgtctttctgcagaaaattctacctggctacaattactttgaacattaatgttgaaaaagaaaacaaccaaagaaaattggtacttacccttctacaaaagaagtgtgactagatatcaatcagtaattaacatatcaaggagctcttctagctaaatgaccatccagtagagatttcccacattcccatgaatatcaagaatagttgtcagaatatgtatgtacctgagcatatgtacacagacaagggggatgttgtggaatatggcaatagcattgttcttctcccctttcaaattgcctttcttgaccttatgccattccatatatatctgagttgtgcctcatttatttattggcaatacctagtgatacggatttagctaacaaaagatatgaagaactattatattgaggcctgtcctctacataccacacttaaaagatggtgaactgtgagtactacttaggttgacagcaacaaagcataagacaagccccaggtaaacgtctaaactgtttactcacattgtcctactccagccccttcaattatttcccatctccacaaatagtcgggggaaaaaattaaaattttcctttatgattcttactgttcttcgcagctcatcttttcctgcttagaattaaccattgctaatttaaaggagcagctagctgcttttctgtcagtctgaagcgtagtagtggaagaggtagtaagcaccagctgcctctttgctgctttgttttcctcctgattctcttaaatttgggttgcaaagctatcccgccccccaccctgccccatgaaacttgagcattcaaatgaagattcagcagtgtctgttcttcatttctatagccaaagctgttagttaaaatcccaaatctatagcatttaaagataccaaatagaaacaccttccagctttaaaaaaaaaaaaaaaaaaaaactcgagggggggtcccgtacccaatcgcctgacatgcatcgta

SEQ ID NO: 164 - DNA, 1147 bp, Homo sapiens
ggcacgagctcgaagcaaaattgcacaacctgttagaagttttcttcagcctccaaagcctctgtcttcactcagcactctgagggatggaaattggagagatggttgctactaatgcagttttatgtacccttgaaaaatgggaaagaagtaaaaatgagggttgtgttacctagctggctgggtagcagtggatgttgggatattctttcccttttgtgttttaatatatttactgcattgtttctcaatggaccagtcaccagagactaattattgcacttaaatatttgcctgagatactgcaacattctcaaacccatggttgcagtattgtgacacttagatctaggaagtttttgtagaactgctctgtacctgaatactttttgagagaattaagatgtatcaataatgctttgccatatgagttttttaaagtaacttgttcaatttactcacgtgttctaaacatctttccattacatgttctgtattttaatacattgcatattgacaactaggttctataatgtatgctttgaaatttacttttttatagtttacaggaattttattttttgtgcctatttctttttacacctatgtgaaccactatggaacaacttaaattttgtgccataaaaatatttttgtggtaaggtactatttttttagctctagggatatatcagcaaaaacacatcatgcaatttgagacacataattttgtgttgaatgagcacaacataatttgaagcattgcaaggagataaccagacagcagaattaaatggtcctgtctttttcatttttaatttattgtcatacatgggtttcatatttataacggcatcatgagctcattgcacttaatacctgcaatgtttgctactgtaccacaattgattttcaatactttattacgaaggatgaaactgtaatgttttattaacaatgcttctggaaatgaatgcattttaaagcaaataaatctttttgatagaccttttacaaaatccatttgcactaatgaatgctttcttatggcatataacttaatatttgttactgtgtacactgctgttttggaatgttcagaaataaagactctatttcagcaaaaaaaaaaaaaaaaaaaaaaaaa

SEQ ID NO: 165 - DNA, 1444 bp, Homo sapiens
actgttcagtactctaggaagtgggtcaggcaccttgggggcccaacgctgctccgtggggatgtctgcctgcctgcctggttctcttttcctgctgtttcctccagcagggaggtatcagaggcggggacacccaagtaggcctggcatgggcagaaaggaggtcacagctaaggcggtagagtggggttggcaccagccacttgtctgtttcccttgtggatcttagcctgtcgtctcccaaccccagctgcccctctgtctccccgcagctggtaggtgagtgctgtcctcggctcactttcctcaagctctccggctgccacggtgtgactgctgacgctctggtcatgctagccaaagcctgctgccagctccatagcctggacctacagcactccatggtgagccctgtgtcccaaggggccctgaaaaaacccaggccggggtgacgggtgctcttgtattggggccccaggtggagtccacagctgtggtgagcttcttggaggaggcagggtcccgaatgcgcaagttgtggctgacctacagctcccagacgacagccatcctgggcgcactgctgggcagctgctgcccccagctccaggtcctggaggtgagcaccggcatcaaccgtaatagcattccccttcagctgcctgtcgaggctctgcagaaaggctgccctcagctccaggtgctgcggctgttgaacctgatgtggctgcccaagcctccgggacgaggggtggctcccggaccaggcttccctagcctagaggagctctgcctggcgagctcaacctgcaactttgtgagcaacgaggtcctgggccgcctactccacggctctcccaacctgcgcttactggatcttcgtggctgtgcgcgcatcacgccggctggccttcaggatctgccatgtcgggagctggagcagcttcatctgggcctgtatggcacgtcagaccggctgactctagccaaggagggcagcccctttttgacccagaagtggtgccatacactgcgagaactggacttgagtggccaggggttcagtgagaaggacctggagcaggccctggctgccttcttaagcacccctgggggctcacacccagccctgtgctctcttaacctcaggggcacccgggtcacaccaagcactgtcagctctgtgatcagcagctgcccgggcctgctctacctcaacctggagtcctgccgctgccttccccggggtctgaagcgggcctaccggggcctggaggaagtccagtggtgtctgtagcagctgctcaccagcccctcacccagctaggcagccacagacctgggacacctcagccagcttgcccaccctccacctttgcccaatttcagatatttgagcattttgttaaaataaaacatttttaggaaaaaaaaaaaaaaaaaa

SEQ ID NO: 166 - DNA, 1277 bp, Homo sapiens
ggcacgagctttaattcaaaaatgtttgtagttaacattattttgatttcttcagttgttgcttggaatgtttttatactgaccaagttggtatgtgacgtttatttttctctgactataaaagtaaaaaagaactgaaaatacccaaaaagtaatgttttatagaaagtctcccattgatttaagaagttatctattagattgatatcagaagtttcatatgagtatttggcttatgcatttctgtcttttggttttaggcaaaaggatgtcaattcttgatgttaaactttaggattcttaaagtataatgaagactggaatgggctgtggggaacataatagtggatgacagtgacttaggattcaattcagaaaatagttgtgaatctgttttattttggttacagcctactcatacgatttatttcatattttctaagtgtatttttgttcttcctgtatgtttcttggcccttgagtcttctctgtctttaatctttctctcctctcctactatttatagccagtctcatattaatttcctttctctagggcctttaaccacttggtgctcatttcagaccagtagtagtagcaacaaagttctgcaaatcaaatgtatcttcactcctgctgtatttaagacacagctatctcagtatcttaaaataacaatgtaattattttttggcatacccttgcctgacttctgaggacctcactaagtctagttctagcctttgtagaatggtcaacttctttcatcaaggctttggtttcattactggtgtctgaattagttccactcctagcttgacccagattttagtttttattatggattttttcttcaaacttgtttatttaatattaagttttcatttttggcagcatatggatgattttatttttaataatcatatctcttagtaaactaatggttaaataatattaaagtataagaagctaaaattggccaggtgtggtggctcacgcctgtaatcccagcactttgggaggctgaggcaggcagatcacctgaggtcaggagttcaagatcagcctggccaacgtggtgaaaccctgtctttactaaaaatacaaaaattagctgggcgtggtggcgcacgcctgtagtcccagctacttgggaggctgaggcagtagaatcacttcaacccaggaggtggaggttgcagtgagcaaagatcatgctactgccctccagcttggatgacagagcgagactccatcttaaaaaaaaaaaaaaaaaa

SEQ ID NO: 167 - DNA, 531 bp, Homo sapiens
tggctggctgcttggccaggacagtgatgccaccagggagagcttccgcttggtgaccagggacatgtcccagatggacatagaagcccctctctgcctccctgggattttttagacttttacttttgatttccctaggatggaagagtataggtgggagataagggaagtggggtgagaggagaaaggaaatgttggcatgggcctgtgtgatgtccctgaggcagaagagccggggactgatgggttcaggtgggagctgctgggtgaggcagggaacccttttcactcccattccttagctttagtctaatggagccaaggactgctgggaccttcaaccctgatcttttgtcttccagtcttctcttagtgtcctgctcctaggtttccctctcttctggttcttctcccaggtattctcttcccaggcctctctggccactgctttgtatcagggtttttcacgcttttgtagaactgaggtttcaataaacagtttcagttgcaaaaaaaaaaaaaaaaaaaaaa

SEQ ID NO: 168 - DNA, 665 bp, Homo sapiens
cccacgcgtccgcacaggaagagtgtgtagaagtggaaatacgtatgcctcctttcccaaatgtcactgccttaggtatcttccaagagcttagatgagagcatatcatcaggaaagtttcaacaatgtccattactcccccaaacctcctggctctcaaggatgaccacattctgatacagcctacttcaagccttttgttttactgctccccagcatttactgtaactctgccatcttccctcccacaattagagttgtatgccagcccctaatattcaccactggcttttctctcccctggcctttgctgaagctcttccctctttttcaaatgtctattgatattctcccattttcactgcccaactaaaatactattaatatttctttcttttcttttcttttttttgagacaaggtctcactatgttgcccaggctggtctcaaactccagagctcaagagatcctcctgcctcagcctcctaagtacctgggattacaggcatgtgccaccacacctggcttaaaatactatttcttattgaggtttaacctctatttcccctagccctgtccttccactaagcttggtagatgtaataataaagtgaaaatattaacattaaaaaaaaaaaaaaaaaaaaaaaaaaaaaaaaaaaaa

SEQ ID NO: 169 - DNA, 1017 bp, Homo sapiens
ccacgcgtccgctcagcccatagtggagagcctcggcttccaggggggccgtctgcagcgcgtggaggtgacctggcgaggctcccaccctgaagccctggaggtgcacgtggaccctgtaggccccctggacaaggtgaggaaggccaagatccgagtcaagaccagcagcaaggccaaggtggagtctgaagagccacaggacaatgacttcctcagttgcatgtcccggcgctcgggtctgcctcgctggatcctggcctgctgcctcttcctctccgtgctggtgatgctgtggctgagctgctccaccctggtgaccgcgcctggccagcacctcaagttccagcctctgaccctggagcagcacaagggcttcatgatggagcccgattggcccctgtacccgccgccgtcccacgcctgtgaggacagcctaccaccctacaagctgaagctggacctgaccaagctgtaggcctccactggccccatcactgccaactgcagggggcccctcgggcctcacttgccctgagcccaggagtccaagggcagggtgggtccagccttgagcccctccacccccaaatccttcctctcctcccagtcccaccccttgccccacggagtcctggggacgcagtgccccagctgggaagagggcgggatcgggcactggttcctccttgtccccgctttcttgggggcttgctactttttgtcttctattgtgtggctttctgagtatttgaaccccagtcctgtgtcaccttcctttttccttctctgtcccctctctgcgggggggcgctgaggctgagggggagctgcgtcttgctagggcttcccccttctccccatcccggtctccagagacccagcttctgagagacagggtgtgggcatctccatgcccctataaagcgtgcctggggcttgtctggggctggggaggaataaaccatgtatataaaagaaaaaaaaaaaaaaaaaaaaaaaaaaaaaaaaaaaagg

SEQ ID NO: 170 - DNA, 2886 bp, Homo sapiens
  misc_feature (391)..(391): n equals a,t,g, or c
ggggcgtggcggccggaggaggcgttggcagcgggctcggacccacgcggcgccgcggcccgcctggcctgcagcgctcccacccccggcggcggcacgatgccctttgacttcaggaggtttgacatctacaggaaggtgcccaaggaccttacgcagccaacgtacaccggggccattatctccatctgctgctgcctcttcatcctcttcctcttcctctcggagctcaccggatttataacgacagaagttgtgaacgagctctatgtcgatgacccagacaaggacagcggtggcaagatcgacgtcatctgaacatcagtttacccaatctgcactgcgagttggttgggcttgacattcaggatgagatgggcaggcacgaagngggccacatcgacaactccatgaagatcccgctgaacaatggggcaggctgccgcttcgaggggcagttcagcatcaacaaggtccccggcaacttccacgtgtccacacacagtgccacagcccagccacagaacccagacatgacgcatgtcatccacaagctctcctttggggacacgctacaggtccagaacatccacggagctttcaatgctctcgggggagcagacagactcacctccaaccccctggcctcccacgactacatcctgaagattgtgcccacggtttatgaggacaagagtggcaagcagcggtactcctaccagtacacggtggccaacaaggaatacgtcgcctacagccacacgggccgcatcatccctgcaatctggttccgctacgacctcagccccatcacggtcaagtacacagagagacggcagccgctgtacagattcatcaccacgatctgtgccatcattggcgggaccttcaccgtcgccggcatcctggactcatgcatcttcacagcctctgaggcctggaagaagatccagctgggcaagatgcattgacgccacacccagcctaatggccgaggaccctgggcatcgccagccttgcctccagtgccctgtctcctttggccctcaatctggtcccaaatctggctgtgtcccaaagggtgtgtgggaagtggggggaaagtagaggatggctcgatgttttgcagctacctcttttccccgtgtttctttttagacaaattacactgcctgaagttgcagttcccctttccctggggagccccaagaacagagtcaggcaaggggtggggagtccagggatcttggggacccctcctaggagagctgcagtctcttccctcaggggaacatcccagaatgcatatcgatcagctctcagccaggcttcgacaatctcgcagcccccactaggtggacacattaatgatttggtttctcccctgggcagccaacctgccccagaggcaccagacctgggctttcagctttgggaccaggctgcccaaaggtactcctttatacacccggcaccttccacgaaagatggtacttcccaagcaagcccctatgatttgtcactatagatggaaccctgacttctgccccatcccttcctgcccaacctagaacccaggcctcaagtctttaccccacccctttcttgttcttccaagaagcagatgcccagttgctcagcagcagcggtagagacttgaatctgcccaccagtcacaaggcgggtcacagattcctcttcctctcttctcctcgttcctctgaaccctccaccaatgtgcctcagcctgtgtgctgtgtggcaacagcattctggttcccactgccaagatctcccaccactctgctgggatctgcagtggcagggagtgggggttgtgtaaaggggaagtcatcttttgagatccagatagacatggtttgtgcacttacgtccagatgggaagcatccttcctgcaaccctaaaataatcatgcagcctctcagacggacgccatcggtcccaaggccttaggtggaggaagcaaagcaggccaggcctgtcctgtccgtggacctctaccttctggactccctacgggtgcagagcayttgggtttctctacagccatcgtggcccacttgacactgtgctcctccatcagctggtcacatgccaacacgttcccagcccctgaggcagctccagggtgccccacctgctcctgaggtgggtccctaccctgctgctcctcttcatcctttcccttttgtcctgaaagggaggagcaatggtccaggcattaattccacccagggaattttagctatgccctcatgtcccagggagagagccacacgcctgttttccatttatagcaagattgtttgcatacttttgtaatgaaggggagtgtccagtggaaggatttttaaaattatcttatggatagctcaagtctctgccatttgtaatttttggctctaagctccgattggagacgcttctccttgtgcatgtgagttgactgatgttgtgagtgtaaatgcatttggttatttctggtatcggtggccacttggatggatttttttacattctgttccccagttacaggaaggagtccctttggtgtgtgaatatgtgtgcctgtagagggtggggcagggtggggtggggatggaaatgtgtggcatgcacatgagttgaaattcttttatgcatttttttgaagaaaaaaaaaaaaaacaactctgaggacataggggatgtcagtttcctatggaagagacacctctgacccgttattcttataatcaaaatctgaagggaaaaaaatgttttagttctttccccactcgttgggttcaactagattaaaaggctgattttcagaaaaaaaaaaaaaaaaaaaaaaaaaaaaaaaaaaaaaaaaaaaaaaaaaa

SEQ ID NO: 171 - DNA, 1298 bp, Homo sapiens
ctcttgcttgctgtgactggtggagctgccgcgctgtccgcgttatctcctcccggtgagaacgaaccgcagtgtccaccggcgaggagccagccctgtcccggtcagagaaagacgacgaggatacctgggagcgggcggcggccgggctgggccgcgccggtgcgggctggcgactctgctcctccgcttgctgctgtctctgggaactgggtgccagcgctgaggggcttccagcggacagggacccccttccccggctcccctgcccaccctgccggggagggcggaagatgccggtgaagaagaagagaaaatcccctggggtggcagcagcagtagcggaagacggaggcctcaaaaagtgtaaaatctccagctattgcagatcccaaccccctgctagactaataagtggagaggaacatttttcaagcaagaagtgcctggcttggttttatgaatatgcaggtcctgatgaagttgtagggccagaaggaatggaaaaattttgtgaagacattggtgttggaacctgaaaatattattatgttagttttagcgtggaaattggaggctgaaacatggggattttttaccaaggaagaatggtttaaagggaatgacttcattacagtgtgactgcacagaaaagttacaaaacaaatttgactttttgcgctcaacagttgaatgatatttcgtcatttaagaatatctacagatatgcctttgattttgcaagggataaagatcagagaagccttgatattgatactgctaaatctatgttagctcttctgcttgggaggacatggccactgttttcagtattttaccagtacctggagcaatcaaagtatcgtgttatgaacaaagatcaatggtacaatgtattagaattcagcagaacagtccatgctgatcttagtaactatgatgaagatggtgcttggcctgttcttcttgatgaatttgttgagtggcaaaaagtccgtcagacatcatagcaagaactatgtgaagaaaatgcaaacctttcaattcccacgtgtatacaagctaatgtgatgagggggaaaaaaatccaacgggtgcattttcattcatatgaaagacttctcatagtacttttttttcctttttttaaaggaggtttttcttgttacatgtgatgggcattgagccacacctcttcttagactgaatattgaagtttttgttttgagttatgtttataacatttatttcagaacaataaagattcagatttgtgacaaaaaaaaaaaaaaaaaaaa

SEQ ID NO: 172 - DNA, 989 bp, Homo sapiens
  misc_feature (338)..(338): n equals a,t,g, or c
  misc_feature (352)..(352): n equals a,t,g, or c
ggcacgagtgaaggaggggggcattaagcaccctggggccccacgatgggcagcaagagtttgccgagggaggaaagcccaccggtggagtgggcagaggggttggtgtgtggacttctggagcctcaggaggaagggtgcgggttcccctggctgcagacgtccctgaggctgccctgcctcccccaggagagaccttcctgccctactacacgggccgcgccattgatggcatcgtcatccagaaaagcatgggatcagttcagcacggctgttcgtcatcgtgtgcctgctggccattggcaggtagctggctcaacccccacgccctgccccgnaaaccccgacctgnaaccagggaaggaaagggaggggcctgtttcctaaggaagacaaggggccagggaggccctggaaatgcccctggtgggcctgtccctcagctggtcaccctgggaaccggcttccacactgtcttagagcaccctagaaccacaccctctggtccctgaaaagggcttcagtcctcagggttccctgctcaccctccctggctgttttccaagtaggaatctggtcccaaacagaaccggctttgtctgagttgttctggaaggaagagggtctggctggcacatttgggtctcttgtcccacaactgtcccctttgccctcaccttgaggggggctcccactgggaatgagggggaccccgcagggatgccagccctggagtggggctgcggtggggctcccaggcctgcagctgcaggcattctgaggggcaacgtggaggaagggccagggatgcatgggattttaattgtttcatcacaccttccccgtggcaaagaaacagtcagtcctcttcaggtgtcttctggatttctggtgatggacagagaaatctttttacagtttcaaattatgttcaacaaataaaaattgcattttttattttgaaaaaaaaaaaaaaaaaaaaaaaaaaa

SEQ ID NO: 173 - DNA, 879 bp, Homo sapiens
ggcacgagaaattacagcagtgcaaagcagagctaaactctaccactgaagagttgcataagtatcagaaaatgttagaaccaccaccctcagccaagcccttcaccattgatgtggacaagaagttagaagagggccagaagaatataaggctgttgcggacagagcttcagaaacttggtgagtctctccaatcagcagagagagcttgttgccacagcactggggcaggaaaacttcgtcaagccttgaccacttgtgatgacatcttaatcaaacaggaccagactctggctgaactgcagaacaacatggtgctagtgaaactggaccttcggaagaaggcagcatgtattgctgagcagtatcatactgtgttgaaactccaaggccaggtttctgccaaaaagcgccttggtaccaaccaggaaaatcagcaaccaaaccaacaaccaccagggaagaaaccattccttcgaaatttacttccccgaacaccaacctgccaaagctcaacagactgcagcccttatgcccggatcctacgctcacggcgttcccctttactcaaatctgggccttttggcaaaaagtactaaggctgtggggaaagagaagagcagtcatggccctgaggtgggtcagctactctcctgaagaaataggtctcttttatgctttaccatatatcaggaattatatccaggatgcaatactcagacactagcttttttctcacttttgtattataaccacctatgtaatctcatgttgttgtttttttttatttacttatatgatttctatgcacacaaaaacagttatattaaagatattattgttcacaaaaaaaaaaaataaaaaaaaaaaaaaaaaaaa

SEQ ID NO: 174 - DNA, 1919 bp, Homo sapiens
  misc_feature (1903)..(1903): n equals a,t,g, or c
agacagggwggcggtggcagaggacacttgtcatggccgcctctaaacctgtggaggcagcggacaccctgaaggtcccggtgctcacttggacatgaactctcttgatagagcccaagcagccaagaataaaggcaataaatattttaaagcaggaaaatatgaacaagctattcagtgctatactgaggctattagcttgtgccctacagagaagaatgttgacctttctacattttatcaaaacagagctgctgcctttgaacagttgcaaaaatggaaagaagtggcacaagactgtacaaaagctgttgaacttaatcccaaatatgtgaaagctctctttagacgtgcaaaagcccatgagaagctagacaataagaaggaatgtttagaagatgtcactgctgtgtgtatattagaagggttccaaaatcaacaaagcatgctgttagccgataaagttcttaaactccttggaaaagagaaagccaaagaaaaatataagaatcgtgaacctctgatgccatctccacagtttatcaaatcttacttcagttctttcacggatgatatcatttcccagcccatgcttaaaggagagaaatctgatgaagataaagacaaggaaggggaggctttagaagtgaaagaaaattctggatacttaaaggccaaacagtatatggaagaagaaaactacgataaaatcataagtgaatgctcaaaagaaatagatgctgaaggcaaatacatggcagaagcattgctactacgagctaccttctacctgcttattggcaatgccaatgcagccaaaccagatttagataaagtcatcagtttgaaagaagctaatgtgaagcttcgagcaaatgctctcatcaaaagaggcagcatgtacatgcaacagcagcagcctttgctgtccactcaagattttaacatggctgctgacatcgatcctcagaatgcagatgtttatcaccaccgaggacagctgaaaatactccttgatcaagttgaagaagcagtggcagattttgatgaatgtattaggttaagacctgagtctgctctggcacaagcacagaaatgttttgcattgtaccgccaggcatatacgggaaacaactcttcacaaatccaagcagctatgaaaggttttgaagaggtcataaagaaatttccaaggtgtgccgaaggctatgcactatacgcccaggcattaacagatcaacaacagtttggtaaagctgatgaaatgtatgataaatgtattgatttggaaccagataatgctacaacatatgttcataaaggtttacttcaacttcagtggaagcaagatctggatagaggtttggaacttatcagcaaggctattgaaattgacaataaatgtgattttgcctatgaaaccatgggaactattgaagtacaaagaggaaacatggagaaagccattgacatgttcaacaaagctattaacctggccaaatcggaaatggagatggcccatctgtattcactttgcgatgccgcccatgcccagacagaagttgcaaagaaatayggattaaaaccaccaacattataaaacagggggaaagcagactgaccctctttttaaaagtttaccccctcttcaactgaaccctaaagacactgtcatgaactgtgttgaatggtggaaatcagtatttctgtttgtggtgttgttatttgttacatctgtttcatgtctaggtgttgtgggtgtggctgttgaaggaagtttgcagtcttgcagcttttattccctgtgcaacaaaagattagaacatgttaaagggatttttaaataaagttgcaaagagtacaaatgataattggccatgcaaataaaaaaaaaaaaaaaaanaaaaaagggcggccgc

SEQ ID NO: 175 - DNA, 1181 bp, Homo sapiens
ccacgcgtccggcagtggcaggaccaaggtcaaatgagttatagccaagtctacagtaagatgtggcagtattctgttttgaagccgggaccatgattggcaagcttgccacttggtcaagtgctcaccctctgaaaatgtcttccttggtctttgcctccagctgggtgccacaaactctgaactggattccaaggctttcatgaatgcacttatgtttgctgtggcagctgcattatgtcgtgggggatgtggatgcagaacctcacattctgtcatcttgcttatgttactctcctttatgtttcactttctcaaatgaatgtcaagcaggtgattttcagattcaaaagttctaaaataaattgctcaaatttatacattatgtaagctgttaataaaatttcttgtaggtgctacatatttgttaaaatttttggttgtaattttaagctcactgtaggcagaaaggaatcattaagatttctattcttttttagtctgtatctaaatgaccatatattttaattccaaatacttactttatacttcagtaatgctcattgtattttgcaaaatttatattgttcttttatttgaaaatataaggctttttttagctcctgaaagctatattatagtcatatagttttattatagtatttgataagaagagcagcaacatattgagaacagataaaattctgctgtctttttaatgattatttattaaattcttctcattagagcctattattaatgattgtaatgtatttactgtataatttttctgcaatttattaaatgccaatgacttccaatgtctgcttttcatgactgcacacagtttaaagctgtagatatctaaagggttatttttcagcccggcatggtgctcacgcctgtaatcccagcactttgggaggccaaggtgggtggatcacgaggtcaggagatcaagaccatcctggctaccacggtgaaaccccgtctctactaaatatagaaaaaattagccgggcatagtggtgggtgcctgtattcccagctactcgagaggctgaggcaggagaatggcgtgaacccagtgggcggagcttgcagtgagccgagatggcaccactgcactatagcctgggcgacagggtgagactctgtctcaaaaaaaaaaaaaaaaaaaa

SEQ ID NO: 176 - DNA, 1801 bp, Homo sapiens
acgcgtccgcgcccttttttttttttttttttttttcagacagcatctcactaagccgcccaggctacagtgcagtggcacaatctcagttcactgcagcctcaacctcctgggcataagtgatcctcccacctcagcctcccaagtagctgggattacaggcatgcaccactatgttcggctacttttaaaaatttttttgtcgagacgacatctcattatattgccccagctggtctcaaactcctaggctcaagcaatcctcccacctaggcctcgcaaagtactggaattaaggcatggaccaccatgcccagccccacagccaaacttcttgaaagaatggtctatatttactatctttactttctgaccttctattacctcctcaacccactccaccagaccaccacatatgggacttcccagggctccagcctgggtgccctcttctttaaatactcagtactaatgaaaaataaattcaacatataggagctgccttttcctgactcctccctccttttgctcatcttcagctctctattccatccctctcttcagcagaacaagagattgtgtttgtgtggtggtgagggcaggagaggctaagaacaggattgggggaccaagagtatagcaggggagatgggccctatctatcagcccaagccctcagcagctctttacacagccagttacctgtggcagcaagagggggaaagtcttgagagcacagaagagggaagaagggggagatgaaaggaaatgtgctgaaagagtacagctgtaagactgggtggcaatggacctggcggtggtactgggggcctgagattcacaggtgggggtgtaagaattggtggaggtggggggagtccaggaggaggtggtccttcaacaacaggaggctgtgctgggaaaggcagcataccaggaagattcacatcttctacaactactggatcacttccatgatcaaaaggacacatgtctcctctcatacaaaaacccttttcatcatagtctctacaccgtttctttggcatgggtggtcttacgtaagagttatggtccacttggtcttcatgaaattcagaccaactttcggtagtgttgtttccatgatgagtaggagcaattactgtaatagtgctgctcaaagtaggtacagggtagtggccagatgaaatactaggtaccgaagagactggagtataattattttctaatggatctgttctatccaggtcatatttaggttttaccagatccctttccctgcttcgtgttctgcttctgcttctagtcctgcttctatctctgtccctctcacgaagcctctctttactccaacttcgacttcgactcctgctataactgcgactccgccctcgtcttctattgtaccggtctctgtatgaatctcttccttctttatatctttttcttggtgtggaaaaaattctaccttcaggcttcctgatgatggctgctctggaggaggtaggtaactctttgtattcacagcatcaaaaagtttttccacaaatatctgtgtctctttctgaagaaatacatccagctgatcaatacataatgcctttaactctttttcacttttgtctttctttaccaaagccagaacatattttgctagggcggatggatctgcatcacagatgggctcgagagtcttgctgagccaggacttgagtgcctcgaagttttcaatgatcattttagaaaccatccacagcggccctaaggcccgtcacactcctccgcccgcccaggtcgc

SEQ ID NO: 177 - DNA, 2007 bp, Homo sapiens
  misc_feature (1991)..(1992): n equals a,t,g, or c
gccaacatgagccaccgcacccggccctctccatcttccttgaacgaccccattcacctactgctcctatttctaagactgtgaccaacagagcactggagcatgcagcagcacacagaccccccgcccagatgcctcgtcgtctgggaccccatgcttgccccaggtcccttgggccacatactaatccccctctggagaccttgagggaggtaagattgggaattagcaatacctgaaatgtgttaattctctaggtcatgtttgactctactccagtcctcgtcgccctcttcctccaccccagacttggtgcaagctattccctctgcctacaacactcttcttctccatgtttacccamctcataaccactgatcctttaggcctcagcttttctcaacccccatgcagccattcaacagaatctggsctgtggmaggctctcttctaggtaacgaagtgsattccttgcagcmtttagggacccagggtatcaagggctccgcaattaactttgacacwtggtttccaagatcgccctgaccctgaatrtcccaaggccagacaggagaagagcgaaattggagggctgtgtgagaggcattttggattgggactggaggtagggaacatccctttagccttcattccactgcctggatagctttcacatggccatgcctaatggccagggaggcttatgaccatggtcagaaagtcagctgtgtttccagggtgacaaaggaacaggtttgtgaatcatcatggtctgaagttcctggtacacgggatccatttcactcatcttgcctcatagagaaccctcattctcacctcccacaagggagaaaatgcaaagtttcatgcagtcactgcacagagtcttccagtgatgtgcatttctggacatcaagcctgaaagcggtacatcatagtttgtcaatgtaaaaactaaaataaaaccgtaacaattccccaccacacaccaaaaaatacctaacatcaggttaatgttacctccctycctgagtacagaaacaggatacgcacaaggaaaactgccattagaaagggaaggtttggaggcccatggcaagttcctggtccacaagcaattatwaaactcttctgggcaggtactgtgaagtcctcatactcctgctggttcaaaccaaaggacccaaggttgttttaagcatgacagttaaaggagtttggggtcctagcatgagctgattggtttcttggcaatgcaagtttctcagaaatgtaataggttctgatgacttgtttctagttatttccatgtatccatagccatgtccagagtttcttgttgtacataattccctaacttgatgaattatgctttctagttcatagacttctctctctctaatgatagagtttatgcaaaaccatcagacacaggtgggaagattacacctattattattacaccaattatttcatcttttctacagggctcagtcttaactggccacttaaaggatttttcatacttattttctattattgagctttaggtacaatcagctttttcaaccctgtgaaataccaaatttctrrgtratctgttctctatatcatttatatcatttataaactagcccttccttccctrarcctawttatctcctctaataagctttttaaaagcacaactaacaggccaggcacagtgctcacgcctataatcccagcactttgggaggccaaggcaggtgaatcacttgaggccaggagttcaagaccagtctggacaacatggtgaaaccccatctctagtaaaaatacaaaaattagctgggcgtggtggtgcacacctgtaatcctagctacttgggaggctgaggcacaagcattacctgaacctgggaggcagaggttgcagtgagccgagattgcaccactgcattccagcccgggagacagagcaagaccctgtctctgaaggaaaaaaaaannaaaaagggcggccgc

SEQ ID NO: 178 - DNA, 1098 bp, Homo sapiens
ggcacgagccggatcctcttcattcttttcggctactcaaccactccgcatgctgctggaatatttctggctttagaagtacaggagggcgcagatggctaactgagtaacattcatgaaatgaggctttctgtggcggcgtagtgtttggaattagaaggtaattcagtagagtgtaacttagagaatattgcaagtgacacattgaatcctgcccgtcagggaccttttcctcagagcaatccggccacacgaatagaaggctgtcgtgaatcacatcagatgtaaaatcattccttctgtttactcttttaattttcatcctttgcaggtagtgcaaattcaacttcaaatatggtgtaggttttgctagattccatatttttttcttggatttttgctaattatttttagcaaaaaatttttgctcagtggcaccctccctagtgtccatgggttagggccatgctggggaaaacgggccggtatttacacacgcgcaaaacacccagagacggcacaaggaggttgaactcatgtttcagttcgcgaacattgactccttacgaaagtcacttcattctaactagatgcgcccacttccggtcattatttcgtttgcatgatgtattgcttcttcacgttttgtttttattgagcacggagtagaattccagggctgccttgacttcttccctgcatgctccctcccagtgactttccttccctttcacatgaggatctgccgttcatgttgctttctcctttgtcctcttggacttgagggcattgtgaaaagctttgctgtgatttaaaaatgccagcaattttaatctagcagtgttgaagctgggaattttttggcgcaatccatgtagcagtgacccaggcttgggagccagaaacaagtgtgacctgggattttatttaacacaactgttgccaaagagttggctttgtttatttggttttggcggggagaggagtggtatttgatgctttctgtggacaatgtaaccctaaacacatcatgtattttaaatgccacctacataaataaaacataagcatattgaatacaaaaaaaaaaaaaaaaaa

SEQ ID NO: 179 - DNA, 652 bp, Homo sapiens
ccacgcgtccggagatgactcatggaaaaattgtgttggcttggtctgcatgtttaatgatgtgcttgtatatcgattagctgtgtcacttttaaataagaagtccacacaagcaagccaaatttttagatgacgaagtccataaataactagagaatttttgttatctgttgttaagttgaaatgtataatcatttatcactaaattgcacattgcctttatttatttgtgctctgtttttggtttacagtgtaataatacctcatttaaaaaataaaaaccactactgttacattttattaatttaaaaagctagaaaattcatgtagttactttttttacatatataatctgttaatgaattattgatttttgtatctgccacagtaaattaaagcattacacagtatttatcagtattttttaaacatcctgtccttttttaaaatctttgcttagtcagtcatatttttgtctgtatgattagaagtttttacgtccttccttttttgtacaaatctgtattgtattaatttctggatgcaatttttcaaatattaaaattatacagtcagtcaggcttcagtttattttttgaacacttgggcaattaattaaagccatatgtttaaaataaaaaaaaaaaaaaaa

SEQ ID NO: 180 - DNA, 1488 bp, Homo sapiens
cgccaagtttccggagggagagggtagaaactggagggggtggacctgtcactcacgggactgagggtccttttctcccgctcccaggaggaacgagaatgaatatgactcaagcccgggttctggtggctgcagtggtggggttggtggctgtcctgctctacgcctccatccacaagattgaggagggccatctggctgtgtactacaggggaggagctttactaactagccccagtggaccaggctatcatatcatgttgcctttcattactacgttcagatctgtgcagacaacactacaaactgatgaagttaaaaatgtgccttgtggaacaagtggtggggtcatgatctatattgaccgaatagaagtggttaatatgttggctccttatgcagtgtttgatatcgtgaggaactatactgcagattatgacaagaccttaatcttcaataaaatccaccatgagctgaaccagttctgcagtgcccacacacttcaggaagtttacattgaattgtttgatcaaatagatgaaaacctgaagcaagctctgcagaaagacttaaacctcatggccccaggtctcactatacaggctgtgcgtgttacaaaacccaaaatcccagaagccataagaagaaattttgagttaatggaggctgagaagacaaaactccttatagctgcacagaaacaaaaggttgtggaaaaagaagctgagacagagaggaaaaaggcagttatagaagcagagaagattgcacaagtggcaaaaattcggtttcagcagaaagtgatggaaaaagaaactgaaaagcgcatttctgaaatcgaagatgctgcattcctggcccgagagaaagcgaaagcagatgctgaatattatgctgcacacaaatatgccacctcaaacaagcacaagttgaccccggaatatctggagctcaaaaagtaccaggccattgcttctaacagtaagatctattttggcagcaacatccctaacatgttcgtggactcctcatgtgctttgaaatattcagatattaggactggaagagaaagctcactcccctctaaggaggctcttgaaccctctggagagaacgtcatccaaaacaaagagagcacaggttgatgcaagaggtggaaatgttctccatatcaagatgtggcccaaggggttaagtgggaacaatcattatacggactcttcagatttacagagaacttacacttcatctgttccacctctcctgcgatagtcctgggtgctccactgattggaggatagagccagctgtctgacacacaaatggtcttttcagccacagtcttatcaagtatcctatatgtattcctttctaaactgctactcatgaatgaggaaagtctgatgctaagatactgcctgcactggaatgttaaacactaaatatataacaagctgtgttttcctaagctgaaaaaaaaaaaaaaaa

SEQ ID NO: 181 - DNA, 721 bp, Homo sapiens
cggccgtgtcacagctgggaatgatgaggtggrggctgctgctcaggctgcaggcatccatgatgccattatggctttccctgaagggtacaggacacaggtgggcgagcggggactgaagctgagcggcggggagaagcagcgcgtcgccattgcccgcaccatcctcaaggctccgggcatcattctgctggatgaggcaacgtcagcgctggatacatctaatgagagggccatccaggcttctctggccaaagtctgtgccaaccgcaccaccatcgtagtggcacacaggctctcaactgtggtcaatgctgaccagatcctcgtcatcaaggatggctgcatcgtggagaggggacgacacgaggctctgttgtcccgaggtggggtgtatgctgacatgtggcagctgcagcagggacaggaagaaacctctgaagacactaagcctcagaccatggaacggtgacaaaagtttggccacttccctctcaaagactaacccagaagggaataagatgtgtctcctttccctggcttatttcatcctggtcttggggtatggtgctagctatggtaagggaaagggacctttccgaaaaacatcttttggggaaataaaaatgtggactgtgmraaaaaaaaaaaaaaaaaaaaaaaaaaaaaaaaaaaaaaaaaaaaaaaaaaaaaaaaaaaaaaaaaaaaaaaaaaaaaaaaa

SEQ ID NO: 182 - DNA, 4038 bp, Homo sapiens
  misc_feature (1764)..(1764): n equals a,t,g, or c
  misc_feature (4030)..(4030): n equals a,t,g, or c
  misc_feature (4037)..(4037): n equals a,t,g, or c
caggaactkgcgctkaagaccctgggracagatggcctttttctcttttcctccttggacactgacggggatatgtacatcagccctgaggagttcaaacccattgctgagaagctaacagggtcaactcccgcggccagctacgaggaggaggagttgccccctgaccctagcgaggagacgctcaccatagaagcccgattccagcctctgctcccggagaccatgaccaagagcaaagatggcttcctaggggtctcccgcctcgccctgtccggcctccgaaactggacagccgccgcctcaccaagtgcagtgtttgccacccgccacttccagcccttccttcccccgccaggccaggagctgggtgagccctggtggatcatccccagtgagctgagcatgttcactggctacctgtccaacaaccgcttctatccaccgccgcccaagggcaaggaggtcatcatccaccggctcctgagcatgttccaccctcggccctttgtgaagacccgctttgcccctcagggagctgtggcctgcctgactgccatcagcgacttctactacactgtgatgttccggatccatgccgagttccagctcagtgagccgsccgacttccccttttggttctcccctgctcagttcaccggcsacatcatcctctccaaagacgccacccacgtccgcracttccggctcttcgtgcccaaccacaggtctctgaatgtggacatggagtggctttacggggccagtgaaagcagcaacatggaggtggacatcggctacataccccaratggagctggaggccacgggcccctctgtgccctccgtgatcctggatgaggatggcagcatgatcgacagccacctgccctcaggggagcccctgcagtttgtgtttgaggagatcaagtgggcagcaggagctgagctgggaggaggctgcccggcgcytggaggtggccatgtacccyttcaagaagtctcctacttgccgttcactgaggccttcgaccgagccaaggctgagaacaagctggtgcactcaatcctgctgtggggggccctggatgaccagtcctgctgaggttcagggcggactctccgggagactgtcctggaaagttcgcccatcctcaccctgctcaacgagagcttcatcagcacctggtccctggtgaaggagctggaggaactgcagaacaaacaggagaactcgtcccaccagaagctggctggcctgcacctggagaagtacagcttccccgtggagatgatgatctgcctgcccaatggcaccgtggtccatcacatcaatgccaactacttcttggacatcacctccgtgaagcccgaggaaatcgagagcaatctcttcagcttctcatccacctttgaagacccgtccacggccacctacatgcagttcctgaaggagggactccggcgtggcctgcccctcctccagccctagagtgcctggacgggatctgatgcacaggcccccacgcctcagagccagagtggtcctcagcccatttcagcactgcagatgccgcccactcccaccccactcctaggctgccttggagggtacaagatccactgagggtggccaccacagccttggctccatggtggcgggtagacaagggatgcctgggctgactgggcagaggaacctctagctctgactgtcactcggctctccctacccatttggctctggaagctgcttggccccccnagatcagggcctgggtgaactccctggacctttcctagccagccgcacagtctaggcccttgtggggtgaagaatggagggaggagcaggctaggaagacggggccaccaccctctccttgctttcagcccttcccacaggaaacatcaagaagccccagccaggaggggccaggctgccaaggcggctcccctgtttatctagagccttcgttcctggccataccccggactgccctcctgtgcctgatgtccccagctggggtcagtctcaacaggagccagtcttctggagcctctgggcagaaccctccatcagagtggaaatcagacgggaccccctgcagcttccctgaccacgccactgaccagctatctggggaagtttactgtgaaggggtttctgcctttagcaatggggttcactaagggggttcccgaggcccagggccaaggcactcccaccgcctaccttagcacagggtctctgcaggactgcgggagccagcgctcctgccgcccctcttgcccctcagaccttgcatccacagaagcacaacccagccaaacaccacagccttctccagagccggcactgtcccggcaaccaggggtgccccaggctagctcttctacctctggggcaccacggactccccttggccactcttgggactttggtccacgtcctgagccactgaccacggccagtctctctttttatatgtgcagaaaagtgtttttacacaaactttctcatggtttgtaggtatttttttataaccccagtgctgaggagaaaggaggggcagtggcttccccggcagcagccccatgatggctgaatccgaaatcctcgatgggtccagcttgatgtctttgcagctgcacctatgggaagaagtagtcctctcttccttctcctcttcagctttttaaaaacagtcctcagaggatccatgatccccagcactgtcccatcctccacaaaggcccacaggcatgcctgtactctctttcattaaggtcttgaagtcaggctgccccctccccagcccccagttctctccccaccccctcaccccacccggggctcactcagcctggcagaggaagaaggaaggcagacatctccgcagccactcctgggccttttatgtgccgagttaccccacttgccttgggcgtgtccactgagccttccccagccagtcttgttctcaattttgttttgttttgttttgagacggagtcttgctctgtcacccaggctggagtgctatggctcgatcttggctcactgcaacctccacctcccaggttcaagcaattctcttgcctcagcctcccgagtagctgggattacaggtgcatgccaccatggctggctaatttttgtatttttagtagagatggggtttcaccatattggtcaggctgatctggaacttctgacctcaggtgatccacctgcctcagcctcccaaagtgctgggattacaggcgtgagcaatcgtgcccagccttgttcttaattttgtatcatccagtcatcgctaatattacacgcaccttctcacttaatcctcacgacaagcctgtgaggcagatgctcattgttcccatcttgatgaaacttgagtctcagggaagtgaagtgacttgcccagggtcactcaggtagagttgagattcaaacccacatgtggctccaaagtctgcatctggatttgggggtgttttttggcatggcaccctcacctctctccctgcctgttttccccaaagtggaaaggaaggcctttcaaaccagagtgtctcactcccctctgacctccagaccagatggggcatgagccagccagctcagccaggctccctgtgtcctgggaggaagtgtccccatcccccatgccccttatggggagggagggcgtctgatgctctctctctgcctcccccccatcctgtcaggcacaggtgacgggggcagcccatgcgagcccttctcctgctgctctgggagggccagttccacattgagccagcctggtcccatggaaaatgatggcctgggctttctgaggccttatctgatgcctctgcagttcatgtcccccaccaggcctcgaggctcagggtgggagagggccccgggctgccctgtcactcctctaacacttccctcccctgtccccaacatgccctgtaataaaattagagaagactaaaaaaaaaaaaaaaaaaaaaaaaaaaaaaaaaaaaanaaaaaana

SEQ ID NO: 183 - DNA, 1427 bp, Homo sapiens
gaacatttcaagtagcctccctctatgttcctttcctttttaaatatattgataatcctactgcagggaatttgggagccatacttggtcttcgcatgcaacgtaattagatataactatactatgtgaatatgactaaagaaatgaaaatgaaaacagtatcttgtgctctgtaacgattgttattaaatatatcatagaaatgagaagagtaggctcaggagctgaactgcctagttcaaaaggccaaatttactactttttgttccgtgattgaatttgttgtgctcctgtttccttagttgtaaaacagagataacaataggacgtgcccataagcttttcatgaggattaaatgagttaatgtgtttggtggggaccaggtggacatggtactggtagggccctatttgacattggctttaagtatcattggctttaagtgcatcagtagatatatgatgacaataattgtattatcatggtgatatggatttcttataaatacttgtattatgttagtcacttctagaaaagaatacatctatacagtagaatataattcaaaaaataatgtcatatttttgtaaagaaattttttgtaaaacttttcagtcttcaaagagtttcatagactttattccatttatattgagagcctactttgtgttaagcattttgctgaacattgtcctcactcttatgttacttaccatctattgggaagagaaagaagtaaacaaataattacatgtagagtagtagtgtcaatggtagaggcatgaacacaacacagatttaacactagagaaagagtgatcacaaaagaaatgatgtttcagttgagttttaaatggcagctggagttcatctgaatgattaggtgtctaggacaggtttaaaggttagggagtaaggaagataatattcaaaataaaaagaacctgaggatattcacagaggacatttgcagaggcctgaaatagcattggtacattcctagaaccataaatagtttgatggtaatgtaaattacagtatgttttgaaaaatcatggaagatttataccacgatagaaacttcaactttattctaaagttgatgagcatttgacagattttaagcaagaaacaaatattaaatttatattttagaaagattctagatacataaaaagcacttattataatccagtatccattcatgataactctcagctaactggaaataaaagggaacttccttagtctaaggaagaacatctacataaattctacaaccagccacatacttaatggtgaaataatgaatgtttttctcctaagatcaggaaaaagaaaaagatgtctcctcttacttctattcaggatggtactggtagttcaggccagtacagctatgcaaaaaaaaaaaaaaaaaactcga

SEQ ID NO: 184 - DNA, 1768 bp, Homo sapiens
  misc_feature (1743)..(1744): n equals a,t,g, or c
cccggaatttccgggtcgacccacgcgtccgtttgaggatgagccacctttattagaagagttaggtatcaattttgaccacatctggcaaaaaacactaacagtattacatccgttaaaagtagcagatggcagcatcatgaatgaaactgatttggcaggtccaatggttttttgccttgcttttggagccacattgctactggctggcaaaatccagtttggctatgtatacgggatcagtgcaattggatgtctaggaatgttttgtttattaaacttaatgagtatgacaggtgtttcatttggttgtgtggcaagtgtccttggatattgtcttctgcccatgatcctactttccagctttgcagtgatattttctttgcaaggaatggtaggaatcattctcactgctgggattattggatggtgtagtttttctgcttccaaaatatttatttctgcattagccatggaaggacagcaacttttagtagcatatccttgcgctttgttatatggagtctttgccctgatttccgtcttttgaaaatttatctgggatgtggacatcagtgggccagatgtacaaaaaggaccttgaactcttaaattggaccagcaaactgctgcagcgcaactctcatgcagatttacatttgactgttggagcaatgaaagtaaacgtgtatctcttgttcatttttatagaacttttgcatactrtattggatttacctgcggtgtgactagctttaaatgtttgtgtttatacagataagaaatgctatttctttctggttcctgcagccattgaaaaacctttttccttgcaaattataatgtttttgatagatttttatcaactgtgggaaaccaaacacaaagctgataacctttcttaaaaacgacccagtcacagtaaagaagacacaagamggccgggcgtggtagctcacgcctgtaatcccagcactttgggaggccgatgcgggcggatcacaagggcaggagatcgagaccatcctggttaacacggtgaaaccccgactctactaaaactacaaaaaaaattagctgggcgtggtggcgggcgcctgtagtcccagctactcagraggctgaggcaggagaaaagtgtgaacccagragscggagcttgcagtgasccgagatcacaccactgcactccatccagcctgggtgacagggtgagactctgtctcaaaaaaaaaaaaaaaaaaggagacacaagacttactgcaaaaatatttttccaaggatttaggaaagaaaaattgccttgtattctcaagtcaggtaactcaaagcaaaaaagtgatccaaatgtagagtatgagtttgcactccaaaaatttgacattactgtaaattatctcatggaatttttgctaaaattcagagatacgggaagttcacaatctaccttattgtagacatgaaatgcgaacacttacttacatattaatgttaactcaaccttagggacctggaatggttgcattaatgctataatcgttggatcgccacatttcccaaaaataataaaaaaatcactaaccttttttaaggaaaatatttaaagttttacaaaattcaatattgcaattatcaatgtaaagtacatttgaatgcttattaaaactttcccaattaattttaaaaaaaaaaaaaaaagggcggccgctctagaggatccctcgaggggcccaaggttactcnnaaagagtttcccttaaagatcccg

SEQ ID NO: 185 - DNA, 840 bp, Homo sapiens
  misc_feature (789)..(789): n equals a,t,g, or c
  misc_feature (805)..(805): n equals a,t,g, or c
  misc_feature (836)..(836): n equals a,t,g, or c
gtctgtctcctactggcacaacagaattttggctgggaaatgagaagattcatttgataagcacacagtctgccatcccatatgcattaagagtggaactggaagactggaatggcagaaccagtactgcagactatgccatgttcaaggtgggacctgaagctgacaagtaccgcctaacatatgcctacttcgctggtggggatgctggagatgcctttgatggctttgattttggcgatgatcctagtgacaagtttttcacatcccataatggcatgcagttcagtacctgggacaatgacaatgataagtttgaaggcaactgtgctgaacaggatggatctggttggtggatgaacaagtgtcacgctggccatctcaatggagtttattaccaaggtggcacttactcaaaagcatctactcctaatggttatgataatggcattatttgggccacttggaaaacccggtggtattccatgaagaaaaccactatgaagataatcccattcaacagactcacaattggagaaggacagcaacaccacctggggggagccaaacaggctggagacgtttaaaagaccgtttcaaaagagatttacttttttaaaggactttatctgaacagagagatataatatttttcctattggacaatggacttgcaaagcttcacttcattttaagagcaaaagaccccatgttgaaaactccataacagttttatgctgatgataatttatctacatgcatttcaataaaccttttgtttcctaaganaaaaaaaaaaaaamwnggggggggcccgkacccattggccttatggngggc

SEQ ID NO: 186 - DNA, 903 bp, Homo sapiens
ccacgcgtccggatgaattagaagaaagaggtttggggactcagcggatactagttcttttaccttctgcttggtaacttagattaaactgagcattgtttttctgtcacaaatgttttccttatgacactggtttcgacatgtaaaatgtgtttgaaaacctgctttgtagatgcagagagaagctataggaaacccagtaccacccctggtctgttctgacgagacatcgttcataaggcacagcacatcgcaagatgaacagttgttaataaaagctgttgctggaaacttgctttaggaacagctcaagaaccttggagttcatatttcacaaatattaataaatataagtccaagagctgtcagcctaatctgtaggagcagaacctctgattgaccaaaaggcatatgggtttaggttggttttttgatgtcatatgtctctgatggggctgcaagtgctacctcgcgcttgtacactgctgctgtggggctccgcgcctgccggtgaagagctgcagatgccgagaagccagcaaacacagggcccactggaaaaaaatagttttttcattagtatttctcgggaggacccaaaagttaaggtcagcttgttcactgtaatttctggaagaagttcactcagaccttcctgaattcagatcatctcagaagtctggagggaaatctggcgaaaccttcgtttgagggactgatgtgagtgtatgtccacctcactggtggcaccgagaaacttacttccttgtattaagtgcacttcttgtatttctaataagatgactttccagaaagtgagatttgttatgttctggcttttaaaaggtaaaatataaataaatttcataacttaatctaaaaaaaaaaaaaaaaaaaaaaaaa

SEQ ID NO: 187 - DNA, 976 bp, Homo sapiens
ccacgcgtccgtgaagattcaagtcagttgttcagttacttgaagcaaaacgaaatctttcatttcagtcaaatcactgcagtcatgaaatactgaacaattgccttaagtctttgcttgactcactgggatagactgaggctttgggtgtgtctgtattagcatttcattagtacttcacatgcttttgatgtactcttgagattgctttaaattttgtattgaaacaacaatacattttgcactgtagtaatgggagcactaactcttacaacagttagtgaatcgttttaaagaatcagttcagtgtagacattttgaaaagattgtttcctgtgctttacgatagcttagtgcaatgtgcacttctgttttacttgccattttcctgctctgtttctctgtgacatgaagcaacagaaactgagatcaaagttaagattatatcctgtttgtagtatcagatatttttctgtgtacaattataggattgtaatctaaactggaatttttaggcagtaagtcaccacaaaatgttttagataagacacaataaaattattataaataaaagcttaatgtttgtaaaaaatctcttttttagtatttcttttttcacatgaaagaagtggtggctgctaaaaaaaaagctacagtgtttattaagggtctttttgatttatgtaaatatttgtaaattggtcagtgcctgtaaatttaaatataaaaagtaaccttgaaaacagttttaactttttcaaaagaactatgtccaacattttttagacctgctgtagtacagttttgtacctctaacgtattttttttttgcagaccaaatgctaaaacttttgcttttctttgacttgtaaaaggtgcacattttcattttcttccttaagttcaaatttttgtatgatgtcaaatgcaataaaatttatatatggacaaaaaaaaaaaaaaaaaaaaaaaaaaa

SEQ ID NO: 188 - DNA, 804 bp, Homo sapiens
ggcacgagctgatgtgggctggggccagtaggggcaggacaggtgccaggctggctgttcctctgcatgcctggtgcaccctgtggccgctagcccttggccaggccatcctgttgcagatcccagtgctgccacagggacaccaccaggcacctccctaggcaacgccaagcaggaggacctcacccacacccatggcaaagcaaaacaaaagaggcaccccgaccccattctacagaagccccagtccatggtcacctgtattctacctcacactccagcgtgggctttttccaggatgtgccctgagcctgttctgaacagctgtaaccccaactcccccacacaatgtgtctgcctgggaggtaagtaagtccagactgggtgtccaggagctggaacccagagagcgtcctgtccctaaccagccactgcagccctccagctctggccctcagctgcttgacaggacggactgctgggagatggcagccggttggcagggcccttgccctcacaccccgctgcccaggagccaggtctgaacttctgtgcacaggcctggcccctcagactcactcctgccaagaggggccacttcttcagggtgagccccggctatcaggcagccgtgagctccagggcgggctgcagctcccatccccttgcgccatgtttggagtaaagggatcagtggaagtggaggagccacttgggttctcctaagaccagcccttccggaggggccggtcctggaagaaacccataatccctggagtgtgaaaaagggcaaaaacggcacga

SEQ ID NO: 189 - DNA, 268 bp, Homo sapiens
gcacgagcggcacgaggtggagtctgcagtgagccgacgtcgtgctactgcactccagcctgggcaacaaagcgagaccctgtcttttaagaaaatggtctttaagttcagtgtagcccttaaaagtgatgtacatggattaaggactggaagaaagtactgcaaagtgtttatatttgtatgcatggagagattacaggtagtatgctttgctcttgtccattttgtattttctgaatttcaaacagttaaaaaaaaaaaaaaaaaa

SEQ ID NO: 190 - DNA, 2450 bp, Homo sapiens
ggcacgagcggcacgaggtttcttgaggagtaattgtcgggaaagtagataaagtataagctttagaatcatatatttagattcaaatatctggtatcgaatcctggctctgaatttactggctgtgtgaccatgggtaaattacttaaattccttaactctccctgttttccattcctaaatgtgtatgatgaattatttgcagagccatttggaggactagtggtatggaatgcaaactatttatgtctatttactaaaacataaacagagtaaatcaccaagtacagacaggctccaaggaatggtttgcttacttgttcactcttttttgtctttctgattctatcctctgtcactctaggtcttcagtttctttactctccatggtggtgcctggctgctgcgactctaggggtcctttgcctgggattagtagtgaccattatggtgctgggcatgcaattatcccaggtgtctgacctcctaacacaagagcaagcaaacctaactcaccagaaaaagaaactggagggacagatctcagcccggcaacaagcagaagaagcttcacaggagtcagaaaacgaactcaaggaaatgatagaaacccttgctcggaagctgaatgagaaatccaaagagcaaatggaacttcaccaccagaatctgaatctccaagaaacactgaagagagtagcaaattgttcagatttagagtccgaggcgctgtctcccagacatacccttcaggtacctgtgcatatatacaacgaggagctgtttatgcggaaaactgcattttagctgccttcagtatatgtcagaagaaggcaaacctaagagcacagtgaatttgaaggctctggaagaaaagaaaaaagtctttgagttttattctggaatttaagctattctttgtcacttgggtgccaaacatgagagcccagaaaactgtcatttagctggctgcagaactcctttgcagaaactggggttccaggtgcctggcacctttatgtcaacatttttgattctagctatctgtattatttcacctagcttgtcccaagcttccctgccagcctgaagtccattttcccctttttattttaaaatttgactcctcttcaagcttgaaaaccctctgaactcagtcttctttacctcattatcaccttcccctcacactcctaaaattgcatgaaagacagaacatggagaacttgctcaagtgcaggcagagagcaaaaaggggaaatatgtctgggaaaaagtgcacgtgaagaaacaaagaaggacagaggccattccgaaatcaagaaactcatgttcttaactttaaaaaaggtatcaatccttggtttttacactgtggtccatctccagactctaccacttacagacagacagacagacacacacacacacacacacacacacattttgggacaagtggggagcccaagaaagtaattagtaagtgagtggtcttttctgtaagctaatccacaacctgttaccacttcctgaatcagttattatttcttcatttttttttctaccagaggacagattaatagatttaacccttcacaacagttcttggtagaatcatgggatgtgtggcccagaggtaaagaatagaatttctttccctaaagaacataccttttgtagatgaactcttctcaactctgttttgctatgctataattccgaaacatacaagacaaaaaaaatgaagacactcaatctagaacaaactgagccaggtatgcaaatatcgctgaatagaaacagatggaattagaaatatatcttctatttttaggcttctatttcctttccacccactcttcacaggctattctactttaaaggaagcctttttattttgctgcacacaatctagcaggaatctttttttttttttttaagagctgtgtcatccttatgtaggcaagagatgtttgcttttgttaaaagctttattgagatataattaacataaaataaactgaacatatttaaagtgtactatttgataagttttcacaccttgtggagaacatgcatactacaattaagagagtgaacatatccatcatccctcaaagtgtcacaatgctcctcctgatgactcctccccagaaaaccaccaatcggctttcattttgcattttgtagttttatgtgaatggaatcatatagtatgtcttttttttttgtctggcttctttcactttgcataattattttgagattcatatgtctccatcttgatgctcgtatgaattcattcttttaaatgttgaatattcccttgtatggatataccacaattcatttacccatttacttgttgatgacatttgggttgttttagttttgggatattacaaataaagctgctgtgaacatttgtgtacaaaaaaaaaaaaaaaaaa

SEQ ID NO: 191 - DNA, 1243 bp, Homo sapiens
ggcacgagtgcctgtaagcccagctactcgagaggctgagcaccaaaatggggatgctagtcacacttacgtcctagggttcttggggatgaaatgggttcttacttgtacaactcttgaagtggtgtgcctggcatgtgacaagcatgcagcagatgtgatgctagctttcattattattggctatttgccatatccacggatgtcatcttgtcccttgtctcctttaattattgacagaagttgacacaagtgatcatctcatcctttaaaaagtgctttctctcttcccttggctactaggacactttactgtcgtcgttcttttccagtgtcattggccattttcagctccttcattagtttctctcccacttgtcttttaaatgcatgtatttctcaaggatctcttcatctaaatgtccttccctcaaattgctgtcttgtgcattttcctttttagttaatactattatatcctccaagtcactcaggattgttaccgtgaaatcatccagaattctgtctcctcctttgtctcccttttcagaccactccaaagctgaccttttttcaaattttgttgattggacctaccccatcttatgcatggccttctcatgttcgatgctacgatcccattttggatatctggtcattctctttttctgtcttctcattactgtcagagttctctttcttaaagttcagccctaatgtcactccccattgcatgaagtggtggtctccaaagaggggcgctggcataataggaggtatgcaaataagtacatttggatatgaaaagaaaatattcaagctgtatttatgccttaagttaagctttactaatatttggtgcatgcattggtacctttattggctctataagccatttgctcatatatcttgaagtacccaagggaagactgcaagatgaattaatggtcttccactgtttgttgcttctcagcatattgcagtctattaaagcttccatgtatctgcttaagtagatctacagggtaaagcatgtagtttttaagatgcatgtgttctcaaaaagggtaagtgacataaaatatttgtacagaaaaggggccgggcgcagtggctcacgcctgtaatcccagcactatgggaagccaaggcgggtggatcacgaggtcaggagattgagaccatcctggctaacatggtgaaaccccgtctgtactaaaattacaaaaaaaaaaaaaaaaaa

SEQ ID NO: 192 - DNA, 2564 bp, Homo sapiens
ccacgcgtccgcaccacacttggtccacttacttataataaacattgatttggtcgttcaggttcctttggtcctcctattgagaacagtttgaagtccatgaaaattttaacaatatttttgatcctgaatctaacatatttgaaaaatagttgctccactaggcttccacagtgcaggcttcaaatgggatggctaaattcacctcatggttcttagttttttttgtacttgtggcacattctcttcatatattaccccaccctgtttgtttgggcagttaagatgctggtactgtctggtggcgataaggaaagggaaacagaagtcagtaattcagacaagaataaacaggatgaaatgcatctattcctaggtaagattagcccaccacctccacactgctgctgtctcttcagctcaggctgtttttctctgttttgattgtgtaaagagtagagtgctgatttgtgtgttacagagggtggtctgtacaagtcataaagctcgacatggccttgcttcctgctaggtgttaggacacccatgatggtggagtctcttggcattctgtgtaattagataaggctgtttatagcattggtccatgagaacttccttgtttctatttaaaatgaaaatcattgtataagtaaaacttcttaaatgtagatagaaatagaattttaactgaaattttatgaagccattggccgcagggatgtgtgtcatggaggagggctccatacttttttggtatacttatctcaaacttaattcatttgcatactgctttttctctaagtgccaactgtcctagtatattttctaagtcaacttttactttcactttatcctaagcaagaatatctttggcatcacagactcagtaagcccgtttttttctaatgcacatacaaataaataaaatgcacaacttttaacataaatggctgcctccaatttgggaaatactgttctggccagaggccgttgctctgataatgtcatgtggttagtgcattttaggaagacctcctttccctttggttgactcctgcaggacataagatatcagtgacgttatcctttgttgagccatcctggtttgagtcaggatgagtgttgagagtttttggggagttgcccctgtgtcctatattattttatcctcttaaattctgatggtctttggctccactgactccaggtaagttggggtgacagtgcagcatatttctattttctagttgtttctggccagacatggggaaggtcaagacatcttgttcatgcaaacggattgatgggcattcctaatctgattttattagtgtatttaggaagtaaagtaagatcttgagcccagctgaactcccctattgaattttctaacaaaaagagagtttgcgtatgggttcataattgagcctgctcttgtagaaatgttttatcagaattgaaatcctctctgatccccaaattctagagacaaagttgttttctgaatttgagaaatctgttcagttcacaaggaaaggtgacaatgtgtcatttggatgttgtcccacacgtgaggcctcgttgggtgcttgtggtgggagggaccctccaggcaggctttgtatggagggtttcatgtctggacacatttctgttccgagaagcattgtgcgtttttgggacgtggaccctgccagacctgtgcccagctctgccctcctccctttcttgcctgtcttttgagtatgtagtgggctttgtgtggcatcctgccaggttaaagctgcatggtgcttaggatagagctgtgctgtggggagctcttgatgatggggctgccatctatttgcctgttaattttagaaaccaaactcaaatgtcagaatttcctttctagaagaggtggttgaataggaaccagaaaggccttcatacaggcagggctgttcactcctctgacttgcgtgtttgtccttccttgtaggaaggcttttagggaatttatctgtttaggggaaataagcctgcaggaatgaacttttttttaaaataaaaactcttgatcaaaatggaaagaaaaaaaccagtgaaacaggctaggtagtttgtggaattctcctttgcaggtgaggggagaaagcagctatctcaagggcacagctacagattgggagctggggcttccatccagggtctgggacacccaaaccttaggcttgcccctcccgggaggcctccccctcagagctatgtgggatgcagttgcctttttacctgtgatgagaaactggtgaattgccaggattctggctctggcttcagtctgcccctttccggggattagagggcattaaccctacttcctacagccaagcagctcttcctcatgactctactttctaactcggggggttgactgattgatttgaagaccgccttgttgatgaatgtgttgaaacttgctatcataatgtaaatgctccttaataaaataacaggacctggtgggttcagttgccttgcccacgtgtgacttaaaaaaaaaaaaaaaaaaaaaaaaa

SEQ ID NO: 193 - DNA, 2062 bp, Homo sapiens
ccacgcgtccgatcaattagatgccccgaaatctacagtcgctgaataaccaataaacagtaacctccatcaaatgctataccaatggaccagtgttagtagctgctccctgtattatgtgaacagtcttattctatgtacacagatgtaattaaaattgtaatcctaacaaacaaaagaaatgtagttcagcttttcaatgtttcatgtttgctgtgcttttctgaattttatgttgcattcaaagactgttgtcttgttcttgtggtgtttggattcttgtggtgtgtgcttttagacacagggtagaattagagacaatattggatgtacaattcctcaggagactacagtagtatattctattccttaccagtaataaggttcttcctaataataattaagagattgaaactccaaacaagtattcattatgaacagatacacatcaaaatcataataatattttcaaaacaaggaataatttctctaatggtttattatagaataccaatgtatagcttagaaataaaactttgaatatttcaagaatatagataagtctaatttttaaatgctgtatatatggctttcactcaatcatctctcagatgttgttattaactcgctctgtgttgttgcaaaactttttggtgcagattcgtttccaaaactattgctactttgtgtgctttaaacaaaataccttgggttgatgaaacatcaacccagtgctaggaatactgtgtatctatcattagctatatgggactatattgtagattgtggtttctcagtagagaagtgactgtagtgtgattctagataaatcatcattagcaattcattcagatggtcaataacttgaaatttatagctgtgataggagttcagaaattggcacatccctttaaaaataacaacagaaaatacaactcctgggaaaaaaggtgctgattctataagattatttatatatgtaagtgtttaaaaagattattttccagaaagtttgtgcagggtttaagttgctactattcaactacactatatataaataaaatatatacaatatatacattgstttcactgtatcacattaaagtacttgggcttcagaagtaagagccaaccaactgaaaacctgagatggagatatgttcaaagaatgagatacaattttttagttttcagtttaagtaactctcagcattacaaaagagtaagtatctcacaaataggaaataaaactaaaacgtagatttaaaaagaactgcacgggctttagggtaaatgctcatcttaaacctcactagagggaagtcttctcaagtttcaagcaagaccatttacttaatgtgaagttttggaaagttataaaggtgtatgttttagccatatgattttaattttaattttgcttcttttaggttcgttcttatttaaagcaatatgattgtgtgactccttgtagttacacttgtgtttcaatcagatcagattgttgtatttattccactattttgcatttaaatgataacataaaagatataaaaaatttaaaactgctatttttcttatagaagagaaaatgggtgttggtgattgtattttaattatttaagcgtctctgtttacctgcctaggaaaacattttatggcagtcttatgtgcaaagatcgtaaaaggacaaaaaatttaaactgcttataataatccaggagttgcattatagccagtagtaaaaataataataataataataaaaccatgtctatagctgtagatgggcttcacatctgtaaagcaatcaattgtatatttttgtgatgtgtaccatactgtgtgctccagcaaatgtccatttgtgtaaatgtatttattttatattgtatatattgttaaatgcaaaaaggagatatgattctgtaactccaatcagttcagatgtgtaactcaaattattatgcctttcaggatgatggtagagcaatattaaacaagcttccactttaaaaaaaaaaaaaaaaaaaaaaaaaaaaaaaaaaaaaaaaaaaaaaaa

SEQ ID NO: 194 - DNA, 1716 bp, Homo sapiens
ggcttttgcaaaaagctatttaggtgacactatagaaggtacgcctgcaggtaccggtccggaattcccgggtcgacccacgcgtccgctaagataagggctttcttaagctttcaggtgtatgtatcctctagatgtagacaataatgtcccatttctaagtcttttccttttgcttctccttaaattgattgtacttccaaatttgctgttatgtttttttcctaatactgtgatctatctgatctgcagacaagaaccttgtctctgttgaagagcatcaaggggagattatgtacacattgaaactgaagtgtggtgttactgacggaatgtgcagtaactcctcagatatctgttaaggcatttcccagatgtgatgccagccttcttacctgtactgaaagatgcttagcttagaaaaaaacaaaacagatgcaaaatcagataattttattttgtttcatgggttttcttatttacttttaaacaaggaaggaatattagaaaatcacacaaggcctcacatacatgttatttaaagaatgaattgggacggatgtcttagacttcactttcctaggctttttagcaaaacctaaagggtggtatccatattttgcgtgaattatgggtgtaagaccttgcccacttaggttttctatctctgtccttgatcttctttgccaaaatgtgagtatacagaaattttctgtatatttcaacttaagacatttttagcatctgtatagtttgtattcaatttgagaccttttctatgggaagctcagtaatttttattaaaagattgccattgctattcatgtaaaacatggaaaaaaattgtgtagtgaagccaacagtggacttaggatgggattgaatgttcagtatagtgatctcacttaggagaatttgcaggagaaagtgatagtttattgttttttcctcgcccatattcagttttgttctacttcctccccttccttccagatgataacatcacatctctacagtaagtgcctctgccagcccaacccaggagcgcaagttgtctttgccatctggtctatagtacagtgcgcggcgttaggccacaactcaaaagcattatcttttttagggttagtagaaattggtttatgtgatgggaggttggttgattgtcaaaatgtacagcacaggcttttaatttgggaagcccctggtggcatttcaaaaggggacctcttacaggttggtaaaaaggtattaagattcttactaatctgtgggttgtgccttgccagacaggtcctaaattgtatattttttggaaaagtttatatactctcttaggaatcattgtgaaaagatcaagaaatcaggatggccatttatttaatatccatttcatttcatgttagtgggactatttaacttgtcaccaagcaggactctatttcaaacaaaatttaaaactgtttgtggcctatatgtgtttaatcctggttaaagataaagcttcataatgctgtttttattcaacacattaaccagctgtaaaacacagacctttatcaagagtaggcaaagattttcaggattcatatacagatagactataaagtcatgtaatttgaaaagcagtgtttcattatgaaagagctctcaagttgcttgtaaagctaatctaattaaaaagatgtataaatgttgttgaaaaaaaaaaaaaaa

SEQ ID NO: 195 - DNA, 788 bp, Homo sapiens
ccacgcgttcggaaggcctgccctcagagtgcagatccgtcacagactaaggagatggcaggcattgacagcttcactccatgaaggccatctctgtttctctcctccgcttaaccaagctgttgtggtttttcagcatagtgttgtatgttccattgctagctgtcctgctgtttaacacagtgttgtattttttttctaaatgtacataattagaaaagaaaataacaataggaagctatgtgtatcttctgtgtaaagcagtggcttcactggaaaaatggtgtggctagcatttccctttgagtcatgatgacagatggtgtgaaaaccatctaagtttgcttttgaccatcacctcccagtagcaatttgctttcataatccatttagcaatccaggcctctgttgaaaagataatatgagggagaagggaacacatttccttctgaacttacttccctaagtcactttccttatgtatcatctaatacaatgatggttgagtgaaaatacagaagggtgtttgagtattcagatttcataaaacacttccttggaatatagctgcattaacttggaaagaagcctgttgggccagaagacagaaactccaactggcaaaaaagcaagcatctaagaaaaaaaaccaccaaagttcttgaatttactatatttaaatgcattggttaagtttattttgctaaataaagtgaactgctttttgctctaaaatgatattctaaataaaaccttaactttttgttgaaaaaaaaaaaaaaaaaaaa

SEQ ID NO: 196 - DNA, 1611 bp, Homo sapiens
tcgacccacgcgtccgatacaacagttatcatatggcaagttgatccggatacacacctgctaaaactgcttaaaacattagaaggacatgcttatggcgtttcttatattgcatggagtccagatgacaactatcttgttgcttgtggcccagatgactgctctgagctttggctttggaatgtacaaacaggagaactaaggacaaaaatgagccagtctcatgaagacagtttgacaagtgtggcttggaatccagatgggaagcgctttgtgactggaggtcagcgtgggcagttctatcagtgtgacttagatggtaatctccttgactcctgggaaggggtaagagtgcaatgcctttggtgcttgagtgatggaaagactgttctggcatcagatacacaccagcgaattcggggctataacttcgaggaccttacagataggaacatagtacaagaagatcatcctattatgtcttttactatttcaaaaaatggccgattagctttgttaaatgtagcaactcagggagttcatttatgggacttgcaagacagagttttagtaagaaagtatcaaggtgttacacaagggttttatacaattcattcatgttttggaggccataatgaagacttcatcgctagtggcaggaagatcacaaggtttacatctggcacaaacgtagtgaactgccaattgcggagctgacagggcacacacgtacagtaaactgtgtgagctggaacccacagattccatccatgatggccagcgcctcagatgatggcactgttagaatatggggaccagcaccttttatagaccaccagaatattgaagaggaatgcagtagcatggatagttgatggtgaatttggagcagacgacttctgtttaacttaaaattagtcgtattttaatggcttgggatttggtgcaaacaaacatgattgatagctggacagacatgctcgtcatgaaaaaaaaaccatttctgaagcccgattggggcccaaacatttacaccttgcttcatagtaaccagttgagatgaagcacgtcgttagaacgttgttggacaccatgttgaattattcccccatcggttgtgaagaactgtgctacattcaggcttacccattgaactcagtatatatatttttttccttcctgtcttttgtctggcaggataccattcttgttgctcttctgtgtaatgaagtttaaatgcttgtttggaaaactttatttaacagtttagaaggcttgatagaaagagtgcattagtctgaagagtatacattggataggaaagaatttccttcttttgtttctccaaatctttccgccttatttagcttgagatctttgcagcttggttcatggattctagccttgcccgttgcgcagtatatactgatccagatgataaaccagtgaactatgtcaaaagcactctcaatattacatttgacaaaaagttttgtacttttcacatagcttgttgccccgtaaaagggttaacagcacaattttttaaaaataaattaagaagtatttataggaaaaaaaaaaaaaaaaaaaaaaaaaaaaaaaaagggc

SEQ ID NO: 197 - DNA, 854 bp, Homo sapiens
  misc_feature (345)..(345): n equals a,t,g, or c
tcgacccacgcgtccgccacaacagtcgagtccaaatcaaacgcgctccaggcaggtggggctggggttctgccagcctcctggccagcaggggtgggtgggcagactggggccagtatcagctgttctgcctggacccaggccgggctgggaaggcacacttgtgcttatttcccgcctccacttctgtgcaagcttgtgctgtcataagcagagatcacagccccatttcttggatggagaaagtggacactgaggtctgaggcttttgaggacagtcaggagccctcctatgggctccagtgatgcactcaccagcttctggtcctcttcttccacctcttnagagtgccttggctccctcctgtcgtcctggggaacctcggccccagccctgcctccccagccagtcacagctcctccctggtcaccctgagggagctcagggcccggctggtagctgggttgctctgcttctgtccccgactcctgtggagcctggcaggcaactccatgatctgaccccggttaccttgacagccctgcctggcctcccctctcatggcccagccaccccagaacctgaagaggttttctagctgccgtgcatttgccaggctgggttacccaccctactttccctgcctgccctccagtgctgccaggcctagtgtgccagccagcgctcagccttcagtaaagggttcccctgcttccaacctccattgcactgcttcccctaagactgtgacctcctggaaggctggagcacaactgcctctcaataaacgtgttgcaaaaaaggaaaaaaaaaaaaaaaaaaaaaaaaaaaaaaaaaaaaaaaaagggcggcc

SEQ ID NO: 198 - DNA, 858 bp, Homo sapiens
ccacgcgtccgaaaaaagggttatgtaaggaaagacaagagtatgtttaagacggtttctaccattttgcttagggcagtccctataatcttagaggcaacagtaagagagtgaaatattgcaggcagtgaattgggctaatttgccatcactccgatttcttcaaaactctcttaaagatgagttaatgttgctggcctaaaatagtctcatatatgggactcccttagaaatgatagtgatagtgttttatttaataaatctgctgtgatggtctaaggcaaacttgacttatggaattccagttagcactgttgatgataataattacagttggttttgcatctgtacagcactttacaattataaatactctttatggaagtagtttccttgggatgatatatatctggccattattctgttcaataggtgtgctatattatggcaaatgttgcaattatcattgtacatattggtatgtttatttgtatatagaatcatactcataccacagagtctaaagaagtagcagcagtgtggtgtagttagcaatcaagaacactggaccttaaataactgggtccaaatatcactttcaccatttattcactgtgagtcatgagaaaattgttttagttttgctgtctgtacaatggcatactactacctgtctcatacacacacacaggcacacacaaagttttactaattggttcatactaggaactctccaagtatcaattatccctgttacagaaacagtatgtatagagagacaatcatggagattccctgtccaaggattttcctgatagcttcctctggtccatatcaaaatgaaaaaaaaaaaaaaaa

SEQ ID NO: 199 - DNA, 1146 bp, Homo sapiens
  misc_feature (297)..(297): n equals a,t,g, or c
  misc_feature (489)..(489): n equals a,t,g, or c
ggtcttgatcttgttaccgaaatgcattctgtgtaatttcaacgtagactacgttcctgagtctgatgatgtcattgtaaataatcattcctcatgttgctctcacgggtttgacattggaggatagatgtgccatcaactttaaatagagtttccatcttttgtcagctctgcatgtcatacagcaagatggaacacaggttgcaagaaagaaccaacgttattcctgacattctattgatgtgttttgagcagcaatgtgtaaccaggtgtttctgcttctaatcttgattctgnctgatgaccatttttatactttatggcaaagcctcattgcctcagtttcctgtctggaaaatgagttcatcatctacctcttgggcaattgagagttttcattttgtgtcttttaaacatctggaaaatggaaaacactgagggctaaggataatgatattgttaatgtaatttgtcatcagaccggcctcntgctcactatttctttttttttagatgctgtttttttagaatattaaattaaaggagtgctgttaatatgtaatcttcaactagttccatggaggaaagtgatgttttatgaattagagcttaaattcctatctaatttctgaagactgcattcttttcaaagacttgaaattaaactcaggaggatacattttgtttgttctagggggaaacgtaatagaatggtatgagatgaattctatccttttacaataattattactataatattgaagtmttctatgcctttctgaaacactttattcagaaaagatcattttttggcttccttttaaaaataagcttgaagtagggaagcatttgcttcttagattttaaatgtagtcttattatgctgaggaaaatctttagttgaaaggataattcattacagatttttgatgaagggaagaaattaattatgttgctggaagactgtctacaaataatcaaaatatttaaatgtaatgtattcaagttgttattaaaaagttactgaatgttatctgaagatgtgaaatgtgtagtcaagtaaaaagttggcgtatactttcttgggctgcatatccaatttaattaaaaaattaaatctcaaaaaaaaaaaaaaagggcggccgc

SEQ ID NO: 200 - DNA, 2967 bp, Homo sapiens
ggggactcagtggagcagcggggagttgtgtccaccttgccgacgtcgctagccgtggggctgtcctgggaaggcggacggcgagcgcccggtgtccgcactcggccgcctgccgtgcccgtctgcgcccgtgtcatcctcactcgggacgcagggaccgtttttaaatcacaggggcgtgtgtcagcctgccctaggacttcatgtctatatatttccccattcactgccccgactatctgagatcggccaagatgactgaggtgatgatgaacacccagcccatggaggagatcggcctcagcccccgcaaggatggcctttcctaccagatcttcccagacccgtcarattttraccgctgctgcaaactgaaggaccgtctgccctccatagtggtggaacccacagaaggggaggtggagagcggggagctccggtggccccctgaggagttcctggtccaggaggatgagcargataactgcgaagagacagcgaaagaaaataaagagcagtagagtccctgtggactcccatgggtcataccagccagcatctgttcctgaactgtgtttttcccatcatgacggaagaagagagtgagccgcaattgttctgaaaatgtcaaacgaggcttctgttttgcacctgcagatcaccgagttggttttcttttcttttcttgcctttttttttttttgaaatttgccgagcagtggagccctctgacaatttgcaaggccctctgagaaaggaagctgcttagagccagggggttagtgggtgaggggagcgagtgctgtttttgagatcattatctgaactcaggcagcctagtagaggcagtggtgggattccaatgggtcttggtgggtgggaggtggggcatgtgcaaagcaagcaaggaacatttggggtaagaaaacaaacatgaggcaaaagaaaaaatacatgtttttaagaaaacattgagcagagaactgcagccaggatgcgctcagcagacattcactctggctgctgggacatcagaaaacaaagtcttcatctctctctccagtttcacccaccccaccctttgctttcatttcaggtgtgttggtctatatgacagggaggagagtaaaggagagcaggagcaattggctgcctgcaaagccagctggaggtgaagtgcaggaaaggaaaggtcaccccattctactccatggcctctctgctcccagctgtggtaggctcacatagccagtgtgatcggtttttaagaggcagtgcttttcagcttttctccctgatatatccattttgcttcccagcactttttaggagtagtgagagcacttcctgcccttgttggaagccccagggtggacactcagcacgaaggtctctcccttaactgctgcccttccaagacttgctcccgagatggagtgggcgtggtcttccaggctggcccttccttctcctcaccgccaccttccctgccccagccccagcagccatgggtacatgggtccccagctcacctatggattcccgccagtctgcccagctgcagtactcacgccccatgggggatcttggtctgtttttcttgtgggagcctagtggagagcagacgtggctttttatgtgtcttgttggggaggtgacttgcatggtggggacaaggctgtcgtggcaaccttgggatcgagtttgagactaaaggatgtcatgagatccctggcttctccccatgttgttcccggacaagggcagaagggaggcatggcaagggacctctgctgtccttactcaacagtggtcctcatccctccccacctcccactgcttcctgcaagggcaccagttgtatgagaaagttggcctttggacttaggatttcttattgtagctaagagccatctgaagcagcaggttgcaggacaaatgcttcagtccgccgagagcagtaccgtgtggccaagaggtggactcagagccttccttgagctaaactcggccaaccaaggcacgcagcatgtcccctcaggtctccagtcagtccaggttgaccctcagttctggacgtgtgtatatagctgtatttaatacctcaaggtcattgtggctctggggatgccggggcaggaggacgagggtgcgctgtggacacagcagtccgcggaattccgttctgggaagccaatggtcgccggcaccccttgcttcctccctctgttgtctgcctgtgtgacacacatcaatggcaataacttcttccaactcctcgcagaagtgggagaggccggcagcctgcaccgagaggggctttcctctctcttgctccccgcttcgttctgttttggctgcagagagtggttcatccatactctcattccctcgcctccccttgtggacgggggtcttgccttttcaattcctgtgttttggtgtcttcccttatctgctaccctgaatcacctgtcctggtcttgctgtgtgatgggaacatgcttgtaaactgcgtaacaaatctactttgtgtatgtgtctgtttatgggggtggtttattatttttgctggtccctagaccactttgtatgaccgtttgcagtctgagcaggccaggggctgacagctaatgtcaggaccctcagcggtggagcctgctggggggacccagctgctcttggacaagtggctgagctcctatctggcctcctctttttttttttttcaagtaatttgtgtgtatttctaactgattgtattgaaaaaattcctagtatttcagtaaaaatgcctgttgtgagatgaacctcctgtaacttctatctgttcttttttgaggctcagggagaaactagcatttttttttttccaaactactttttgtcactgtgacagttgtaaataaagtttgaaaatgctttccaaaaaaaaaaaaaaaaaaaaaaaaaaaaaaaaaaaaaaaa

SEQ ID NO: 201 - DNA, 752 bp, Homo sapiens
ccgcttaatacagtatcctttcgatagcatctaaattggtgttttgttttgttttgttttcaactgttattagtaggcaaagccttctttcaaaataaaatcgacatgaagcctgtgggatttagcagactgaggcaaagcttccctggttgctttggaatgggaggcctggacctgctggctctttgccctcctgacacatcatcccttgtttccacagcacactcagcattggaagcacactgcagacggtgtctcattaaagcagtagctcccttgaacccacaagttaaaacgccagacttttatttatttgtttattttttctgagttcttattggcagacttcagaatgaggtacctgaggaaatatagaaacctctgccttaaggttgattttactaaatgctctattttctggtgcagttattgactgtcttatctcttttgtcaggaatgtcttttttaattagaagacaggaagaaaacaaaaaccagactgtgtcccacaatcagaaacctccgttgtggcagaggggccttcaccgccaccagggtgtcccgccagacagggagagactccagccttctgaggccatcctgaggagttcctgtttgggggtgtgagggaaaatcagcgcggattttaaaaagatggctgtggcctgcccggcgtggtgggaggggagctggtttcctggtgaactttctaaaaggaaaaataattttaagtaaagaaaaaaaaaaaaaaa

SEQ ID NO: 202 - DNA, 443 bp, Homo sapiens
ggcacgagagcgcccatcctgcagctcaactgggagcatcattctcctgctttgtacatagggtgtggtcccctggcacgtggccaccatcatgtctaggcctatgctaggaggcaaatggccaggctctgcctgtgtttttctcaacactacttttctgatatgagggcagcacctgcctctgaatgggaaatcatgcaactactcagaatgtgtcctcctcatctaatgctcatctgtttaatggtgatgcctcgcgtacaggatctggttacctgtgcagttgtgaatacccagaggttgggcagatcagtgtctctagtcctacccagttttaaagttcatggtaagatttgacctcatctcccgcaaataaatgtattggtgatttgaaaaaaaaaaaaaaaaaaaaaaaaaaaaaaaaaaaaaaaaaaaaaaaaaaa

SEQ ID NO: 203 - DNA, 1190 bp, Homo sapiens
ggcacgagaacagatggaccattgacaatccatatatttagaaatgatcaaacctaatgttttccttttttaagatgaaagtaaacataaatagagatggtatttttttctgcaattctctttttatacatcttatatctctttgcagattacagttctatatttgacttcccataacatgtcacaggacatgtgctttaaatcccccacaagttgttctcttgtggatatagtctaggtcttctgggttgtcccaaaatatgatgtgcacagacacaaacatattctgtatattggttttggattaacacagaatgcagtgggatttccttcctattatcattatatttcccttaatgcagtccaagatatgtattagtgtctaaagaagtataccacatccttaggtcttttaaaaagtatcatctgcctcttgggactctgggctatctttactaatccatctcaagtattattttggtctctcctttccactaaaactaaatatcctccactctgctgtcctaccaaattaatgtatggccattggcagtaaactcctttatacttagtgctttctcaattttaaaatgtttgaatattacactgatgcagaagttatttcataagcatagctttttcttgtgtggggtggaaagggaagaggattaaatcactgcctcacttgagcacatacatagctggaaaatgtgtggaaagtttcttgatgttgagaaaaaaagacagtgtcttgttaatcaataaattccgtttatttttcttttactatgtcctttactatatcataactgtagccttgctatatcctgaactcctcacaaaggccttctctgagccaactaaattaatgataaagaattgtaattcttggctgggtgctgtagttcacgcctgtaatcccagcactttgggtcactgaggtgggcagatcacctgaggtcaggagttcaagaccagcctggccaacatggcgaaaccccatctctactaaaagtacaaacattagctgggcatggtggcatgcacttgtagtcccagctactcgggaggctaaggcaggagaatgacttgaaccctggaggcggaggttgcagtgagccaagattgcaccactgcactccagcctgggcaacagagcgagactccatctcaaaaaaaaaaaaaaaaaa

SEQ ID NO: 204 - DNA, 1204 bp, Homo sapiens
ggcacgagcccacgccaaacctctgggctggccaggctcactccagccccacagtcattgccaggactgcctttgaccttacacagaggaaacatcttccacctgtcgggagggagccgggggcggggatttccatggcaaaatttactgttctctggtgatagagttctttcagttttgctacatggtcttgtggcaaaggactgggtgcaggtgcagccttggttatttctggaaacacttctccttttcttttattttgccaggtctggctcatcagtcaccttcctctcagaaaggtgattttggctcctctgcccagaccatcaaacatttctggaggtgtcacaagcttccgtgaggttctggtctctgcgaattgcaggaagaatccaaacataggaaaggggtgatgtgtatcagggtgtccatcctcagctttgctccacaaagaccctcacacttgcacattgttttgttaacagtattatctctgagtagtgggtttattgtttttgcttacctgttttaaacacttcttcaacaaacttgctttactttccattttttaaaagtgtatttcaattttttattaataatgccattttactcctgcaaaatttctcactccttcaaagtctgtgtatggcaaagatcttcctaaccatcattcaagttagagcaactccatttctgtatcaaaaagaaatacctttagttattgtctgaacttgtcagaatttctgagaacgatgccagaaattctgtaattgttttgtcacattaattgaacaatgagagggcaccagcattcctcactcatgaggtagaagcaccacatctacatttctttttagctatgggtgatgtttttgcttttaaatcttagaaatctgttaataaacaaataacacaacaaagtttggggtacttccttgtggggactgggatgcttaagctaaaacaaagtttaaatttggactgtgtgtgttatgtttcgcagaatctatatgtttctcaaaagtgggtgtcaccctccttcctcccccaacacacccttcaggggtaagaggagaagtaatgtagaaaaattaactgtttctccactgtaaaagtagggtgtctttagaatgtttcatgttcaaaggaaagattgtgcttctcccaaggcaaggtgttcccttaaaaaaaaaaaaaaaaaaaa

SEQ ID NO: 205 - DNA, 2836 bp, Homo sapiens
  misc_feature (152)..(153): n equals a,t,g, or c
aattcggcacagccgcggcagacggcgaggacggacaggacccgcacagcaagcacctgtacacggccgacatgttcacgcacgggatccagagcgccggcacttcgtcatgttcttcgcgccctggtgtggacactgccagcggtgcagcnnacttgggaatgacctgggagacaaatacaacagcatggaagatgccaaagtctatgtggctaaagtggactgcacggcccactccgacgtgtgctccgcccagggggtgcgaggataccccaccttaaagcttttcaagccaggccaagaagctgtgaagtaccagggtcctcgggacttccagacactggaaaactggatgctgcagacactgaacgaggagccagtgacaccagagccggaagtggaaccgcccagtgcccccgagctcaagcaagggctgtatgagctctcagcaagcaactttgagctgcacgttgcacaaggcgaccactttatcaagttcttcgctccgtggtgtggtcactgcaaagccctggctccaacctgggagcagctggctctgggccttgaacattccgaaactgtcaagattggcaaggttgattgtacacagcactatgaactctgctccggaaaccaggttcgtggctatcccactcttctctggttccgagatgggaaaaaggtggatcagtacaagggaaagcgggatttggagtcactgagggagtacgtggagtcgcagctgcagcgcacagagactggagcgacggagaccgtcacgccctcagaggccccggtgctggcagctgagcccgaggctgacaagggcactgtgttggcactcactgaaaataacttcgatgacaccattgcagaaggaataaccttcatcaagttttatgctccatggtgtggtcattgtaagactctggctcctacttgggaggaactctctaaaaaggaattccctggtctggcgggggtcaagatcgccgaagtagactgcactgctgaacggaatatctgcagcaagtattcggtacgaggctaccccacgttattgcttttccgaggagggaagaaagtcagtgagcacagtggaggcagagaccttgactcgttacaccgctttgtcctgagccaagcgaaagacgaactttaggaacacagttggaggtcacctctcctgcccagctcccgcaccctgcgtttaggagttcagtcccacagaggccactgggttcccagtggtggctgttcagaaagcagaacatactaagcgtgaggtatcttctttgtgtgtgtgttttccaagccaacacactctacagattctttattaagttaagtttctctaagtaaatgtgtaactcatggtcactgtgtaaacattttcagtggcgatatatcccctttgaccttctcttgatgaaatttacatggtttcctttgagactaaaatagcgttgagggaaatgaaattgctggactatttgtggctcctgagttgagtgattttggtgaaagaaagcacatccaaagcatagtttacctgcccacgagttctggaaaggtggccttgtggcagtattgacgttcctctgatcttaaggtcacagttgactcaatactgtgttggtccgtagcatggagcagattgaaatgcaaaaacccacacctctggaagataccttcacggccgctgctggagcttctgttgctgtgaatacttctctcagtgtgagaggttagccgtgatgaaagcagcgttacttctgaccgtgcctgagtaagagaatgctgatgccataactttatgtgtcgatacttgtcaaatcagttactgttcaggggatccttctgtttctcacggggtgaaacatgtctttagttcctcatgttaacacgaagccagagcccacatgaactgttggatgtcttccttagaaagggtaggcatggaaaattccacgaggctcattctcagtatctcattaactcattgaaagattccagttgtatttgtcacctggggtgacaagaccagacaggctttcccaggcctgggtatccagggaggctctgcagccctgctgaagggccctaactagagttctagagtttctgattctgtttctcagtagtccttttagaggcttgctatacttggtctgcttcaaggaggtcgaccttctaatgtatgaagaatgggatgcatttgatctcaagaccaaagacagatgtcagtgggctgctctggccctggtgtgcacggctgtggcagctgttgatgccagtgtcctctaactcatgctgtccttgtgattaaacacctctatctcccttgggaataagcacatacaggcttaagctctaagataggtgtttgtccttttaccatcgagctacttcccataataaccactttgcatccaacactcttcacccacctcccatacgcaaggggatgtggatacttggcccaaagtaactggtggtaggaatcttagaaacaagaccacttatactgtctgtctgaggcagaagataacagcagcatctcgaccagcctctgccttaaaggaaatctttattaatcacgtatggttcacagataattctttttttaaaaaaacccaacctcctagagaagcacaactgtcaagagtcttgtacacacaacttcagctttgcatcacgagtcttgtattccaagaaaatcaaagtggtacaatttgtttgtttacactatgatactttctaaataaactctttttttttaaaaaaagtcgacgcggccgmgaatttagtagtagtagtagtagtagkmggccgc

SEQ ID NO: 206 - DNA, 1064 bp, Homo sapiens
ggcacgaggaagagtcagccttcttcttttcctggcctaggtagtagagctcatatagaaaaagtgagacaatattggtacaaaactacattatttattgcttccactgaaatgtcaagaggcagcaggtgaggcatgaggatgggcagttctcagaagttttcctgaacctacaggtttatgttaatttttttatgtataatttgtcttccttgtttatgatctcatttctagtctgccatgtaaccccttctcaaactttaaaaggacctcccttgagctggagctaacgagaccatttcttgtctgcttacaattttaaaaaaaaagctatttgcaagtaatttttctcattatgatgctgttatcataaagtgagattccagtagccagggtgtcaagggatggtatatggacagtgcaactttgacttactttactctacttagtcaaattttaactattttctggttcctttcatttgaatataatagttaaaataatgcagaccattcacagttcatatgttctccctttgtttttctctgactccacatgcactgacatgtatagtttctgctgaatttattaatttggtccagtttattcctgctgttaactttgatttcttttcctcctcttatctaatatttttcactatgatcagtatgttccatgaaatatatatattccttatttttctctcctaaagtataaacaaattgtcattgggaaaggagaacacttttctctgactcacataatgtagtagtaatcattcatattttacttatttgtggctgcataattgtaataggaagagtgtgtggccagggtgagcgaagccagaaaatatgttgctttggtagtttttccacattgctctcaaattttcatatattttgcttatttactggsccgtgtgtgacagtagtcacacaaatagtacctattattgtctaacttggggatgccatggggaaaggtgtarattttcttggcactggattctgcaacacttgattaatcttaattctatggcaaaaaaaaaaaaaaaaaaaaaa

SEQ ID NO: 207 - DNA, 1772 bp, Homo sapiens
aattctaaaataccaatgtatttttaggttgtagctaatgttgtattcactttcaattctcagttgtccacactggtgatataagaggaacaaatcagaatcattaaatactttgtaatgccatcataaactcatatattcatcctcaaactcccttgtttaatgctaattggtggcctggaacttcactgagatgcaaaatcaagaactgaagcctagttgctagataacaaaaagctataaatgtttatgtatgtgaattttaaattagaataaccgtcttaaactcctacttgccatttctaaggcaaagcattcattttaatattgtactttgccttttcattcagttagtggagtaagtcatgaaacccttaggaagaaaaacaagttatgacttattcactaaaattgatgcaagacagttggttctagatgaccatggccatgtgttcatcatataaaaccttcagttctctctatggtgcttggctggagattgacatgtgaggatgtgccaatcatattaaatggatttggtctatgtgggtgatatgtggcctgaatgtaactgtgatagactgaaatttgttcttagctctcaaaatccactgaagaagtcaagtgaaggtgggtaaaatagggagattagtgacaactttgtgccaaattttttaaaaaatggaagcaggtagccaatattagaatgataatttaagggtgtggttgaattttagttagttgtcacatagttattgaacctcatatgctcagtgctgtgggaatcaaacatggaagaggtatggctcctgcccctaatgagaacaagggggaaaaatccagatataatctaaatgctaggttatgtcagggtataggaacacagagaatgggggacctgtaagaactggaagagtcagagagggctccattgaagaggtcaaacataattccggaaagaattaggtagtgaggagattgtgccaggaaaataagtgggaaaggccacagttatgtttcctttgaatggaagagagacaaagctatcagctatagatcattgttttcttaagacagccaaactggccctttgaaaccattcaaattaccccagtttagctccctaccttttagtctccgtgaggaagacaagctgttgcattatcatattcctctgtgctgagcagctcaagactcagccacaatatgcaaattgctttaatgccatattacggcagttgatttagacatttgccagtgcaccaaaccatgagagattgtcccgacctaatgccacctggcagatgtgtacccagagatttttctgtagctccatgtttcccataaagggcattggaaatgcacagatgaagatcttcctttggaaccaggcacatttggccccttctcagtgactgcactgtgggaactcttcttaagaaaatattgaaaacagcttaatgctttcatatagtgaccgacatttagttgaaaactactgctgcatagcaaatattgtgactcttcatgtgtccacaggagctcttgtgtgggtttaaagctatgaagtgtattcacattgtgaagttttaattatctttattgaaattaattgtgtaaaaatggtatgtgctctattaggtattcagtttgtatgtgaattctatatagaaagtggtttttgttctttgagtttgttttatttcttgaagattacaataaatatctaagagactatattcctgaaaaaaaaaaaaaaaaaactcgagggg

SEQ ID NO: 208 - DNA, 2048 bp, Homo sapiens
ggcacgagtcaaaggccacgggaacaaagtcctgtgcatggactggtgcaaagataagaggaggatcgtgagctcgtcacaggatgggaaggtgatcgtgtgggattccttcaccacaaacaaggagcacgcggtcaccatgccctgcacgtgggtgatggcatgtgcttatgccccatcgggatgtgccattgcttgtggtggtttggataataagtgttctgtgtaccccttgacgtttgacaaaaatgaaaacatggctgccaaaaagaagtctgttgctatgcacaccaactacctgtcggcctgcagcttcaccaactctgacatgcagatcctgacagcgagcggcgatggcacatgtgccctgtgggacgtggagagcgggcagctgctgcagagcttccacggacatggggctgacgtcctctgcttggacctggccccctcagaaactggaaacaccttcgtgtctgggggatgtgacaagaaagccatggtgtgggacatgcgctccggccagtgcgtgcaggcctttgaaacacatgaatctgacatcaacagtgtccggtactaccccagtggagatgcctttgcttcagggtcagatgacgctacgtgtcgcctctatgacctgcgggcagatagggaggttgccatctattccaaagaaagcatcatatttggagcatccagcgtggacttctccctcagtggtcgcctgctgtttgctggatacaatgattacactatcaacgtctgggatgttctcaaagggtcccgggtctccatcctgtttggacatgaaaaccgcgttagcactctacgagtttcccccgatgggactgctttctgctctggatcatgggatcataccctcagagtctgggcctaatcatcttctgacagtgcactcatgtatacctgagaatttgaaatcttcacatgtaaatagatattacttctagaggagcttagagtttattgcagtgtagcttaggggagcaacccatggctcacaggtcactaagcgtctccaatatgactattaaaactgtcacctctggaaatacactagtgtgagccttcagcactgcgagaataccttcaagtacagtatttttcttttggaacactttttaaaatgtatctgtttttaaggttattctaaattatagtagcctcaactcattctgtcaccagtagaattcagcagttaatatattccatattatttctttgaatcaattcattttcagagcactttaaagtctgatatttctcgatgtgcactgtgatgcctggaaccttcctctggaagtgctgattttatggactgaggactggtgactggtctgtgatagaagcaaattccaattccaaatgtaattagacaaaaatcatttttttagaatgtgtttttattgtaaaagtatctttttcagcttcctgttctattgtcttttttcagatacaacatttttgtctatggtgaactgctgtaaatgacgcagagaaatgcctaaaaaggacaggtggtttgactcatggatgatgatgatgtcactgtgccacttggacagggcgttttctctgaattgaagggaaagccaatggtgtttgtaaacaaatgcttctgagagcaaagaaaagtcttctgtgtgggaacacaagatagtaaacttatttaaaaacctattagtagaattagtggaaacacttaggttaaagtgaatcttgtccatataaattatattcatggccgggcgcggtggctcacgcttgtaatcccagcactttgggaggccgaggcgggcggatcacgaggtcaggagttcgagaccacggtgaaaccctgtctctactaaaaaatacaaaaattagccgggcgtggtggcgggcgcctgtagtcccagctactcggagaggctgaggcaggagaatggcgtgaacccgggaggtggagcttgcagtgagccgaggtcgagccactgcagcctgggtgacaaagcgagactccgtctcaaaaaaaaaaaaaaaaaaaaaaa

SEQ ID NO: 209 - DNA, 799 bp, Homo sapiens
tgctggtggtgttctgcttgctcgcaggcctggtgctggccgtagtatcacagtgctgagcggcgcggcctacctgcaagtgggcaggcttttgtgcaagagtgctggttatgcaaggcttggggcgctttggcgctgatcacgccccgcgttattacttctacttctctgcaggcttgctcacctatggcgtcacagcctttatcgcattaaacgtgatcatcaagaagggcaaacacttcttggatcgctcgccggcgccggccactcagatgctgctgtacctgacggttggttattggtagtgatcgtactgttcacgattccaagttccaagaaagcgcgttacattctttcgattacgccggcgatttcattattggccgcgtatatcttcgtggatcgcagtcagcgctttgcaagtacccgcgacaagttgctgaagttctgcctcaacttacctatggtcggcctgggcatgttgttacttgcctttatctatggcctgtatgcagcgacgccgctgcggcctaactatcttggcgcgtgtgccgggttgatcagccttattgccattcgctcttgggtgacgtcgcggtttcatgcacatccacaccgggagttcgtactgttgtgttttggtgctgccgccttcctggtcctggatatgtttttcttcaattcgattacttaccacctggaattggccgatgagccgacacccaagtttctgccttattggttctggtaggcgcgttctatcgcagttttaactttcgtttggcgacccacaaggcac

SEQ ID NO: 210 - DNA, 1777 bp, Homo sapiens
ggcacgagactccatggattttgatgacacgtggcaccctgccacccacccttctggggctgtccttcctgtcctcacagctttagcagaagccctgccaaggagtccaaagttttctggccttgacctgctgctggctttcaatgttggtattgaagtgcaaggccgattactgcatttcgccaaggaggccaatgacatgccaaagagattccatcccccttccgtggtaggaacgttgggtagtgctgctgctgcatccaagtttttaggacttagctcgacaaagtgccgagaagctctggccattgctgtttcccatgctggggcacccatggccaatgctgccacccagaccaagcccctccacattggcaatgctgccaagcatgggatagaagctgcatttttggcaatgttgggtctccaaggaaacaagcaggtcttggacttggaggcaggatttggggccttttatgccaactattccccaaaagtccttccaagcatagcttcctacagttggctgctggaccagcaggacgtggcctttaagcgttttcctgcacatttatctacccactgggtggcagacgcagctgcatctgtgagaaagcaccttgtaccagagagagccctgcttccaactgactacattaagagaattgtgctcaggataccaaatgtccagtatgtaaacaggccctttccagtttcggagcatgaagcccgtcattcattccagtatgtggcctgtgccatgctgcttgatggtggcatcactgtcccctcattccatgaatgccagatcaacaggccacaggtgagagagctgctcagtaaggtggagctggagtaccctccggacaacttgccaagcttcaacatactgtactgtgaaataagtgtcaccctcaaggatggagccaccttcacagatcgctctgataccttctatgggcactggagaaaaccactgagccaggaggacctagaggaaaagttcagagccaatgcctccaagatgctgtcctgggacacagtggaaagccttataaagatagtcaaaaatctagaagactagaagactgttctgtgttaactacacttctcaaaggacctctccaccagaggtagcttcaaactctccagcatgtaataattctatcacaaatctctcctgaggcttaccaacatctaaatgactttgcatttggggagattcaatgatttggtttgtaaagcaagggtctgctgcttggttttcccaggaaaaatgaacaaagatggagagagtccagaaacagaactacatatatctggaaggagccttctcctgaaaattttgcaggacagttccacttacctaaatcagatgaaacacacacacaaaaatgagtttgtaagcattcacaagggtgaaattcaactcacctgtgatttacttataaaattaatctcttcataggaattatgtgtggacttcatgagcctcaaggttttagagggatgtgaacctgcatgtatattttctgacagtggagagggctctggtgcattgtgtcaccaacagatctcctagaccatggcttattaccaagccctccacagtgcaaggggtgctactggggaatgggtgggtttaaatcctgcctctgccattcactagatgtagccttgagcatgttaccattagccctctgcctcagtttccctatttgtcaagccgaagtaaaaagcagtctggaaaaatcgcaaaaaaaaaaaaaaaaaaaaa

SEQ ID NO: 211 - DNA, 1396 bp, Homo sapiens
cctattctttctccagacttgatggacaacatggttatatgtcttttagaaatgacgatgtaacagggttttgccagcagagtcggggtccccagctttatgagaactgtaatgttgctttctcgtggcagagcaatctcaaaagcttctgaaggaaggaaggaaaatgaagtaagcaggatgatttaggtctgcaaactgctgtggtccccgaccccaatctggttcagagaggatgtcctctatgacaactttgttccttccctccttttctgagaagaagggtggtgcaaaatgacagttccgaccttagcaatgaaaaagaaccaggatgctgccagctggtcactgacatgtgtttcttgtttgcattattaatttttctacaaattgaaaacactataccacattctagatgtcttgagcagtatgctgttagatatcccatctgagcagtattaaataacaaccagagtaaccaccacaccttttctcaacatgacagtagaacaaagtctacacacagaaaccatccatcatagggagacacatttatctgcaaagagctgctgtcccttgccctgggtgctttatatgcccagcacatacacacatacacacgtacgtacatacatacatatgtatgtacgtatggtagtgggggctagaaaaacatttgcagaaattagatataatcatattgtatcaatgaacttggaaagttagagcaaaacaatgctattatctcagattggggtttagaaaaaacacctgagcaaacagtatcaagcaagtgaggtgggggttggttattaaacagaattgtacaaatgtcagagtagggctctggttcacaaacaagcccaatctccttcccatttgctttgcttgattgattaagtgctcttagaccaagaagggagagccactttctccttagctgacactgcccctgccctatcttggattctgattatgagtctccgggcagctgatggcctgggaacagcagatgatgggaagatcgtctgtaggtaaatcctgtggagggagcctaggggctcacagttcatgtagcaccatgttctggtacaaacagctggtagggatctgttatcgtgctggcacacaaatggtgcttgataaacagttagtgaatgaatagcaatctaatcagaagcttttgtttcccatctattcttttttccctccttgtaaaaatttatttttaaaaaatcaaccttattgacagtaatttacacacattaaaaaggactcactcattttgagagttttgacaaatgtatacactcatgtgaccaccacagtcaggatatacaaatattttcctcaccctcaaaagttcccggaattcgatatcaagcttatcgatacc

SEQ ID NO: 212 - DNA, 2945 bp, Homo sapiens
ggaattccaactatggcctgctgcctgtttttggctggtgagctaagaatgatttttacatttttaaattattggaaatatcaacaccggaattatatttcatgatatgtgaaaattacatgaagttcaaatctcagtgtctagaaataaagttttattcgcacacagcctgctcatttgtttacctattgtgcatggccactttcacattacagtggcagagttgaacagctgctgcagagactagccacaaaactaataacgtttactgcttggcccttacagaactttgccgagccctcatttaaagtaatagatttaaacagtctccataagcagctgctggctttgaaggtaggtgcagccactagtgcttttcttggcagattcattgccaaggaacagtttgttaagtaattcccttgttttgtgtgccaggctccataaagaaagggttctcacgctcaaatatatgggcaatacctcatgctatgtatgtatatgtgatttatttctctctagggaacaaacctgtataattgcttaatgtagtctccttaaaaggtagaaaagggctctttggtcaaataattgtaggaaaaagattgacaatcacagtgctgagaaggcctccaatagagaagttggtttagttgttcctcgatctcccacctcctccttttgagctcagccttttagaaattaatcattgcctcctcttcttgcccctgagtggaagggatgaggcccatgggctttgtatccctaggaggagaaagagccagtaagtgaggagcttttaaagccctttctttgtgggaggggccacaaggggccaggtctcttagggctgagaaagccaaggccagcatttctcagagtgctgtcaggactgtctgcctcagaatcatctaagggaccagctaaaacagactctggggccatttcagactcactgggcagtagagctcaggaatctgcatgatgttgctgacgaaagcttaggttggatttcctcttggtgtcccctcccaagagcttgaagatcctgtctccttcctcctctgtcccaacctggcttggatatttgttgaatgaataataacacctgccacttatcagtgtttattgggtgctgagctgatctcattggattttttttttttcttgagacagagtcttgctctgtcacccagtcacccaggctggattgcagtggtgtgatctctgctcactgcaccctctgcctcctgggttcaagtgattccttctgcctcagcctcccgaataggtggggctacagacacacgccaccatacctggccaatttttgtatttttatagagacggggtttcgccatgttggccagactggtctcgaactcctgacttcagctgatccacatgcctaggcctcacaaagtgctggaattataggtgtgagccaccgtgcccggcctgatctcatttggatctttgcagcaatttgatgaattgggtgttctcgttatccccaggtgacaggcaactgaggcccagaagaaggttggtaatatgttaatgagttaagacatagcgccagggttcatgtgggtgagggtctgacaccagacagatgaagggtcgtcggctacagtgacttgagtacccgagctgggccagatttggacccgatggtgtgaggaacctccacccctctaatgctggcagaaaggagtttggggagggcaggggctggaggaggatggtcttcgccttgttcaaggcaggcagcagccttttccctctcacggtgggcaagtttctctgctgcccgagtccctgggcctcggagcactaaggctggccacctgctaggtgggaaggccccaaacggcttctcatcctgcctgcctccactcctaccagaatgacctcacctggcagggagggtggccccagggccctgtcagctctgttcctgccagccaggagggtcctggagtccctcccaagcctgccgcaagcccagagggcacatccaagaggcaagtgtaagctcctgtttccttcatcctcagcagcacaaagctctggaggctggaaggcagcaggcagggccagaaggtattttcatctttcctggaactgcgttaaagggccctgggcagtgaaggagccagagccatttcctgcgtgcttacagcatgccaggtgcctggccacacactgcccacaggatcagcttgaaccctcagcagccccgcctggtagggccagccgtcctcccatttcacagatggagccgtaggggctctcctcaaaagtcacacagttaggagatagccaaattcaaatcgtggtgcatccatccccgtccagggctcgtttcttacctaccttgcccccctgctaactcggacacctcttgagtttggcatccaagagcagaacctggatcccgggggagggaggcacagggaggcgtgaaggatgggaaccagcctcccctgggctgcttgggccggcttcccccttgccagttctgctgcccttaactgcggccttgggcagggggcgtaacctttgcaggtgacgcttgggtctccctgttggaagaccggcaagatgccgtgtacttactttaagaagcaaatgaaggttgggcgcggtgctcacgcctgtaatcctagcactttgggaggccgaggtgggcggattacttgaggtcaggagttcaagacctgcccaaccaacatggtgaaaccctgtctccactaaaaacacgaaaattagctggatgtggtagtaggctcctgtagtcgcagctactcgggaggctgaggcaggagaatcacttgaacccgtgggggcagaggttgcagtgagccaagatcgtgccactgcactccagcctggatgacagagtgatactccatctcaaaaaaaaaaaaaaaaaaaaaaaa

SEQ ID NO: 213 - DNA, 1724 bp, Homo sapiens
caaggaaggaaggaaaagagaagagagactgattggatgctgctgcagtggtccaggcaagtgattgtgctggcttggatgggtgttagcagtggaggcggtgagaagtgtcagggtctgttcatgtctagaaggcagaaccagcagggtttggtgatggattggatgtcaggagtgagaggaagaaaggagttaggacaactccaaaatttggggcctgaggagcaggtttggggacgagaaaataagaatttcctgtcaggagcacccagctcctgtgcatttgccattctgcagtccaccccatgcacaccgtaacacaccagcctaaggatgctcatgcccccacctctgggaaggccccccatcttttctgccctactccaggctctgtcccctgagagtcattttctctcactgatccttttctggcccttctgagaggtcactaaaatgtccaagtggaggatggctaacaccccttcttcatcactgccctcagatgctgtgagggcacacaatagaccccataaagctgataaagctactagggatagaaggggccccagttgcctcccagaggctgctggtctgtcttccccacccagccagtgccgcctgtgttttgttcttcctttgcggtcccccgcattccttgtagtgctgaaaataggacactgtgacttgctttctgcagggcaattgtcctggaaattgtagaatttctttttgtgttgctttcctactggtacctctttatattccacctctgtagccaagtaggatgagatttcaagcaagttgaagttatatataatgaatttaacacattggtaagcttctaagctaactgactttcaactggaagcaatactaagaacaacagatatttggtatactcaattttttttttctctcagatttgcattttgcaagctctactgtacccccagcaaagaggaaagaaaaatctagctctcccatggctctaaagtttctagaaatggaagctctcttactgagcctctgtttcttcccccacctctgccccaccccaggtgtggggcaaactggtacctggagcacctgataccatctgtaagtcctgacagcagtctggcaagaggcaaggacaggccagggatagagatggagtggggaacggagcacctgagctggggagccacacatccgggacactgggaaaggaaaggagggagatggtggcttgaaatacaaaattagccgggcgtggcacacacctgtaatcccagctactcaggacgctgaggcaggagaatcgcttgaacccgggaggcggaggttgcagtgagccaagatcgtgccactgccctccagcctgggtgactgtgcgggactccgtctcaaaaaaaaaatttttttttaaagcccaataaaagggctgggcgcggtgctcacgcctgtaatcccagcactttgggacgccaaggcaggtggatcagctgaggtcaggagtccaagaccagcctggccagcatagtgaaaccccatctctactaaaaacacaaaaattagccaggtgtggtggtgggcacctgtaatcccagctacacgggaggctgaggcaggagaatcacttgaacccaggaggcggaggttgcagtgagccaagattgtgccattgcactccaacactccagcctgggtgacagagcgagactctgtctaaaaaaaaaaaaaaa

SEQ ID NO: 214 - DNA, 2249 bp, Homo sapiens
ccgcagcacagtcacatcctactgaacatcatcctgttctctgggtggaatgtcaccatcgcccaggtggggatttttgtgtgttttgttcactgctgtacacccagcccccagcacagcgcctgtccaggacaagtgcccagtaaacacttgggaagcaatgcaagcgtcctcccagcagctcctgcaaacagacccccgacccaagcccttccttctgcctccactgccaccactgctgctcatctctgctggcacagaagtctcttccctggtcttccagaaatcccctctccacactcagccagagggagctattaaaactgcgggccagcccacatcagtccacagcaaagtcctctctaagggatctttgttgcttggagaataaaccctcggattccttccttggctctcggggcctcctctctgacctccctctgtctcctctcccagccttcctcctcactcaccctccagccatgctggcttcctccttgctcctgaaacagcctgaggcccacactgccccgggccctttgcactggctgtttcctctgcctggagcacttctcctaggcatccacagggctccctcccacaactccttcgggtgcccacatgggaagccatccctgaccacccccccgacttccttctgagcaaggtagggtctttctacctagtcatgagggcagggatttttgtctgttgtgttctctgtgtgcccccagtgccatcccagtgcctggcagatggtaagtgctcgacacacattggctgactgcctgaatgaacaactctatgagccgatggcagataaggacactgaggtcctctggggtaggtgaccagcccaaggccacacagctggtctgagattaggccaggagaggagcccgggttggtcacatcctggagttggcgtcttggaaactgcatcaggagaataacaaagatgagacgcaggctctaacaagtggataccagtgactctcgccccgccagccccagcctgcagccttgggcccttccaggagtcatggtctgcctgcctggggcattccaggcttcgacccaggtcctgcactttctattttgagcctcttagtcctgaggactgtgtgttcccagcaggcggcgcgggccagaggctgagcctgggtgtggctgtcaccctatctggggccagagacccagattcccgggcccttaacctgttggctgctgagggctctggcataagccctgttccctgcttgattgtctccccttcaagcccctgccctggtatcgtatcggcccatctcaccttggattatatccctgtttggccccatttgaatcctggctctgcccctttccagcaatgtgaccttgggcaagtcacttcatctctctgggtctcagtttcttcatctgggaaatggggacaataagagtacctgtctctggccatgtgtggtgactcatgcctgtaaccccagcgctttgggaagccgaggcgagagaattgcttgagaccaggagtttgagatcagccctgggcaacatagtgagacccctgtctctacaaaattctaaaaaaattagccgggtgtggtggtgtgtgcctgtagtcccagctattctagaggctgaggcgggaggattgctcgagcccaggagtttgaggctgcagtgagctgtgattatgcccctgcacatcagcctgggtgatagaattgaggccccatctctaaaaataacaatactaataataaataaaaatgaaaatgagtacctgtcttctggggttgcagaggagattcaatgtgatgaaattgatgagagtgccctgcagggagccggaaactcagggagcatcgataatgagtcccccaccatcagcagctggcttaaatataaaaactgtcatggcctctggagaaatgacaagaattcgaaggagcttccctgcattggccaccctacaccctacacccttacttcctcccctcaacttgcctggatttatcgacccccactaccccactggttgccttctctccacctggcacatttcgtatgaatttgcttgttggttcttgcctatctccccagtagaacattagctccttcaggacagggacttttgtctaccttatgcacctagtgcaatgcctggcacacagtcggtgcttaataaatgtttcttaaaagaaaaaaaaaaaaaggaattcgatatcaagcttatcgataccgtcgac

SEQ ID NO: 215 - DNA, 2205 bp, Homo sapiens
gtcgacggtatcgataagcttgatatcgaattccttttttttacaaggttttgtttacaaagccaagaaaagataaaacattttaagttggtactgccctcgaaaattatggtggatgtacacttggactttctaaaacaagatctgaataaaataagacacttaacatgaaaaactctatttaacacaatttaatctttctttgattcctgagtgggtaattcggcattttacagaactttggggtcaccattataaatatcagctgtcactgtactggtaaaatataaaatgtaccagttaataatagctttgcaattcacagaaaatcagataatggaggttttaccgtaactggaattatgatgttaaaagaatcaatgcacttttccaaaagagcctaaatcatttctaggaaataattcatgccttgtaagaatttacaaggaagtgcttgatactccctggaaaaaatcagtagttcttcattattaagttttcattttgcatgtgtacttcattgtattattattgtggttaatcctatgtccacggccctggcctcgaaccacacaggctcttcttaaataaagtggaagatttctttggcctgtcctaaatccaaggaacaatatgcaactctgcaagtgcatatcacaagaagtcttttcaaggtcgtgctcttggtgaccctttgtttaaaggaatttgggctggatttatagttgtcagttctgaagaatcaggaaagggcaggccgtgaaggggtgggggaggaaaagagaaggaaagagggagggagggagggaggcagaggctcataccacacagtactgagccaccaaggacagagtttctacactgtttcattagaacatgaaatctactctgttgtctatgcgtctgctgtgagctgaaaagaagtcagtttacttcctcagcatctggggtcccataattctgagtcgtggccacattacctctgctactgaaaaggcaagagctgggttgctcagacagccccgcagttcacactgcctgtgctgcaggcaggaaggtttccacccaaaggccggcagagggagggtgtgcccctggcgggtgggctggggctggggtgaggaggggcagggaagaaagggaaggagacttcctttttaatgctggttctcttctcagtccaatccaagtctctccatggaaggatggaaaattctgatttcctgtatctctttgaaaacaatgaaatccactctccccggagggcaggtttgctgaagctgttggctccggctggcatgcacagccttggctaagtagccacacagcacagcatagacatcccggcgaactgaaggctcacaaccaggagcctaccccatgcactccctccccagcaccgggtcaccgcagccagggttcctggggcctccggaatgtcagggagcccctcactgcctcttgggtggcaggaaatcactaagctatgaggataaagaccagccggggtctccatgcagctttagggctgatttctatttccccttgtggtggtgaagcagatttcaaactgcactcaatacagtccccagcacaggagaaatgaaaccctttaaatcttaggccttcacgcaggagcctcccctgcagctttcaaactcacagaagccttttgttacagtcctaggaatgtgtacttagcagagaaagcgtgcctttgtggtggctgtgaaagaatactgagggcggtggcgggggaagaagagacccgcctctggtaagatcctctcccgaagtctgatggcagccagtctcagaaaacaagaaaatccacccaaggacaaggtactcaaccacccccagggctctcccaaaagtgtcggagtgagaggaaggaaagcactaaatatatttgagtatgtgagtgagcgcagggggaggagtgagctaaaggggttttactgcattggttgctataatttgtggggggttcctaagaattattcccatatccttccccaagggaacctgtgaggaaactggcagctgcttattgtgatctagtgtaacagcacatagtacagccaaaatactgcaaggaattagaggcggaaggggcctcaggactgatcttcaccagttttctggtaagatttgtgcaaaactccagtgaagagtgtgcacgcggtcaatttctccaaaatg

SEQ ID NO: 216 - DNA, 3839 bp, Homo sapiens
ccacgcgtccgcccgctcgctgggagagaggtacctctccttttccctctccctttccctaagagttgtctgctggttctcagcttgaagaagattctgcagtccttattgatcctttttcttggcgttaccattttttgaagcaaagttaacctagctttctagtttgagctttctttttggccgtctttaaaaaaaattttttttttaatctataaaatagacaagagctagttctacaatgtccaagtcattccagcagtcatctctcagtagggactcacagggtcatgggcgtgacctgtctgcggcaggaataggccttcttgctgctgctacccagtctttaagtatgccagcatctcttggaaggatgaaccagggtactgcacgccttgctagtttaatgaatcttggaatgagttcttcattgaatcaacaaggagctcatagtgcactgtcttctgctagtacttcttcccataatttgcagtctatatttaacattggaagtagaggtccactccctttatcttctcaacaccgtggagatgcagaccaggccagtaacattttggccagctttggtctgtctgctagagacttagatgaactgagtcgttatccaggaggacaagattactcctgagaatttgccccaaatccttctacagcttaaaaggaggagaactgaagaaggccctaccttgagttatggtagagatggcagatctgctacacgggagccaccatacagagtacctagggatgattgggaagaaaaaaggcactttagaagagatagttttgatgatcgtggtcctagtctcaacccagtgcttgattatgaccatggaagtcgttctcaagaatctggttattatgacagaatggattatgaagatgacagattaagagatggagaaaggtgtagggatgattctttttttggtgagacctcgcataactatcataaatttgacagtgagtatgagagaatgggacgtggtcctggccccttacaagagagatctctctttgagaaaaagagaggcgctcctccaagtagcaatattgaagacttccatggactcttaccgaagggttatccccatctgtgctctatatgtgatttgccagttcattctaataaggagtggagtcaacatatcaatggagcaagtcacagtcgtcgatgccagcttcttcttgaaatctacccagaatggaatcctgacaatgatacaggacacacaatgggtgatccattcatgttgcagcagtctacaaatccagcaccaggaattctgggacctccacctccctcatttcatcttgggggaccagcagttggaccaagaggaaatctgggtgctggaaatgggaaacctgcaaggacctagacacctgcagaaaggcagagtggaaactagcagagttgttcacatcatggattttcaacgagggaaaaacttgagataccagctattacagctggtagaaccatttggagtcatttcaaatcatctgattctaaataaaattaatgaggcatttattgaaatggcaaccacagaggatgctcaggccgcagtggattattacacaaccacaccagcgttagtatttggcaagccagtgagagttcatttatcccagaagtataaaagaataaagaaacctgaaggaaagccagatcagaagtttgatcaaaagcaagagcttggacgtgtgatacatctcagcaatttgccgcattctggctattctgatagtgctgttctcaagcttgctgagccttatgggaaaataaagaattacatattgatgaggatgaaaagtcaggcttttattgagatggagacaagagaagatgcaatggcaatggttgaccattgtttgaaaaaagccctttggtttcaggggagatgtgtgaaggttgacctgtctgagaaatataaaaaactggttctgaggattccaaacagaggcattgatttactgaaaaaagataaatcccgaaaaagatcttactctccagatggcaaagaatctccaagtgataagaaatccaaaactgatggttcccagaagactgagagttcaaccgaaggtaaagaacaagaagagaagtccggtgaagatggtgagaaagacacaaaggatgaccagacagagcaggaacctaatatgcttcttgaatctgaagatgagctacttgtagatgaagaagaagcagcagcactgctagaaagtggcagttcagtgggagacgagaccgatcttgctaatttaggtgatgtggcttctgatgggaaaaaggaaccatcagataaagctgtgaaaaaagatggaagtgcttcagcagcagcaaagaaaaagcttaaaaagcgtcgttttccagggagtatggaaggttttgtcactctagatgaggttggtgatgaggaagattcggaacttcagaaacttcgtaaatcgggcatggcatttaaatctggtgacaaaaatgatgatggtttggttgaaattaaggtggacaagatcgaggaacttgatcaagaaaacgaagcagcgttgggaaatggaattaaaaatgaggaaaacccagaaccaggtgctgaatcttctgagaacgctgatgatcccaacaaagatacaagtgaaaacgcagatggtcaaagtgatgagaacaaggacgactatacaatcccagatgagtatagaattggaccatatcagcccaatgttcctgttggtgagatttaagtctttgttcttcaccttcctcactctcctcaaaacaaactcttaggttttaaaataagattttaaagttggtcttacataagctgtgatagcattttaaatttgctttgtttctatggggaacaatttataaatcttaattgatatattttcctctcatgcatgtctctgattttgtattattttctgttgttattccacaatgtgttcccttttttcgtaaaatttcttgcaagttacacgcttttgttttgcttttctgtgttgtttttctgtattatatttctttttttaagaatacagttaggtgagacctcaaacatcaattaggtaaaagcaaaatatggttcggtttttgttttttatcttaggctgtattggacttctcaaaaacatgttgtttcatttaaattatgttgacaggtgaaattgtgaatactaaataaaatcttcagtttaatttgtaagaatgtatgtttgtatttctaggtatagactatgtgatacctaaaacagggttttactgtaagctgtgttcactcttttatacaaatgaagaagttgcaaagaatactcattgcagcagccttcctcattatcagaaattaaagaaatttctgaataaattggcagaagaacgcagacagaagaaggaaacttaagatgtgcaaggagatttaatgatttcaaagaaaataatggttctttgtttttaatgttaaccttttttaaatacaatactgatagttagaagaaaactattgtactcttttgttttagtggagaaataatagatgtctgttcatgtgttaagtgttatagcaaaaaaaatacacatatggttaagttaatgaatagtttttgttttatcagaatggcaacagacagaagtactttgtagagattgacttcctaagctacttaagacaacttgcaccactaagaaaaaaatgtagaaccatttggaaaaatgaaatttagtagttccaagtttcaaagaaatgtcaacattttattccattcaataaagaacaaaaccaaaaaaaaaaaaaaaaaaaaaaaaaaaaagg

SEQ ID NO: 217 - DNA, 2000 bp, Homo sapiens
  misc_feature (99)..(99): n equals a,t,g, or c
  misc_feature (580)..(580): n equals a,t,g, or c
  misc_feature (1790)..(1790): n equals a,t,g, or c
  misc_feature (1858)..(1858): n equals a,t,g, or c
  misc_feature (1862)..(1862): n equals a,t,g, or c
  misc_feature (1904)..(1904): n equals a,t,g, or c
  misc_feature (1913)..(1913): n equals a,t,g, or c
  misc_feature (1951)..(1951): n equals a,t,g, or c
  misc_feature (1985)..(1985): n equals a,t,g, or c
cggcccaggccgcctggtctggcgctggaggccggagtcccgcggcctgtgctggatccgcgcacacccagtggcggcggatgggcggccggggcggcnggagcggcgggtcctgagcgcggcccgggctgtcagggctggctgctggcgggatggacaccctggaggaggtgacttgggccaatgggagcacagcgctacccccacccctggcaccaaacatcagtgtgcctcatcgctgcctgctgctgctctacgaagacattggcacctccagggtccggtactgggacctcttgctgctcatccccaatgtgctcttcctcatcttcctgctctggaagcttccatctgctcgggcgaagatccgcatcacctccagccccatttttatcaccttctacatcctggtgtttgtggtggcgctggtgggcattgcccgggccgtggtatccatgacggtgagcacctcgaacgctgcaactgttgctgataagatcctgtgggagatcacccgcttcttcctgctggccatcgagctgagtgtgatcatcctgggcctggcctttggcacgctggnagagtaagtccagcatcaagcgkgtgctggccatcaccacagtgctgtccctggcctactctgtcacccaggggaccctggagatcctgtaccctgatgcccatctctcagctgaggactttaatatctatggccatgggggccgccagttctggctggtcagctcctgcttcttcttcctggtctactctctggtggtcatccttcccaagaccccgctgaaggagcgcatctccctgccttctcggaggagcttctacgtgtatgcgggcatcctggcactgctcaacctactgcaggggctggggagtgtgctgctgtgcttcgacatcatcgaggggctctgctgtgtagatgccacaaccttcctgtacttcagcttcttcgctccgctcatctacgtggctttcctccggggcttcttcggctcggagcccaagatcctcttctcctacaaatgccaagtggacgagacagaggagccagatgtacacctaccccagccctacgctgtggcccggcgggagggcctggaggctgcaggggctgctggggcctcagctgccagctactcgagcacgcagttcgactctgccggcggggtggcctacctggatgacatcgcttccatgccctgccacactggcagcatcaacagcacagacagcgagcgctggaaggccatcaatgcctgagggcagctgccagggcctgtggaggacaggccagagaggaggccagcaggcccagagtccccaggggaggaggaccaggtcaagggacgttctgtgggcagtagccctgtgtggccctgttcccaccatgagtctggaggccccacctccctggggctcccaatcccctttgccatctctgctctcactggggaccctcctccccttcccacctgctctcatactgctcagtgacatggcccaggctttccttccagggccatgcttggcaaggttggctgagggcaccctccttctctgcacccttggcacgagggcagggctggctctcccaatgcctccatcccatccccatggtgctttggcctcctcaaagcatccaccatggtggatggactgaagtgtgtatattttcttgatctattttttaataaaaaggaaaaggagcaaaaaaaaaaaaaaaaaaaaaaaaaaaaaaaaaaaaaaaaaaaaaaaaaaaaaaaaagggcggccgntctagaggatccctcgaggggcccaagcttacgcgtgcatgcgacgtcataagctctctccctatagngagncgtattataagctaggcactggccgtcgttttacaacgtcgngactggganatctggtacttgggaactttgggaaggaaccttacttntggggggggacataaattggacaaactacctacngagatttaaaagctt

SEQ ID NO: 218 - DNA, 1351 bp, Homo sapiens
  misc_feature (1009)..(1009): n equals a,t,g, or c
ggaaatcccctatagggaaagctggtacgcctgcaggtaccggtccggaattcccgggtcgacccacgcgtccgatcgggttgggcctgggagatgccaaggacatcacagtcaagggcctggaagttgttagacgctgcagtcgagtgtatctggaagcctacacctcagtcctaactgtagggaaggaagccttggaagagttttatggaagaaaattggttgttgctgatagagaagaagtggaacaagaagcagataatattttaaaggatgctgatatcagtgatgttgcattccttgtggttggtgatccatttggggccacaacacacagtgatcttgttctaagagcaacaaagctgggaattccttatagagttattcacaatgcctccataatgaatgctgtaggctgctgtggtttacagttatataagtttggagagacagtttctattgttttttggacagacacttggagaccagaaagcttctttgacaaagtgaagaagaacagacaaaatggcatgcacacattatgtttactagacatcaaagtaaaggagcagtctttggaaaatctaatcaagggaaggaagatctatgaacctccacggtatatgagtgtaaaccaagcagcccagcagcttctggagattgttcaaaatcaaagaatacgaggagaagaaccagcagttaccgaggagacactttgtgttggcttagccagggttggagccgacgaccagaaaattgcagcaggcactttaaggcaaatgtgcactgtggacttgggagaaccattgcattccttgatcatcacaggaggcagcatacatccaatggagatggagatgctaagtctgttttccataccagaaaatagctcagaatctcaaagcatcaatggactttgaacatagatatttaccattgtctgatgtaaatttcagccatatatggattgatatggtttggatgtatccccacccaagtctcatcttgnaattttaatcctcataattcccaggtgttgtggtaggtaattgaatcatgggggcagtttccctcatgctattctcatgatagtgagctttcatgagatctgatggttttataagtgcctggcatttcccctactggctctcattctcactcttgccgccctgtgaagaggtgccttccaccgtgattgttaagtttcctgaggccttcccagccatgtggaactgtgagtcgaaaattaaacctcttttataattaaaaaaaaaaaaaaaaaaaaaaaaaaaaaaaaaaaaaaaaaaaaaagggcggccgctctagaggatccaagcttacgtacgggtgc

SEQ ID NO: 219 - DNA, 893 bp, Homo sapiens
  misc_feature (10)..(10): n equals a,t,g, or c
  misc_feature (18)..(18): n equals a,t,g, or c
  misc_feature (28)..(28): n equals a,t,g, or c
ggcacgaggnaaaagaancccgcttcanggttgccagagtgtgataggtaccccagagttcatggcccctgagatgtatgaggagaaatatgatgaatccgttgacgtttatgcttttgggatgtgcatgcttgagatggctacatctgaatatccttactcggagtgccaaaatgctgcgcagatctaccgtcgcgtgaccagtggggtgaagccagccagttttgacaaagtagcaattcctgaagtgaaggaaattattgaaggatgcatacgacaaaacaaagatgaaagatattccatcaaagaccttttgaaccatgccttcttccaagaggaaacaggagtacgggtagaattagcagaagaagatgatggagaaaaaatagccataaaattatggctacgtattgaagatattaagaaattaaagggaaaatacaaagataatgaagctattgagttttcttttgatttagagagagatgtcccagaagatgttgcacaagaaatggtagagtctgggtatgtctgtgaaggtgatcacaagaccatggctaaagctatcaaagacagagtatcattaattaagaggaaacgagagcagcggcagttggtacgggaggagcaagaaaaaaaaaagcaggaagagagcagtctcaaacagcaggtagaacaatccagtgcttcccagacaggaatcaagcagctcccttctgctagcaccggcatacctactgcttctaccacttcagcttcagtttctacacaagtagaacctgaagaacctgaggcagatcaacatcaacaactacagtaccagcaacccagtatatctgtgttatctgatgggacggttgacagtggtcagggatcctctgtcttcacagaat

SEQ ID NO: 220 - DNA, 2710 bp, Homo sapiens
ggggagaaatcagtgacagaggtgttttggttttattgttatgtgggttttcttttgtattttttttgtttgttttgtttttaaacattcaaaagcaattaaagatcagacataggagaaaccctgaatagaaacaaaacttttgaatgctggattcaaaaaaaaaaaaaagttatctggacagcttctttgagactatttaaaaactggtacaacaggtctctacaacgccaagatctaactaagctttaaaaggtcaagaagttttatggctgacaaaggactcgcgcaacgcagaaggcctttcccaccttaagcttccggggatctgggaattttacccccattctcttctgtttgtctgagtctcatctctctgcaagcaagggctgaaatcattttgtttggttgttttgagggagagaggcggggtgggggggtgcaaatctgccagcagctcttacgtaaggcatgttttattggggagggctgagcttttattttctcctctccagtggggttggcttttattgtttcttgtttgggtttggaatggaaatatggatagcagcataaagtacttttattttgacaaaattcatttttttcaacaatggagacatagatttgacccacaataacttctccccctctctttttactctgctcaaaaagcatctctcctcccattacccaaccttggtcataagtgtgcctggctggtttgcagatatttgttctgctttgtaaaaattggccattagtgcatttattgagatgatctctaaagagctatgccctgacctacccctgattctatgacattggggcccttcttttgctgaaactgccttacgtaatggttttactccttgaaagagatttgacggaatccattttatgccaagtgctgccctgcactgtttctgcaatatgtggtgtatgctgtggtgatcttgctgggaatgattataagtgtgtgtgtggtgggggagtgggtattacatgcattgctgaagagtcatcctggtgttcctcattcctcccaccttcccgtggtcattttaattacggggcagtgtcaccgcaaagggaggaaactcaaagccgaaagcaaaattccaggcctgattctggcttttgaggttcctggttcttgaagccaggcctgacccgactctcagatggggtcagtcccgtcgctttgcagactgaccctggaaatctacaaaatgcagattttcctgatttcctcttctcttgcccagtttttttttttttttttttttttaaagcctggattgtaaccagattttcttttttcccccttctcagctgtagatatgatatctcctttcagggccccagcttaagggcaaagtgagttaatgtgtagacaaaggcgagggacaagagagagttaacatctagacagtggaaaaagccatggtgtgtggtttctgggaaccaccaacacttgcaggtttagctttttcccagggttgactacaagaaagaaaaccatgtttttgcaagattaaaatgtggttgagtgtgcctaaattaaccatccccatttttatcatatttccaccatcacttcagggttttaagagtcagtgctcacctgggcggagctggtagtacattttgcttcttagaaagctaagtcctgggttccgtctgattttaggttccaggaacttcctgagaacacccgatcgcagagggtaattttctggagtttgttttgcagggatagctgggagtatggccaccctgctccacgatgcggtaatgaatccagcagaagtggtgaagcagcgcttgcagatgtacaactcgcagcaccggtcagcaatcagctgcatccggacggtgtggaggaccgaggggttgggggccttctaccggagctacaccacgcagctgaccatgaacatccccttccagtccatccacttcatcacctatgagttcctgcaggagcaggtcaacccccaccggacctacaacccgcagtcccacatcatctcaggcgggctggccggggccctcgccgcggccgccacgacccccctggacgtctgtaagacccttctgaacactcaggagaacgtggccctctcgctggccaacatcagcggccggctgtcgggtatggccaatgccttccggacggtgtaccagctcaacggcctggccggctacttcaaaggcatccaggcgcgtgtcatctaccagatgccctccaccgccatttcttggtctgtctatgagttcttcaagtactttctcaccaagcgccagctggaaaatcgagctccatactaaaggaagggatcatagaatcttttcttaaagtcattctctgcctgcatccagccccttgccctctcctcacacgtagatcatttttttttttgcagggtgctgcctatgggccctctgctccccaatgccttagagagaggaggggacggcacggccgctcaccggaaggctgtgtgcggggacatccgaggtggtggtggacaggaaggacttgggaaggggagcgagaaattgctttttctcttcctccctgggcagaatgtagcttttctgcttcactgtggcagcctcctccctggatccttagatcccagaggagggaagaaaatttgcagtgactgaaaacagtaaaaaaaaaaaaaaaaaaaaaaaaaaa

SEQ ID NO: 221 - DNA, 489 bp, Homo sapiens
  misc_feature (477)..(477): n equals a,t,g, or c
cggcacgagcttcctcaaaagtatataaaatttgaaaagacctagaagtgatctagtggaatgaagacgctgagataccattgaggttggggaaactactgggacgtgcttacaggataaactgcaaaacaaaagcacaagtttgtaatcatggaatgacatgccttattctgaaaacttaacgtttgtagcgtaccttataattcataagacatttaaaaatggtattgaatcccaataacctatgcgtagggttggatcttgttgttatccctgttttttaatggaaaatctgaggcctgaagatggtaggccatgtatatgcctgccccgccgttgagcctggctcctgctgttggagaaactttcccagtctgtagagagaggatgtggtcctggcaagcctggctcctgcctgattctgtatcttctggtaacacacagccgtcatttaaaaaaaaaaagacaaggtctttnccctcggacaga

SEQ ID NO: 222 - DNA, 2073 bp, Homo sapiens
ggcacgaggtgtgtctgtgtatatgtatatgtgtgtgtccttgcacatgtcatgtggctgtgcaagtgcatgtgtgtgtgcatgcatgtgtgtgtgtgttgtgtgtggtgggaggcagcctggggctgtcagaagagggcagaaggtgggatcaggcctagctggacctgaaccctgcttgtgccagctgggtaactttgaggcaagtcatttaagttctttctgcctgtttccccattcaaagaatggaccaaatattacttacgttgtgaagatgacaaatatgtgtgtaaaatccaggcacacacgatgtgcttaggacacagcagttatgatttatttgtgtgttgtctttgtggagtggggggaggatttgcagccttttaaggacttgggaatttcaggtcttgacagagccagtctggaaggcccatctggtgtggctgctctgagggactggggacattgcgcccgtgtttacagagacccatagtcagacatccatgggccaggcacagaggcaacacagcagtcctgcccgcagggcccccagtggacaggcagaggcgcagataatacagtggctgtcccagggtccacagctgggtgtggggggcttgagggttagaattggccgggccctatgcggggcatttgattctagttcgttctatttttatctttttcatcagatcagggcaccgtgccctctgggctcgctgcgtcttcctgcttcccagccccaatttcctcccctttcctacctccagcgcatcttgtgtgagacgcatggggacaggtgtgtgtacaccctggggaatgtgtggtgggttttcatttatctgtgtccatgtcgatcaagagcacatgctcatgctgcctgtcttagtctgttcaggttgtgataacaaataacaacaatcggggtacttagaacaacacacattcctttttcacagttcaggagggtggtaactccaagatgagagtggcagcaggggcgggctctgcagagggctgtcttccgggatgcagcctgccggtgtcctcactgtgtcctcgcaggcagaagttggcgtgccgagccagtgctctgctatcagggcttggagcccaattatgagcactcctccttcatggcctagtcacccccaaaaggccccacatcctgataccatcactatggaattaggacatcaacaggtacattttggggggataaatgcattcagaccatggcactggtttcagttgtcatgtaagtcaccactcgtatatcaaggctaactcatgaccctagatctacatggggtctgccctctacctcacagcagagatggacacccacaccaccatcttccccgtgtctcaccacctgcaccccaattacggacacctatgcctctgtcttccctgcgtctctcagcactctacagcgagtgacacacacaccttcatctttcttccatgcttcatgttgcagtggagaggctggggattgggaggaggtgctgctggggtatggggagtgagatctgtgccgcagtggggtgggattcaggagaaaaccaggcagtgtcccaccagttcacttgcttgtaacacagaaacctcttcaatggaaatggaaccctgtctagaatgccagactctctgctgaccattctctctggtcagaactggatcactttatttgatgtaaattgtatttgatttatttttttcttttttaagagatgaagtctcactatgctgcccaggctggtctcaaactcctgggctcgagtggcccttccgcctcagcgtcccaaagtgctgggattacacgtgtgagccacagcactggccataaattgtatttgatttttacagctacctgtatttagccatgtgaaagtgattttccacttatgtcagaatacaaagtttcgtttagggataaattgtaaaaaagaatataggcctgggtggtggctcatgcttttaattcccatactcagcttgagtaccggaaccaagactagtcgaggcaacatagtgaacctcatttctttaaaaaaaaaaaaaaaaaaa

SEQ ID NO: 223 - DNA, 1442 bp, Homo sapiens
  misc_feature (126)..(126): n equals a,t,g, or c
  misc_feature (148)..(148): n equals a,t,g, or c
aattcggcagagctgggtttcccctaggctgtcccttcaccctggcagacctccctgcgcccttccagcccctctagttcttccccaggctccagtccagcacccacctagtgtgggcatctgctncacagtctcctgcgcgcgcatncaacagaggtggtctgtaccacctggtggcatcagctaggctttggtgccctccttccaactccctgaaccccctccaactgttggggagacaggacccaggctgttaccttccttgtgggtgagcttctcccccccagactcgtgagttttgaccgcaggtcggacgccatgacgtaacctttcttctccttgtccaccatcaacatggctagaagaatttctttctttgggtcttcttgttttatttgcatgtgcataatggtcagaaaagtggagagaatccagctctccatttccgtctaggaaacccgcaaacacagcagagtgagcagagggaaaaagactcctaggaagccagctggcctcctgctggacctgcacagccggttcaaggtcaactgaccagggaatgccaggatgtggcagtggtcacagtgaagaggatgcatcccctcccaccgagttcccacgacaggcccctcactggactggacattcttcatttcagcaacgtcctcagtgacgatgcttatcatcaccccaaagctcaagaaagtgggttcccaaccacagatggaggactgggctcctctgctcccttctagcgcttccctcctgccctgaactggagggaaacaggtccatgtgtgcattccacctttgacagccaccacagtacatcttaccaggatggatcagcacccccacctggggtctcaagcctcagtcgcaggctgggctgctcacctgccttcccctcactgcagtctccatcccagcccctcctccacgggccctggctgggatgtaactgcaggaaatcaaaacttccctggactacaacttcctgtttggaggggacagaaatcaaggaaaccaccacccctttggagctggacatgggggatctcaggtatcagaccactgagcaacccaccgccaggctgcaggctttcagaggcccacctgggcccagcgtggcctgccccagggtgggctcccagcgcaactgcaggcatcctctagtggggcctctggtaaccctagcagatggtggtgacccccctgagatgaggaagctggtgacctgagactgagcagcagcctatgggctccgggtcaagtgctattcccagcggatgcccttcccctgcgccagtccctccttcctgagtgtccagcccccaatgcaaacagcaaccccaggctctgaaactactttttttcttagaaaaagcaaaacaaaacataaaacttgtttctgattatgaaaaaaaaaaaaaaaaaaaaaa

SEQ ID NO: 224 - DNA, 2847 bp, Homo sapiens
  misc_feature (2734)..(2734): n equals a,t,g, or c
ggcacgagatgagctgcaaggtgcctttgacgagcacataggaccgctctgcactgactggcagaaggccgagcggggagacattctcctgagcagcctcatcagaaagaagctgcttcccgaggcctctctgctcatcaccacgagacctgtggccctggagaaactgcagcacttgctggaccatcctcggcatgtggagatcctgggtttctccgaggccaaaaggaaagagtacttcttcaagtacttctctgatgaggcccaagccagggcagccttcagtctgattcaggagaacgaggtcctcttcaccatgtgcttcatccccctggtctgctggatcgtgtgcactggactgaaacagcagatggagagtggcaagagccttgcccagacatccaagaccaccaccgcggtgtacgtcttcttcctttccagtttgctgcagccccggggagggagccaggagcacggcctctgcgcccacctctgggggctctgctctttggctgcagatggaatctggaaccagaaaatcctgtttgaggagtccgacctcaggaatcatggactgcagaaggcggatgtgtctgctttcctgaggatgaacctgttccaaaaggaagtggactgcgagaagttctacagcttcatccacatgactttccaggagttctttgccgccatgtactacctgctggaagaggaaaaggaaggaaggacgaacgttccagggagtcgtttgaagcttcccagccgagacgtgacagtccttctggaaaactatggcaaattcgaaaaggggtatttgatttttgttgtacgtttcctctttggcctggtaaaccaggagaggacctcctacttggagaagaaattaagttgcaagatctctcagcaaatcaggctggagctgctgaaatggattgaagtgaaagccaaagctaaaaagctgcagatccagcccagccagctggaattgttctactgtttgtacgagatgcaggaggaggacttcgtgcaaagggccatggactatttccccaagattgagatcaatctctccaccagaatggaccacatggtttcttccttttgcattgagaactgtcatcgggtggagtcactgtccctggggtttctccataacatgcccaaggaggaagaggaggaggaaaaggaaggccgacaccttgatatggtgcagtgtgtcctcccaagctcctctcatgctgcctgttctcatggattggtgaacagccacctcacttccagtttttgccggggcctcttttcagttctgagcaccagccagagtctaactgaattggacctcagtgacaattctctgggggacccagggatgagagtgttgtgtgaaacgctccagcatcctggctgtaacattcggagattgtggttggggcgctgtggcctctcgcatgagtgctgcttcgacatctccttggtcctcagcagcaaccagaagctggtggagctggacctgagtgacaacgccctcggtgacttcggaatcagacttctgtgtgtgggactgaagcacctgttgtgcaatctgaagaagctctggttggtcagctgctgcctcacatcagcatgttgtcaggatcttgcatcagtattgagcaccagccattccctgaccagactctatgtgggggagaatgccttgggagactcaggagtcgcaattttatgtgaaaaagccaagaatccacagtgtaacctgcagaaactggggttggtgaattctggccttacgtcagtctgttgttcagctttgtcctcggtactcagcactaatcagaatctcacgcacctttacctgcgaggcaacactctcggagacaaggggatcaaactactctgtgagggactcttgcaccccgactgcaagcttcaggtgttggaattagacaactgcaacctcacgtcacactgctgctgggatctttccacacttctgacctccagccagagcctgcgaaagctgagcctgggcaacaatgacctgggcgacctgggggtcatgatgttctgtgaagtgctgaaacagcagagctgcctcctgcagaacctggggttgtctgaaatgtatttcaattatgagacaaaaagtgcgttagaaacacttcaagaagaaaagcctgagctgaccgtcgtctttgagccttcttggtaggagtggaaacggggctgccagacgccagtgttctccggtccctccagctgggggccctcaggtggagagagctgcgatccatccaggccaagaccacagctctgtgatccttccggtggagtgtcggagaagagagcttgccgacgatgccttcctgtgcagagcttgggcatctcctttacgccagggtgaggaagacaccaggacaatgacagcatcgggtgttgttctcatcacagcgcctcagttagaggatgttcctcttggtgacctcatgtaattagctcattcaataaagcactttctttatttttctcttctctgtctaactttctttttcctatcttttttcttctttgttctgtttacttttgctcatatcatcattcccgctatctttctattaactgaccataacacagaactagttgactatatattatgttgaaattttatggcagctatttatttatttaaattttttgtaacagttttgttttctaataagaaaaatccatgctttttgtngctggttgaaaattcaggaatatgtaaaactttttggtatttaattaaattgattccttttcttaattttaaaaaaaaaaaaaaaaaaaaaaaaaaaaaaaaaaaaaaaaaaa

SEQ ID NO: 225 - DNA, 1156 bp, Homo sapiens
gaattcggcacgagtgcggtccaagcccatggggccacctcttaattccagcttccttgcctactatgacagggaaagaaacatggcaacatgcgcacagctcttaaggcttgtrctggaggcggaacacatcgcccctgcagcctggcactggccatgggacatgggaggtagggggaggcgtgttccagcctatgttggccggtgggcaggtgctcagactcagcaagctccttggggtcattcatcacccctccacccattcatcctcaaacacctgcagagggcttcctctgccaggctgtcaggcgccaagggcacagaaatgagaactgacagtccactgggggagacggtcttcgcatggtcttgccctcagtgtaaggcacaagagtggtgcaggggggcctaaccaggcccccakggtaaatacsggttggggggctgtctgggggaatggggaagaagagcattctgggctgggggctccacaggctcaacacagctggagtkarccacaacagtgaatcacgagaaatgaggctggaaaggccagtgggaaccatggtcctggaggtgggcattgggtggggakctktgcttcaagctgagggcaggattttcagcacagatgactgtgttctgaaagatccctgtgggaagaktgaggagaggggtgagcagcagccaagactggaggcaggaggaccaagcagcgggttgtggccacgtttcaggtctggagtcacccaggagagattctgatcatatgggtctatggtgtgacgtgggaggtggaaggttccaggacaactcccaggctcctcaaaataacaacttttttttttttttgagacagagtctcgctgtgtcacccagactggagtgtagtggcgcgatcttagctcactgcaagctccgcctcccaggttcacgccattctcctgcctcagcctctggagtagctgggactacaggtgcccgccaccacgcccagataattttttttttttttgtattttttagtagagatggggtttcaccgtgttagccaggatggtctcaatctcctgaccttgtgatccacccgcctcagcctcccaaagtgctgggattacaggcgagagccaccgcgcctggcccaaaatcggcacga

SEQ ID NO: 226 - DNA, 636 bp, Homo sapiens
ggcacgagtagcatagtgcctgacatatagcagtttcttaataaatgaagtcattggtctattactattattgctactattgtgcaataataatagacaaaagcaacgtagaggtgaaagtgcagacgcctggcctttgccctggggtttcccctctgctgaggaatctgtggctgctcagctttaagggtgcagggaggtggccacattcctcaggccccagccctggcctcaggcatgaggcaacaaggaaagcaggtttaccttcagggcaatccttgggaaaagaataattttagggacaactagaaggctccatggtctctcaaatatctctcctaaggcctggatgctgcctaaaactcatttcagggtagccacaccactcatcctgctaggacagtaagaaagctcaaatacgccaatacccaggaaagggtacacagaatgtgagtatagttcaggcaaacagcataaaatgatatgagatcttaagagctgtgacactagagacttttctctttttaaaaatttttttatttccataggtttttggggaacaggtggtgtttgtggtgtttggttacatgagtaggttctttagtggtgatttgtgagactgtggtgcgcccatca

SEQ ID NO: 227 - DNA, 1425 bp, Homo sapiens
gaattcggcacgagctgtaccaaggcttcagagtgagcagggggacatctggataggttagccagggccacagagagaagagctgcttacacctgaattgtttcacccttttcaagaacagggttgtccttctccccatctggatccttgggctagatctctgccgaggggctccgtcaagtcccgcaaggctagagaagggagccccacatcatttccactttcaaagagggaagatgctcgtcattcaaattacttctgttgatttccatggtatccccctgtccgtcccacaatctcttaccaggcgtcaatgcacatgcaggggatggaaagaggatgagccgatgagcagactttgcattaatcaaggagaaagaaaaagcagatggaaggaggtaggtagatggagaaagcaacagctccttttagcccttgatgacggccctgaaggcctgtctcttttagtgactcctctttgggtcctcttcccctacctctcagtgactaggttcctcatattaattccctgctgtgagtttggctccttgtgctgggcaattcagtcatcctcagaaagagcaaagttggtcttggaattaaggtgcaggtggggaaaaagagggactcagctagacacgaagaaaggctctcttcccagtctaagcccttytaccgtaaggggcattttatcaagacagccacccaactccccatcccatctcccctcctttgtagaaacagcatttgactcaccaagcctttctctccctttccgtgtgtcttgcttagtttctggattgagagaatttctatccttgctccctcgaactctaaaagagcttcttttgaaaactggggagtatcaggcctacctctacatgtgcaacagtgccaggattcaaaggaaaagctcattccagcctctgcctcttgggagatggttcagagtgccacatagggactgaaagagggtgtctgaatccttcaggaatgctttaagtgacattgttgaaaagagataaagaaaaggaaaacaatggaattgggtttctaaggtccctggaaatatcctgggggtctaattgagaaagaaaataagaggaaatttgaagactcacttcttccttcatctgaatccactcagatggcaactgatctctgtcccaaggaccctctaccccacccaattcataatcatctcagattagaaaaggcagaattccttcccattctcaaatcagcatttgggttaggggcccctaagttacgtgagcatgttagaaatgtgaccccaggcctcaagagagaggctctgccacatgagaggagataggaatcatgactgaaaggggattagcacagaacagagaaaactgatttgatagacaaatcaaatagaaaaaaaaaaaaaaaaactcgtag

SEQ ID NO: 228 - DNA, 1002 bp, Homo sapiens
ggcacgaggccaacatggaagccacagggtctctcgtgccctgatctgggaagtggcaggccgccaccaacactgctgctgttgttgttcatgctaagtcttggcaagccactgggtcgcacgtagggcatgtctccattcaggccagccgcatttcgagccacacgtggttcgtggcaactgttggacagcacagatgtagggcatcaaaagcctatgaccgtatgcaacctggtgcttctgagatgctcacgtggtccatgggtagaagttgttcacctgaggtcttggctacctggcattagcccacacacagatattagtgtgcccacctagtgtgcagagtagcttaggggtgcatccctctgtttctgccctagctgataattctcttgaccacaggatcccagtttcccttcctttatatgtaagacactttgttcagtgtctttatttcataatcactgtcgagaaatggaggtaaagtagtatcagttgtctgtagacttagtggcagattgtgggggaggctgcatcccaaagctgggctggccctggaggacaggctcagggacagctccatgtcccctctcatgggtgccaaaccattctgtgagtgcctgtgcttcaaaggtgagcccggagagctctgtactcggccccctctggccttgagggaacgggggctgggaggtttctggctggaccctgaggggctgcttgcgggctctgggtctttggacttggcaccgttgccttggcatttgttggcttgggagttgttgctgctgctttttcccagatgcatgggcctgctaatgtcagtgtttgacaaaccaaggagaggacactttcctgagctcttgaagtccatgctttatcgtttttgccttcagatttcagagcgacctagcagccgtgtgtaacaaacacgtcacttgtccctgtggagattggcccaccagcctccactggcaccctgtccactttaacaagcacact

SEQ ID NO: 229 - DNA, 1029 bp, Homo sapiens
ctggagccaccatggagagtgtgtcatggggctctctcttaagtcaaattctgcacatggcatgtgaccatcctcgtgggctcactgttggtgcctgaggttccttgaaggtggtatcaggatctcaaggtcacctcctggacacagcatggatagaaaggggcagggttcatgccctggaggtggaaaggcaagcagctcatttctgagaagcagtgtggcctggggggctcataacaccaatggccccacatggtgtctccaattaacctactgtgagcaccattacctccccacactatccaggatgtcagaaacctaaggccacggagaaacttcccagcaatctttctttagaacagaaggtggcctgagttaaacatcggtgccagcacttcttgggtggagatgagaaggggctgcgaaatctcagcccagaagggacaagcatckgggccaagtttttacaatagccccytgggctcttgcatcaagagccttgacaattgccatggggcatccagcaagtctcctgatgtggatgagccctccttcccacaatggaacccagattggtgggggcagggacccaggagacagaaaagagtccatgtaactagaaccccctaaacaagatgccccacattgccaaggggggaacatgtgagcagagtggtagtgcctgggcaatctcttcccttgagcctcctctgtcatgcaggaaactcattgaaggcaaagagcagccaaggggattgtccccagaccaaagagaggacagatgagtgggggtaaccaggggtcttgagtccccagggcctgcgtggtcaggactcccagtctaccctccccctgtgtggacgcatcatcttgggtagtagtcatcggggacacccgttaggttccgccctttgagggctgcatccaccatcttgatgtaggcagagatggtcttctgcatgtccgcagtataggggtcatactcgagggggggcccggtacccaatcgccctgatagtgagtcgtatt

SEQ ID NO: 230 - DNA, 495 bp, Homo sapiens
ggcacgagcttgccttgtggcactggcagcagcagccaaccacagtggcagatgcagatgagaaatgtcaatggggctacagggatgtggagatgcaggggctattgggcccctgggcagaatgcaatctggtggctggctctcaaaatggtactgtgctgtagctgcttagggctcggggagttcatgagacccagcatgagctccctgtctggagcagtgccattatgaggtctctaggaagctcctcatgttagtctcagggcctgtgagggttgaggagcattcccattgataggattgcaggagtcttcaatggaaatatggaccactgggggtctctcatctttctccacattgagaaacctctctgcgctcccagctaatcctggctgaccacgatgcctggcttcctgtccttccttggccttggatgtttcctgtcacttctctgtttaatgcaaaaaaaaaaaaaaaaaaaaaaaaaaaaaaaaa

SEQ ID NO: 231 - DNA, 585 bp, Homo sapiens
ggcacgaggagagaggtaactcttacatgagcggacaggggaaggcagagagggcagaaaaggcctctgagctcacgattttgcttggcggtaggaaagttaaacttatctagcgaattctctcgtttttcaaactcagatttaagctttggtgagttagattctttgaaactgcccctgcaaatggctcccgctccctgctccgcctccccacgtcctgcggggggacgggacggtggcggtgctcctgagctgtccttcttgttatctgttcttgtctgacctgtggcatggtgccgcccagtgcccgctttcccaggcagcttcctggctttgggagcccatatggagtcaggcttctcacccagtccacctgcccaccttgttggcagctgtcccactgagcccatcctttcccagcccctccagcctctgagacttgagccctagttaagctctcagataatttctgccatcctttctgtatccgtgggtcacacacaaattccactacagctgtaaggaaaagtcagggctgatccaagaccttcgttcctcactcttcaaagaagcctccatggttat

SEQ ID NO: 232 - DNA, 541 bp, Homo sapiens
ggcacgagttgttgaccctacaactaatcctctttctcagctgcaactggctgtcttgatttgctgtgtgcatcgggtaatggacaaactggttgcacaaactcctgcccatggctcctgtgaccacagcaacttctccatcctcgtatcatctccccatgatcctgctctttttgccccatgttgctgctctttttgctcaaccttctccctgttcctcaggcactcccagctctttcctggccttgggtctttgtgatagccattcctcttctagggagcacggttctcccagatctttgcaaggcaggctccctcttttccttctcttttgctctgatgcctttgcctcagagctgccattgtgccaccccagtgaaagcctaacttccttgtacccacgttcacacagcacccacctttcattctctgcatggcatgtcccgcatcctgttcttcctcttcattgggatttgcagcctgggcgcggtggctcatgcctgtaatcccagcactttgggaggctgaggtgggaggatca

SEQ ID NO: 233 - DNA, 1543 bp, Homo sapiens
ggcacgagtgtaactgtataatattgacaatcgaacaaacagcttcaatcatgtctattcatatctccaggcaaagttttgttcttcttcctttattttacaaatgtattgcttcaaaggacacatacttttgtggataaacaatttccactagaagaagaacaggaaaggtagctatttaatatatgcagttagagccatgaggtatggatcatagtaaataatattttgcaatgatactagcactaataaagatgatgacatttgcatgattagctatgtttttagtaaaggaaaattaatggataggaatatttagcttgaaggatacatacaacatgctgacaaacaaaactgagtttcagcataaaaatggatatattacacagagagtatacataggctcctaatgtctctgtgtgcatttgtatgcatattattcatctagtattttctttttacttccaagttggaatgcatttacttcatatcttattataagcccatttggtaacacttctgtcagatttcagttgcatattcactgttgaataaatcagtggttaataaatgtccttggaaatgtgtttagagataaataatgaactgctgtatctgatcattaagtgtacatcaagctcacatttttactctcagaatcctaaaaggaagatagcatgacctactatatatgtacatggaaaaaagggaaataattatagagaaaacatgtaaaaggagcctggtttattactcttaaatgggtacatgatagatcaaaataaatgttattacaactgatcaaaaaatcctactgcaaaggaaataataaataaagatggagagtcaacctgtccatcataagtgctttttgttacaaagccaaggacttggagtgtggacccaaccccacagcatgcaaaaccgtggggctctcaggattccaagcctagcatccccaccctctcataggcgcttcggagctgaccgcaggcacacttttaatttgtggcaagatggtctgacaaacagcttgggaggacagcacaggtgaaaatacagatcaagtgcagataaaaatatgttcaccttgaaaaatacaaacaagacttttaggtaataatgcacagggaaatcctatcaaaaaatgagaagaatagaaccactgctttctcattaacaattttcacaatcccttttagcttgtattccaacttctgtccataatccaatatctgcatactccttacatctatacttaaataatatagatttttgtcccctgtacatatcttataaatgtcaatccatcccacctcaaagtttcttggtattcagcaagttttttaaaaagtcaatcatgtaggagatcctttagcaatacttcaaggtatcatccctataaaaagtgaagagggatctgaggtcctaaaaagaaaaataatgacagagaatggctgtaatttcatatgttcctgatggaaatctcactgctcagaaaaaaaaaagaacacatatgccaaaataaaaaaaaaaaaaaaga

SEQ ID NO: 234 - DNA, 1195 bp, Homo sapiens
ggcacgagcgcatgggcagggaaagtgttttattgttatggactaataatttagaggctagggaaggaacggccttgtgtgctggcctcgttgtaacaatttttctcatgtgtcttccagcctgttcatctgtcgcgtttatttctaaaaagtcctctcacctgccctctgctgtcctcagatcccatccacggccctcacctccctcatccttctctgtaacctctgacaattctggatgacctggtccccgccatgcactttgggcttgcccctgccctgtgagtagcctgacaaccctgcacacacccctggggtggtgccagtgcctgctcctcctcctggcctccctgccacccagcccaggcatgaagctgaacatcgagtgggccccaggagagaggctgagttggtatggccaggactctcccttggcccagtgggaaggtgcacctgcccacttgggagcaggcctcagcacccctcaccagtttcaggttgcccactctcaacagcagctaagtcagagctccgagggctgctccccacccaccttcagcctcccaggcctccccttgcccgcctgggccctggagacacatgcttcagccacaggcaagtctgtttcccttccatggggttttctccacaccacagcagtggtacctctgggcttctctccctggcccctgccccaaggagcccagatccagtgtggtgcttcttagactgtggtctgaggcctcctgcttatagaacaggcagattcccagacattgcctctcccctaaccaaagtttattgattctgagtctctagggctgtggcctatatttgcatttttaacaatctccctcgggactttttatgcactgagatttgaggccagggttgttctaggctgtaccggcaggtggactggaggccacagagaagaggcagagtgaaattgtgccgggcctggcttggagcacccaccagcccccggaagacaagtctcacccagagctctccggttaagcctgccgagagagaggcaccaggaggcaatctccacactctcagacaccagccgtacccaaagattgatgatttcagacaccggcctcccggccacatcctcactgcctcactcacgcgtcacaccatagctcttggtttgatgtgtttgtctcactggttacacgtgtgtccc

SEQ ID NO: 235 - DNA, 1047 bp, Homo sapiens
  misc_feature (5)..(5): n equals a,t,g, or c
ggcanagactcaggaggctgaagcgagaggatcgcttgagcccaggagttcaaggctgcagcaagctatgattgcaccactgcactccagcctgggtgacggcaagaccctgactctaaggaaacaaaaacaaaaacaaaagtgggtataaatatgactgcaaaactgctctgagctgctcctctctgcctatgcggtagccctgctctgcaggagcggtcacagagcagtaatactggctctctaataaagctgttttcttctgcctccggtttgcccttgaattctttcttgcacaaagccaagaaccctcctgaactaagccccactgtggggcttacctgccctgcatgaggtaagtatcaactatggctcaaaaggcaggtcaaaggcagcttttcaagtatatttgtgtcacagaaactcccactgtaacatcaaaaaatgaatgattttttcaattccctttattagggtttctttccctgcccccctcatttctccacttctttctcttctctccgtaggtatatagttatactctcccctcacacactcattttgtgtatgttcaaaaatattttggttatcttttatttctggtaactgctttttcatcctgcatgagcagccaagaaaagaattaatttagactttctgcaatgtcagggcctctcattcaattactctccttgtctcttggaagctctggtaacttagtttaatgacctctcacaccttacatccttaaaaaatgccccgtgtgtctcctggctcgggcagtcttaattatgttggcagctttaggtttccttattaccagcactccaggacctcatccccaccctgtccccatcttcatcttcacccagagcttcccatctccccacctcccttatcgccaatttctgtctgcactttatccacgatattcccatgttttctgctcttactagaaacattattttacccagcactgcatttttaaactgaaagaagatggtgattattatgcccttatcgaaatccattacttgaaaagctcga

SEQ ID NO: 236 - DNA, 1246 bp, Homo sapiens
  misc_feature (746)..(746): n equals a,t,g, or c
ggcacgagggccaccaggcacatctgctccactgagctggtgcagtgcactgccttgtccagcaggtggtggtactccaggtcctctgtcagccgctggagcatggacaggggctcattgaagttcacctgtgggtggacaggtgggtggtcaggctgggcaccagcccggcttggcatggtgcccttgcttttctcggatgttcagggacatccctgstcagacagcaccttcacagtgaggctcctcagatggccctgtccaacagtgtggcccccaagccatcacctccctggcccctcctgggctgttttctccacagcccttcccactttctggtctgctgcatcctacacacttttatcatgttcactgttgctctcctctgctcggatggacacccamcaaggccaggggttctgcctggcccactgctgtatcttgagtgcagaatcttaggaagcagtgactgaatgggcacatgagtctgtgggtggaggaagtgggtcttccccatgttgcgagctgtgatggggcccggcacaggatgggttaggcccaakgcccctatcycggtgtcacatakggcagggtcactctccccaccatgatgccatcgggtacgagtctcagcttcctcgtgttatcttgctccatcctcccagacactgaagaggacgctgtgtttctccccaccctacacatgtggacacagaggctggagatgtgaaggaacttgktctggntcacacagcagaaccktctggcctagtggagatgccatgtagccaggtggcatgaggatccaagctctgagcctgcatttcctggggatggcaccagggatggctgccagctgaaggagggcccacccctccacacacagccccatcytgccactccccatctacagatcggkacagctgggacatggtaaggtcctgtgagatccagaggtgctctggggctccccaggttgctgatccatgcagagcttctccctggctcctcctgtcagagcccaaagatccctgtactttggaagattgggcaatgcctatgtgcacgattagataattagttacatgctcctcaggtgccgttaagaaaatgacactccaaggctgtgtgtacttcacacaggccattactgctcatccatgcacaggaaagcagccccagaggacctgtcggggctgccctgcccgagccacccaccgaaaaaaaaaaaaaaaaaaaaactcga

SEQ ID NO: 237 - DNA, 1048 bp, Homo sapiens
tgcaggaattcggcacgagccaccaccccagcccattatctctattgatcctcactccaaccttgcaaaataggtagcgtattccagtggagaaactgaggcacaaagaggtgaaagacctttcctgtcacagttaggaaagtggcagaagccgtatttgaaccccagcaggtctccctctgaagtccacacacgtcagcgcctctgtgttgtctctttgccagcacagggctccctggagcccagagatgggggtggtgacttgaaggggttggcaagcctgggctcctccagcgaaaattcccttggccctgggcattcctaagcgagaagaggctcaatcctattttcttctcctaattggatgccttttattcctccttcctaattgaagtctggtcattgctggttgccatggcagcagccaaagcgctcatctcactgtggcttgtctctgcctgcggccaatgggaaacctcctttcccatatacggtggggacatggagtgtcaggctgtcgtattctggtggctggaggaggagaggaagtgagatgggaggaaaaaggcctgtcctctcccacgcagagactccggacagcaggatgtgtggaatccccagtctgttttcagccaggcagcaacagcatctgtactgagttgagtctatgtgtctaccagtgggctaagaacttcatgtgcagtatctcatttaatcttcgtgatggccccaggaagataagggatcaaggcccagaaaggctaagtaagctgccaggtcatccaaggagaaaatggcaaagcctggatttgaacagagactccagcttccttatgtgtagccatctcaccatgctacttctcagggggttactatgagtgtctctcatgtccccagacccagattacaggtttggaggaatacacagcccaccttcccaatatcgcaggcaacagttccaccaaatgccctgcatggcatcacagggagcctagttgcccactgctctactgctgagctcaatgccacccagcccgggctctctcga

SEQ ID NO: 238 - DNA, 1178 bp, Homo sapiens
  misc_feature (138)..(138): n equals a,t,g, or c
gaaagcaggctcatttggggactgattcaagcagggttctgaagaaagagctagcccactgcgcagtggcccacctggagaggtagcagtctcctttcctgatgccagatccaagcagaggctaatgctggagaccangatgcccgtgggagaatccctgtagctagagggaattatctggaagtaatttatccctgtaccgccttgtggggttgggtgtttcttgcccactgcatgagttggtattactctaagagcgacagatacatgttttcacatgctttccatgtactagacactttctaggcatcagttctcaacatgacaaagagatccttctcagggaaatcagatccctcttccactgctgaaaaaccccacagtggctcccatttcacttggcataaacaccagtggccttgcagtggctgccaaggtcaaaccatctgcctttctgcttcctgctcacccttttccttcatcttctcaycttttctgtcttctccatagctcacactcccctagccacactgttctccttcctacaatgcagcacactgggcatgcttctaccccaggscccttgcaccagccgmaccatctggttgacatgcttctcccacagattcttgcttggctaactccgttgtgctctggtttttgtcaagcagtcaccttctccatgaggcccacctgggccaccatatttaacactgcagtctacactgcctctcctcccaccacccagcactcccaggccctcactctgcttcctttattttttccatttcgccagccatcttccaacacatgggaccacatccttatttattgagtgtcttgttgcaggtctctaagactgtgcctgccttgttcactgatgtatctctagcgcctacaacagggtcgggcacagagtaggagctcagtaaatacttgtggaatgaatgaatgagctcattttacctcaatcacaactccaggggtagacatggtgatttcactccattttatggttgaagctcagaagcttacggaacttgcccaaggtcacatagttagtaagtggctgagtgacgcatcaacccaaagcctgtcttactctggggtcctggatcttaaccaaaacactaagctcttccctcctccaggtgagcccctggtcctgatgcctcgag

SEQ ID NO: 239 - DNA, 825 bp, Homo sapiens
tgcaggaattcggcacgagccagagcagccctcaaagcctgggctgttgagagtgcacatcctggcctgcggtgacagccgtcagatggtgaggggccccaggcgactgccccagcagcagggcctgggagctgcacaggggagaactcgataaggagcatcatgagcatagtgggtccattgacaacatgcagtccccacggtggtgcctaatgacaaaatgacatcatgccacctgcaaaaaaagtaaaaatgatcagaggcgagcttgtcagagaagctttgaactaggtgactgcatgaaacatctcagaggcggaagagtgcctccccctccccgggactcccacctggtgccctgagctcatcatcccttctcttgtagcatatgctgtcaatacccagggccttttcgaaacggcaatgggtccgaaggcctcgggaccacctttcacacctcccctttatgcagtgtccatacctccttggtgctcagctgctggtcagctccatatgccctgtggtccctgccctcccaaggcctgtgaacaaatgcttagtcccagattagagtctacgtcaatctgggatgtgagctgagtggcacctgtcgtgaaccaggccagagtctacgcaatctggggtgtgagctgagtggcacctgtcgtgaacgtgcatgcacatgggcattttgtcagtctgcaccggtgaataaatgtcgctgcatttgccagctgagtgtcaccaggttccaggtcccattacacatcaggaattgtgtccgactcttctggatccgctgattggacctgagggatccctgac

SEQ ID NO: 240 - DNA, 853 bp, Homo sapiens
  misc_feature (20)..(20): n equals a,t,g, or c
  misc_feature (40)..(40): n equals a,t,g, or c
aattcctaacgcaaaagcanccctggggaagaacacaganacaggtgacacgtgtcagactgggcccatgtcaggtacatgtatttcccttcacctcaccctgaaatgtgccatttcagaaagtggtgcatttaccagacaatttgggttgatcatcatgttagccacttggcatctcagtcaccatcttggtcacctggtcaacatagcaaccacatctcttggtcagctagctttatttgcaccttgatcactaagatagatgtcatctgcaaagctgtttaataatcttaataatggtctttattatttccagatccctagagtaaccttagaacagcaagaactattcattcatccataaattccagcaaggtgctatagaaagcactatggaaaaaagaggaaaagagagggagaacatattgtaaaagtagacagggattctgctactgagaaattcaacacctggcaagggggatgaacaggaaagagaggtgctggcagaataaaatcactccccagctccccacacaatgagcaatgagtatgctatttctattttgtgtccatgtgtccttgctcatattcttaatctgcagcccaatgctctacctctgagctataccccctcctccttgctcatactcttacttgtgacttgaagtgacttcctgctcctgcctattgtcacctcccccatgaaggcttccccaattatcctgaagcagagacagtccatccctccctcccctgtgcaaccagggcccctgggctgacctcaagcttctcacacttggccataactagcttttaggtatttatctcccacactagactctgagctcctcga

SEQ ID NO: 241 - DNA, 573 bp, Homo sapiens
  misc_feature (3)..(3): n equals a,t,g, or c
  misc_feature (35)..(35): n equals a,t,g, or c
ggngcttcagggaattcggcacgagctcgtgccgncagaatctccagctcttatatccagagtggcatccgtgtgacatagtcattctttgtatgtgtgcctttagcctatgggtcattgtcagaatttagaaattcaaggtgcagccagttacattgctagagagatggaatatttcagagtctctgcagcttcctttaagaaaaatgtcttcttttggaaagccattcagaaaacatactcagtaggacagtttcaacttattaaactttcaggaaatttttttaattgtctcacactgtctcttttgctgtataaattttaacagcagggtaaagagagaagcgttcttgaatttcactagctgcggagaaaatatttctcactgccctgggatacataggaaatcacagtcgttagtttcagatgtttagtttgggatattcaggtgcattcacaataccttttgattcattattactttaaaccatttgtggtttgatcctacaaattgaggacttttctccagatgtgaaaaatacaataaaattttctaacaaaggggatctcgta

SEQ ID NO: 242 - DNA, 903 bp, Homo sapiens
  misc_feature (18)..(18): n equals a,t,g, or c
  misc_feature (27)..(27): n equals a,t,g, or c
  misc_feature (56)..(56): n equals a,t,g, or c
  misc_feature (94)..(94): n equals a,t,g, or c
  misc_feature (889)..(889): n equals a,t,g, or c
  misc_feature (898)..(898): n equals a,t,g, or c
  misc_feature (900)..(900): n equals a,t,g, or c
tgttaccggttcgccggnagccggaancggaccgaaccgcaagcgaattcattgancgaggaaccggaaggagcgcccaaatacgcaaaccgcntcttccccgcgcgttgccgattcattaatgcagctggcacgacaggtttcccgactggaaagcgggcagtgagcgcaacgcaattaatgtgagttagctcactcattaggcaccccaggctttacactttatgcttccggctcgtatgttgtgtggaattgtgagcggataacaatttcacacaggaaacagctatgaccatgattacgccaagctcgaaattaaccctcactaaagggaacaaaagctggagctccaccgcggtggcggccgctctagaactagtggatcccccgggctgcaggaattcggcacgagacgacacgataaataaaagcagatgttcaaatgggagacacctgaagagacaagttagtccaatggataggagcgaaggaaactgcccctttgtaaagattgaggaaaagagtgtaaaattatgctctcattacactcatgctgttactaaggcctacagagagaaggtattgagaggtgacaacatgctggcagccctcgcttgctcttggcgcctcctcagcctcggtgcccactctggccgtgcttgaggagcccttcagcccgccgcttcactgtgggagtccctctctgggctggccgaggtcaaagccagctccctctgcttgcagggaggtgtggagggagaggtgcgggcaggaactggggctgcgcgcggcacttgtgggccagctcgarggggggcccggtacccaattcgccctatagtgagtagtattacaattcactggccgtcgttttacaacgtcgtgactnggaaaaccngnaaa

SEQ ID NO: 243 - DNA, 909 bp, Homo sapiens
ggcacgagccagaagagggattgctgggtcatatggtagtttaatttttttcagcaatctttgtattgttttccataatggctacaccaatttacattctcattaacagtgcaaaagggtttttgtttctctataccttgccaacttgttatctattgactttttgataataggctttgcatttgcctgatgattaatgatattgaacacattttcatatacctgttggccactttttatgtcttcttttgggaaatgtttgtttattctggtacttggcctattttttaattgggtttttgtttttttctttgctattgattttcttaaatttttggatagtaacctgttatcagatatgtggttcacaaatattttctcctactctgtagattgccttttcattttatcgattatttcctttgctctgtagaagcttttcagtgtgatgtagtcctacttgtttgttcttgctttcattgcctgtcctatcagaaaaatcattgccaaggccaatatgtatcagcttctttcctatgttttctcctaggtgttttacagattcaagtcttatgtttaggtctttaatctgttttgagttgacttttgctcttggtgtaagataagggtccaatttcatccttttgcatgtggatatccagttttcccaacactagatatgaaagagactaaactttacccattgtgtcttcttggtgcctttgtctaagacacttctatgacagttgtttctcagatgggtacttgtttacgtgattcacaacagtgaatggaaatgtttaccactcatcactccatctaacacaccttgttaagacacatgtaaaaactgttctaatagtaccagttgcaactataactgaaaatagtattattttaggaactagt

SEQ ID NO: 244 - DNA, 901 bp, Homo sapiens
gctcgtgccgcacgggaggcagaggttgcaatgagtcgagatcgtgccattgcactccagcctgggcagcagagcgagactccggctcaaaataataataataaattagagatggggtctcactattttgcccaggctggttttgaactcctgagctcaagggatcctctcgcctcagcctcccaaagcactgggatcacaggtgtgaggtgccatgcctggcccacaccagctgtgtttaatcaatgctgggcagccctgcagcttggtgacatcagtgggccactggctactgggtgttttttccatcctgccctgttccctgctggcaccaggggaaaaaggcccatacaggagtctgttccaggtcaccagatcctggggtggcccgtaaggatttgaaggggacaggaggcgcccctttgccgaggcccttcactgtgtcaggcacattgctggctgccgtgggtgcacaatcttagggaaccctcctgcctcctccgccttgctgcttccttgcaaagaaaatttcccactgcagagggcagcttaattgctcagcagtggctcttcagaatctcacagatgggccaggcgtggtggctcatgcctgtaatcccagcactttgggaggccgaggcgggcagatcatgaggtcaggacatcgagaccatcctggctaacatggtgaaaccccatgtctactaaaaatacaaaaaaattagccaggcgtggtggtgggtgcctgtagttccagctactctggaggctgaggcaggaggatcacttgagcccaggaggctgaggttgcagtgagctgtgactgcaccactgcactccagcctgggcaacagagcaagaccctatctcaaaaaaaaaaaaaaaaaaaaaaaaactcgag

SEQ ID NO: 245 - DNA, 790 bp, Homo sapiens
  misc_feature (5)..(5): n equals a,t,g, or c
  misc_feature (9)..(9): n equals a,t,g, or c
  misc_feature (11)..(11): n equals a,t,g, or c
  misc_feature (18)..(18): n equals a,t,g, or c
  misc_feature (92)..(92): n equals a,t,g, or c
  misc_feature (756)..(756): n equals a,t,g, or c
  misc_feature (764)..(764): n equals a,t,g, or c
  misc_feature (771)..(771): n equals a,t,g, or c
ggggncggnanatggaanggaaccctcactattgggttcaaaagctggagctccaccgcggtggcggccgctctagaactagtggatccccngggctgcaggaattcggcacgagatttttttcttgaaacacaaaaatgcatgttatgccagggaaggaagaggagaaatttctcctcctcatcaccatcatgactacctcctctcttgcggttggctgcttcggatggttgaggctcctgctgcattttttagatccgggcaattatagccaccaagatgatatggaccaaagtacagtgttcaaacatgactgatagataaatgaccatttatcatcatcgttttgttaaaaaaccttttttcttataaagttaacaaaccaaggctgttgatccctgaattagaaagttgatttgcttgattattttccaaagtgtgaggcgggcaataagaagggaggagcctttagtgcttttgtgtaagttgctgatcctccagtttggcaacatcttgggagcatcttctggcctagtgatgtggcattttgtgaatctaagtatcagcccatggctctgatgctggctgcttatggctcaaaggggaagagggtcagccccctccccctggatgtttcagtctggcccagtggtggacacagagccctggacagcttccccaggagcaactgtctcttcctgtgaaggtgactcttcctcagcttgtcctcgagggggggamcgrtacccaattcgncctatagngagcgantacaattcacttggccgcg

SEQ ID NO: 246 - DNA, 922 bp, Homo sapiens
tgcctttcaggctcttagaagccatagatttggacaagcccagcaagatgggtgtccttccaggcctcttcccctttcctccatctctggcaacagttcttggggtttggcaattgtttggattttttttctttctgcagttgtgtgtatgtgtgtttgtgtgaagaaaaacagactctgtccaggtagaaatggtgaggagggggaagagaattacatttccagggtcagaaacttggcaacagttttcctagagtgactcagacacaccacagtaacaactctcgctgcaattttattttaatttgagaaataaagatttcctccaagccacatgaggactctggcacccacccacaaagcaagacctgtatttataagccgagggctcagggagcctaactgcgggacccgtcagggccccgtgacccatccccgtccccacccccccctccaccgctgggcccatcagtgtgtgttggggggatgcttggcagctgggggtgaggagacaacaaacctcgggaactggagccagagctgcggcctgactgacgccttttgatgctcacgggaaatttctgcccaggatctcagccccaggctggttgtttctacaaatctctctcaaatgtattattttggtgacaaaaatgaaggagctttgtaaatttttttaaaattatgaatcatatcaagtagttgtttacatttcttgaaaaaataggaactcgggcagcagaatcagattggcagaatctttagactacacaggcaataatcaagtctgctgttttggcctttcgtagtagaagtggttgtagtgtttagatatctgtttggtcttgcttcttgtattgcatttttttcaataaacaacaacaaaaagaaaaaaaaaaaaaaaaaaaaaaaaaaaaaaaaa

SEQ ID NO: 247 - DNA, 900 bp, Homo sapiens
ggcacgagctcatcttaatgaattaagtctgggaatataattatgtctgggaatataatagagaagactctatttcctgtgttctgggtgagtatgaacttttgggggatactaacttactatatactcactaggttaatctatgctaaatacccaacaggaaggcagctgtagggaaaagcaagagtatgaaacctggaaaaacaattgccagactctgctgcttgtgggtatgtggccgtgggtaaggtagttgctctgtgctttcagcttcctcatgtacaaaattgagataataatgatgcccactttgtggaattcttgtaaagatgaaaagattccaaatatgtaaagtgcatagaacaatccccagcaaaaagtggaacatgttagtgataattgctgtcatagtcggtcttcttgcttagtaggcctgagataaaactttctcctatttcatccctcctcctccctcttcctgattttacatgttatttagttgtttctccctctcactataattatttgtgagaagttacaagagttatactatggtagagcagacaggctttgcacaccttcagggtcagttctggaccaaaccactcagaaaccactgcacggatgaatggctggagattgtggggcctattgtgtctccaggtggctgtggttacatgggatccctggaatgttaattaattttcatatttccctttaaggtacttctgtggctcaaacaatgaatttctgagttaggtcccaaagtggcatttttgtttgccaacaccctcataggaaactgtattagaagctttcttgtaatatttaagagcctttaaaagagcgagactccgtctccaaaaaaaaaaaaaaaaaaaaaaaaaaaaaaaaaaaaaa

SEQ ID NO: 248 - DNA, 604 bp, Homo sapiens
  misc_feature (152)..(152): n equals a,t,g, or c
ggctgcaggattcggcacgagaatcatcagagatgaaactgtttgagagactcatgtgaccttacgaaaattacaacagcagtcttaaagtatgaaaaagatgcatcacagcagagacattatggcccagttgatatcaaatgtaaaatgtnaatgcatgtaaatgcacacttcattttatgtattatttagtaatttgcagtggtatgtgtttaatatttttgctacctacacattaggcaaaaaaaagatgtaaataatttgggagaaaaagaggaagaacagtgtaaaataaaactttctataagtactccatttcaatgtgttcaacatcatcctaaaaggcaagattttcccacgcaggtgacaaggtggtttatgtactatttaagggcggaaggtgcgtgcccgttcaataagcatgttttttgccaggtaggaaatatgttccatatctttacttatcattgcatttcagatgggaactagaaaaactggagagaaaaatgtaatgaaactgctgctgtaaattattccttttagcatgtattcacttgctaaatacacatttcttcaaaataaaaaaaaaaaaaaaaaactcgta

SEQ ID NO: 249 - DNA, 927 bp, Homo sapiens
ggaattcggcacgagcacttttagtacagcatttccaggaactatgtatcagcatataaaaatgcacagaaggattctcggacatctatctgctgtttactgtgtagcatttgataggacaggacatagaatctttacaggttcagatgactgtttggtaaagatttggtcaacacataatggccgcttgttatctacattaagaggtcattctgcagaaatttcagatatggcagtaaactatgagaatacaatgattgctgcggggagctgtgattaaaattattagagtgtggtgcttgagaacttgtgccccagttgctgtgctccaaggacacacaggatcaattacatctttacaggtaaacttgtagcttagtgggcacattccctatatgtattttcacctttttctttaaaacagtttctttgggaattgagaaatagtaagatgtgtattagttatgttttaagtaagagaagtgataatcattcatacaaatcatacaaatcatggaaggctgatgaaatgaagatctaatgcatatttacatgaaggcttattgatattttggggttatggttgaactggatgagtgtcaattagaaactggtgatagattaattatttttcaactttaaaacttgtggattttgctaagttgattttttttttttttttgagactgagtcttgttctgttgcccaggctggagtgcagtggtgtgatctcagctcgctgcaacctctgcctcctgggttcaagcgattcttgtgcctcagcctcccgagtagtctcggtactcctgaggttgagggaggattgcttgagccaggaggttgaggctgcagtgagccgttatcgcaccagtgcattccagcctgggtgacaaagtgagactgcctcaaaaaaaaaaaaaaaaaaac

SEQ ID NO: 250 - DNA, 1356 bp, Homo sapiens
cccacgcgtccgctctgcgasccttgaccgcagcttggcatgtggaatggaccccttcacggcctcgacacccctggggccgctggactttggcaacgtggtggccacactggacccgggggctgcccgtcacctcacccttgcctgccattacgactccaagctcttcccatctgggtcgactccctttgtgggggccacggattcggctgtgccttgtgccctgctgctggagctggcccaggccctcgacagggagctgagtagagccaaggagcaggaggccccggtgactctgcagctgctcttcttggacggtgaagaggccctgaaggagtgggggccccaggactccctctatggctcccggcacctggcccagctcatggagtctgccccccacagcccaggccccaccaggatccaggctatcgagctcttcatgsttctcgatctcctgggcgcccctaatccgaacttctacagtcatttccctcacacagcccgctggttccatcgcctgcggacatcgagaagcgactgcaccgcctaaacctgctacagtctcatccccaggaagtgatgtatttccagccgggggagccccctggctccgtagaagatgaccacatccccttcctccgtcgaggggtcccagtgctccacctcatctccatgcccttccccgacgtgtggcacacaccccacgactctgaggccaacctgsacccccccacagtgcacaacctcagccgcatcctcgccgtgttcctggctgagtatctggggctctascctccacggctgacgctkgaggagaggagcccggccaggacgtgccaaggacacgtggaaccaatggacctcaggccaggccgcccctcggtatgctggcttatccttttatttggcatgggttctacttgtgctatgatttgaagaccctctttcctctgtctcaaaccaccattctttaaagacatggaggagtcaagaccactgtggggttggcagccaaaggctcttctcagtttcatggtcggcataccctgggctggcatctggaccggtcacagcaccccaccaaatgaattctctgcggcttgtgkttttatgtccatggactgccgtgtgggggtccacaggggatgtgcttggacgcaggaacagaggaggtggaagccaatatttgggaactcgagtcggccagacccaagggcaacagaccaatgtttctgtgaaacatattctacagattagcattacaaggtgttgcatgaaaaaggggatcgaagacacgggatgagacattaaatgagtttcttcattgcaaaaaaaaaaaaaaagggcggccgc

SEQ ID NO: 251 - DNA, 1142 bp, Homo sapiens
ccacgcgtccggtcgggtctacgtgggcaatgtggcctggatgcacgtgctggcggcccgggagctggagcagcgggcggctctcatgggcggtcaggtgtacttctgctacgacgactcgccctataagagctacgaggacttcaacatggagttcctgggcccctgcgggctgcgcctcgtggagtcccgcctgctggtgccctactggctgctggtgcttctggccgctctcaacgccctgctgcagtggctgctgcggcccctgtttctctacgcccccctgctcaacccctacacactggccgtggccagcacgaccttcaccgtgagcaccgacaaggcgcacgccacttcggctacgtacccctgttctcttgggaggacagccggacccgcaccatccgctgggtgcaggccgtggagggctcagcccggtgacgtggagctggggcctggagcccggtgcgtggcacgtccgtccatccaggtccagggccctctagccctcggggcagaggggctggtgctacaccagctcgcctgccttgcagctccccgtgcttctaagccacgagccgcgagtctgcatcctcacgcctcttaagtcctggggcagggttttgggacaggcacatcttcactctcgacccaggccgacggctggctggggagtgtccgatggcccgattgttctcaactgccctgtcccatctggcttttcaagcaggaagtgagaaggggtcccacgggcttcgtgcaggccttctgaggtctgggcatggattcaggcctggattcggcctgaagatcctttctgactcctcctaccacctggggccctcttggagggtcatagtctcattttttcaggcctggattcggcctgaagatcctttctgactcctcctaccacctggggccctcttggagggtcatagtctcatttttttaaaaaacatttatcgccttttgacagctctctgctcttcaatgacgcctgagcaaacctgcagctttttccttcttcccacctctccacccaaatcacttcctacagtattgtgctgtacccagccgagccctggattaaagctcctaatccaaccctgaaaaaaaaaaaaaaaaaaaaaaaaaaaaaa

SEQ ID NO: 252 - DNA, 1365 bp, Homo sapiens
ccacgcgtccggtgacagaatacatgttagaaagactgactgctctgcaactccttattaacgttaagtattgatgggtcaagacaatggtctgaccctcctgagaccctgaagcaccttctcgtgttcagtaatcctagcattcctccccaagcagacccctcgcaggcctctgcattaggctctggctctggtgcttggcattgccctggggtcacttcccctgcatatgtgttggtatgtcatctccaggcctctttggctcaacaggctctgcatgtcctccaggctttttgtgttgccacagccctctgtattgatcactctcagacctgcagcctcagtgggctttttgcctgtgggagaacatatctctaggctctaagtcaagccagctgcctgcccagctgagctctctgcagctcttcccattccagctagtttgggctgtaggaatcaactgagaggtgtccctttcctgaagctacatgcggaaatcatttccttgtcttacacttggcagtccttgcatcactgttttctgcagtcctgatgtagtctgtttctagaattctcaagcatttttagaaaaatatttttatagaaaaatactcaggctaacctagtggatataatcttggagcttccagattacccacttaaagatcaaagtattatatgctgtgtgctttttagctgttagtgctatgaaagcaaaaatgctttctgcgttgtccttcctgatctactggacaccaacgagcatgtgcttaacgctgtggaagtaggctcaaaggtctccccttatatagcatgttaagtgtttgtacaggtttgctaaaaccctttctatataaataagtttattaggttttctgttacgtagggtctctagttccttcctcctctcaaaatctccctacgaagatggtgttccactgagcgagctcagcgcaagtaggagagagcagacagctttactggtcacatgtatgctttgatttagcacaatgtttcatagaaagtactgaccaggaaacacaggtgtcacatctctagaaagaaagtacgtagtatttcaattcccagtgtgtaccttctgtgttttttgtaagtaaaagtaagactctatactgatctcagtcacccattctggttttcaagtatgagctatataggctatgcgtgacgcttattaaatacttttgtaccatgagtaaacttggaggtctgttgcaagaaccatgaaaaaaaaaaaaaaaaaaaaaaaaaaaaaaaaaaaaaaaaaaaaaaaaaaaaaaaaaaaaaaaaaaaaaaaaaaaaaaaaaaaaaaaaaaaaaaaaaaaaaaaaaaaaaaaaaaaaaa

SEQ ID NO: 253 - DNA, 1478 bp, Homo sapiens
  misc_feature (2)..(2): n equals a,t,g, or c
  misc_feature (42)..(42): n equals a,t,g, or c
  misc_feature (46)..(46): n equals a,t,g, or c
  misc_feature (49)..(49): n equals a,t,g, or c
cnccggggaccgatccagcctccgggactctagcttagcccncggncgnataccaatttcacacaggaaccagctatgccactaggcttttgcaaaaagctatttaggtgacactatagaaggtacgcctgcaggtaccggtccggaattcccgggtcgacccacgcgtccgattagaaattagtgctagaggatttaattagccagctcacaggatgcagtccctttaatttaggatttccctttgagaaaattatggagttgaaaaggaatatgatatttcatacaagtttccatcttgggcccttatgttgtttgttctgctgatctggaaattgtacatgatttacattaaaactttttgtttttaatatcgattattgtagtgtggggtgttagattatgtgcaatagttctcagagttgggaaaggtaaaagggtttttttgggcaatgattaactcatctactttaccagggttacataatcaagtattagttactatacatttagctaatgcagtgggtttagttaagcaatgaatacattatcawgggagcattaacacttttgcatttttagacttgcctttaaaaaaattacagaaaaactcctcacaacccttgccaccctttcagccataacattacattgccttggtttctgcctttaatttccctgggggttctttttatttaggaaaagggtgaaagatgtatttgtgtaagtactacaccagtgcttctgttaaattctttttcaacaaagaatatgttacttgggtgccttgtacacagggcgcatatttttttggaaataatgtgccatgaaagcagtagtttttagtgtgcatgtttatttcatgtctgccagtttattttagcttagaaatttcctaatgctttgagtttataacagtctttcagtttataacagtctttcagttaactgagtgcatatacataatatgcacaaaatggccaacttttagaaattgtgtattttaaaatcccttttttttcagtckgatatcatgtgtctccttgttccctttaatatgcaactaaaatttamcctaagatatgaaaaatatgttaagaaagcttaatttcttaagcttaatttggaacgtcaatgaagaattaaacatttgctttctagaaaccttaatctttgttaatgtgaaattaacatagatgatttgaatatgtgttcatgtgtgaggactttgccccttcagtgtttctctactgagtctttttgacctactataagagctaagtgcaaataatgccacatcaatatggcgtagagaagagttctttcttccgcctgttggcagtgcattataagagcagttcttcaactttctggtatcactcttaataatggaagtgcccatagcgcttttgcttatgagaattatatctagtgatatttactatgtttgaaattaaaaaaaaaaaaaaagggcggcc

SEQ ID NO: 254 - DNA, 1790 bp, Homo sapiens
  misc_feature (639)..(639): n equals a,t,g, or c
  misc_feature (827)..(827): n equals a,t,g, or c
  misc_feature (852)..(852): n equals a,t,g, or c
  misc_feature (858)..(858): n equals a,t,g, or c
  misc_feature (886)..(886): n equals a,t,g, or c
ttggcggtaacaatgctctttatttgtggcgtttaaaggcggggttgggcgggacagcgcccttgcgtgtattaggcacaggttcggaacgcagcatctttccaggggcttccctactagctcagccccataaagtcactggtttcctccatctggaccagcagccgcaccagccaaggcgcccactgggtgtcggaggtgggcgatgtcaatccccgtggccttcgtcgggagggtggagctggccaaaaagagagcggtacagttctgtcctggcatcatcattcattgtagtatggtcaataggtgccatgaaactcagtagcttgctaaggacatgaaaccgaagtttcctgcctttgctggctttcctatctacttttttgtggattttgcttcgtaacttctggattgcaagccactgccttcccatggccacctgatcgttgggatccaaggagctggtcttccgttctatgagttctcgaaggagctggtggtaaaagtcatcatcatcaaagatttcttcatccaagtccttcagatgagcattagcaggggcttgaggaaggatctccggttcccctggcaaactctctgggacaggctgagctgctggctcaggtttgccaagaactngatagacggagcgcttggtctgtgtccttcgaagtaatctctctttgtccatcagaatatggtcgatctgagtcaagattgagcgttcaaaggcaccaaaacccttcccagttttcagaagccagttggtcttatcgtgccatttcttaagtgtccggttcctgtagactgaaaagtcggcaaagcgntttgccaatgaagttggaatagtcntccatntccagcttcctctttgcagggacctttnttggttgctgcttcttctcttctaccagctcatcatcttcactagaaatctcctcacttcccgcattgggctttgtcccatctactagatatctagtgtctgggtactggaaaagcaactcttcctgaagacctaccaatgacctcaacaatgctttaagtgccttgtgactatttttcagggcactggaaaattctgggccacctttgtccttgaacaatgggaaaacatctggttgaggaagctggttggtggtcaacagagctttttgtagtttgatccttccttccaagagctggtcccacagtgctatctggttcttcacggctcttcctttctccacttcctcagaaactttgacactagagaaggtcatcaccacaccatcatcctcactgtttctatctccagccctgtcttcctcactctcgccttgggagtcttccgcgtcatccccttcttccatgccactctcttcgtcttcctgtatggtgccagttgcttcttcatcaaagcaagcaaaggcatttctgatgacatcttcaggatctgtgccatttaacttctcaccaaacatggtgaggaacatggtgaaattgatggggcctggagcctcattcatcatggcatctagatactcatcagttggattcttccccaatgaagcaagcatatcatgcaaatcttccttgtcgatgaaaccatctctgttctgatcaatcatgttgaaggcctctttgaactcctgaatctgtgactggtcaaacatagcaaacacattggatgttgcacgctgagggcgcttcttggtcttggtctttgttcttttgctcgacatggtggtggttaagtcccggcacagctacgagaatccgagcacctctccgagcccctcggtcgacgc

SEQ ID NO: 255 - DNA, 1125 bp, Homo sapiens
cggcacgaggtgatgatggcctgttttggagtgtgtctgagactgggattgcatttggggtttcccgtgtgcttgggatgctagagggtcacctgcaggaggcctggggccggcgagaaatctcctgtgatgccctgtgaaatggcttgtctcctcccccatcagggcccaccgaaagctcaggggagcacagaagcccatggaagcccagggagatgtccctggggcagacactaaggcaggtgttgaagacaagctgcttgtcaagaagcatttcccggcaagagaggggcaagtcgggggctccaactgggtacagcctgggtgcagttataagcccctttggcttacttggtagaagatggctacttggatgtacctcacttaaagatgttttgtaccacactaggtctctgggcccttgtgcttcctgtgggtggggtgagggccaaaggctatggtttcctgcctccaggagaatggagagaaagggcttccaggcccctccaagcctggggaaggacgtggcatccaagctgagccagagggaactgctgctggcctcccttcatttctgtggaccttggaggctttggctttgtggcagggcctccccaggcagctctgggacctaggagtttgcttctgatagggtcagctttcccatttcccttcaatgcttgggaaccttctcccttagcttcacacttgccatttcaagccctgctgggaccttgtggcttggctggaatccaggactgtattttcatggagaagaacctgcagattcttccatcctcagctggccatggcccacagctctgcatctgcatctgagcttctcaggactcctggagcatggggggaatggggcggggccactgctctgtgctgacgggctccgtctcggagattcttgtcctgtttttttttctgttgtttttttttggctggtgctggggacaagcctgtgcctgccaaagctcccaggccaagtttgggggctggtgtttggggttgggtttggggttcaggatgctgcagtctgtgcaataataaacccgcatctgctcaaaaaaaaaaaaaaaaaaaaaaaaaaaaaaaaaaaaaaaaaaaaaaaaaaaa

SEQ ID NO: 256 - DNA, 1157 bp, Homo sapiens
cccccgggctgcaggaattcggcacgagaatgtggctcctgtgtgtggcgttggcggtcttggcatggggcttcctctgggtttgggactcctcagaacgaatgaagagtcgggagcagggaggacggctgggagccgaaagccggaccctgctggtcatagcgcaccctgatgatgaagccatgttttttgctcccacagtgctaggcttggcccgcctaaggcactgggtgtacctgctttgcttctctgcaggaaattactacaatcaaggagagactcgtaagaaagaacttttgcagagctgtgatgttttggggattccactctccagtgtaatgattattgacaacagggatttcccagatgacccaggcatgcagtgggacacagagcacgtggccagagtcctccttcagcacatagaagtgaatggcatcaatctggtggtgactttcgatgcagggggagtaagtggccacagcaatcacattgctctgtatgcagctgtgagggccctgcactcagaagggaagttacctaaagggtgctctgtgctcacgcttcagtctgtgaatgtgctgcgcaagtacatctcccttctggatctgcccttgtctctgcttcatacgcaggatgtcctcttcgtgctcaacagcaaagaagtggcacaggccaagaaagccatgtcctgccaccgcagccagctcctctggttccgccgcctctacattatcttctcccggtacatgagaatcaactcactgagcttcctctgaagccttgaagggttttcagatccaaggaacaaaggggaaaatagacaaaggagtgcagaggacctggcctggcactggcttatttacctgagctcaaggagatccccgctggagcagcctctgcaaaagggagcccatgtaggccaggggctgtccaaactccagcttcttcccctgggaaaaaacccaaagaaccaaaaacaaaccaccccaaggataataatagctacactgctagcttctcaagttcttgtgaaaaacaatttacataatgacacagtagatgtggaacacctagcccagtgcctgggcaggtccctattatcataaatgaacataaaagtgctctaaaaacaaaaaaaaaaaaaaaaaactcga

SEQ ID NO: 257 - DNA, 1552 bp, Homo sapiens
ggcacgagaaacagaaatgatactaatatcggtgattccttccttttttcctgtaataagtgctgtgcagacaacatatgagcagtgctgataaatgtaaatgtatttttcatagctcattaagaatcagtttcagaaagagatgtctgcttattttgctacttgaagaatccctgtcaaacagtccttttgaggaagtacaagaggctgtctctattgtgacctcaggaatggctgtgacagtgtcgtgagcagtccttttcctgtggcacagatctgaactttgtgttgcagaaaaatcttggcttcaagtgagccaagatgccccctgagcatcagcatcacaacttcatcctcctatcttgaagttcatgttatagtgactttaatgaaatcatagaacactgtttcttcgtgaacaatgacgagggagaggaaaaaactttattgaaaaataaaaaggcaggtaatttagatgaaaatatgttacccatgaggttttgtttttgctttttgtttttgtttttgagaaacagaatctcgctctgtcgtccaggctggagtgcatcggcatgatcttggctcactgcaacctccgcctcccgggttcaagcgattctcctcagcttcccaagtgttggtactacaggcatgcgccaccacaaccagctaatttttgtatttttagtagagatggggtttcactatacgttggccaggctggtctcaaactcctgacctaaggtgatccttctgccttgggctcccaaagtgctgggattacaggcatgagccaccttgcctggccctacccatgagccttgactaaaacattcttctatctgtagaaaagcccaaaagaacttttccagattcaaaaaacttggcactttgtaatggtaatgtttacattaagtaaaaaaaaaaaaaaaaaacctggcgagaagggaacggagttttcatcaggtagattggtttttgtgcggccgtcctccaccgtttcctccaggacagcacctagtcgtggccggaggagtctcagagctgtcagaaagaataagactgattttatgggaaaattaagcagatgctccagtttgagaaacctggatctgcgatctgtttgtggtaccagcatcaagatgatttatggtaataagatataaaaccaaggaaaataacctaaagtctgaaaaagaccagaatcgaagtttcctgattcatattttaatgttttgaaatttatactccaggctgggtgcagtggcttgtgcctgtaatcccagcactttgggaggccgaggcggccggattgcctgaagtcagaagttcgagaccagcctgaccaacatggtgaaaccctgtctctacttaaaaatacaaaagagctgggcatggaggtggtgcgcgcctgtaaccctagctactcgggaggctgaggcctaagattcttgaacccaggaggcagaggttgtagtgagccgggatcacgccactgcatctagcctgggcgacagagagagagactgtctaaaaaaaaaaaaaaaagaaa

SEQ ID NO: 258 - DNA, 897 bp, Homo sapiens
ggcacgagggacaatgaagagtatgaaattgaagtttttctccattgaaaacattcagggaggactttgattaaaactttttgtaaaaagtttcagtagtgttgacttgaggatgatacaaagctgtatactatgttagttagatccttgcttctcaggtctgggaaacatcttcatacatcttccatgcacaggtgtactcatgtgcgtgtttgtatatgagcttatgcttctctctctggtgtttcttcctcattggtctttaccttctcttccttacttttcctttgcccttcatagcaatactgttaagccagatatttacttcttatgtggatcaaatagtcttatatttcctgtggacaagagatatgttttctactcatttatttctctaattgtgaataggaaacagctagaaaattggaataccttcagcttatgtggctgttgattgactttgtgattcagtgggccttgatatattagaaaaaagtcttttcttttctcttaaaattagtataaaggaacgcatgaactcagtatatgaccttagagacagaaagaaaaaaaaattatgtaacagccctttgagagtgaggaaacattggcactgaaggtaaaagcaacttgtctggagccatataacaagtggcagagccaatagtagaactccagccttctggagagttcttgctcccagatcttgctctctacatgagatgtggactatgtgtctcttcaggttgtcacctggttctttcaagttgctgagttcttccttggggaagtgcagaagggaattaatagagaggatccatttcgtagtctctgccactttttgtgcttatctccctctcatttcagtgtgtcttatttggcaaaaaaaaaaaaaaa

SEQ ID NO: 259 - DNA, 1767 bp, Homo sapiens
cggcacgagcgcggtcgcgtcataggccgaacaaccaaacagaaaagtttaataaacagcggacggaggggccggcggtggcggagcggagcaagcaggggttcggcggcattacctgtacccattcaccggcggctaccggcggcggcgcgcagctgtcaggcggagagacccgccgccaggaatgaatctgaagtctgctgcagtaaaacacagaaggctttaaaatgttttcttgcataaaattcaaaacttttaagtagctgcttatgagaatagggaaggcagaaagctaatgtctgtctcaagatacaggacagctgtttgctcatcaacctcaactgtgtgtgcaactgaggaacatggctcaagaaactaatcacagccaagtgcctatgctttgttccactggctgtggattttatggaaaccctcgtacaaatggcatgtgttcagtatgctataaagaacatcttcaaagacagaatagtagtaatggtagaataagcccacctgcaacctctgtcagtagtctgtctgaatctttaccagttcaatgcacagatggcagtgtgccagaagcccagtcagcattagactctacatcttcatctatgcagcccagccctgtatcaaatcagtcacttttatcagaatctgtagcatcttctcaattggacagtacatctgtggacaaagcagtacctgaaacagaagatgtgcaggcttcagtatcagacacagcacagcagccatctgaagagcaaagcaagtctcttgaaaaaccgaaacaaaaaaagaatcgctgtttcatgtgcaggaagaaagtgggacttactgggtttgaatgccggtgtggaaatgtttactgtggtgtacaccgttactcagatgtacacaattgctcttacaattacaaagccgatgctgctgagaaaatcagaaaagaaaatccagtagttgttggtgaaaagatccaaaagatttgaactcctgctggaatacaaaattcttgagcatctgcaaactaaaaattgacttgaggttttttttttcctagtcattgggaatgtagagcagtgtatcttgcatgtcatcggaagaatagatttttgttttggttttgttttgaaaatgactctgaacatttatttccattgcaatttctgtggctgaggagacttaaactttacaagtattatccttttaagatcattttaattttagttgagtgcagagggcttttataacaaacgtgcagaaattttggagggctgtgatttttccagtattaaacatgcatgcattaatcttgcagtttattttctcattgtgtatgtatatatcgcttttctctgcagcacgatttctcttttgataatgccctttagggcacaactagttatcagtaactgaatgtatcttaatcattatggctgcttctgttttttcattaacaaaggttattcatatgttagcatatagtttctttgcacccactatttatgtctgaatcatttgtcacaagagagtgtgtgctgatgagattgtaagtttgtgtgtttaaacttttttttgagcgagggaagaaaaagctgtatgcatttcattgctgtctacaggtttctttcagattatgttcatgggtttgtgtgtatacaatatgaagaatgatctgaagtaattgtgctgtatttatgtttattcaccagtctttgattaaataaaaaggaaaaccagaaaaaaaaaaaaaaaaaaaaaaaaaaa

SEQ ID NO: 260 - DNA, 1129 bp, Homo sapiens
ggcacgagcctaaatatacgcacacctgaggttgtctttataggagctttatggttgcaagttttgtgtataatctttaatcattttgagttgattattgtgtatctagtaccataagagtcctgtattattcttttgcatatggatatctagttttggaaatcttccccgttgtgtcattttggtggtgttttgaaaaatgtgttcattccatataaatttttgtttattatcgagcacattcattttgctcactggtctgtgtttctctgtgtacgccagtaacatatgggtttgttaactacagattttcatttaattagaactcagggaatgtgacacatcccatatggtttgtatttctcagaataactttggaaattcagggtgtttcacatttccacataaattttggcattgttctttatatttcttaaaacactatttgtcatatactaaatgtatacaattaaaaggtacaaggaagattttgatacgtgtatatgttgagtaatgataaaatcaggttatttagcatctcttcatctcatatagttattatttttgagtggtaacaacattcagaatctttccttctagttactttgaaacatatggtacatttgtgttaaggctagtcaccctgctgtggaatagaaggccagaattgatcagtctcatctgagagtaactttgtacccatcactgattccttctgagactgcctccacttccccagcagcctctggtttcttcatgtggctgcagatggcaggatttcccaaaggtttctggctgaaacatattccgtggtgtatctgtacagcagtttcctcatccctgcagctgtgtttgaacaggttcaacagtatggctccaaaggatgaaatttcattctgattttctggctgaagactattctctttgtgtatgtccaccacagttactttatcccttcatctgtggatgggcagtctcgctgtattgcccaggctggagtgcagtggcatgatctcagctcactgcaagctctgcttcctgggttcacgccattctcctgcctcagcctcctgagtagctgggattacaggcacccgccaccacgcccaggaaaaaaaaaaaaaaaaaa

SEQ ID NO: 261 - DNA, 1284 bp, Homo sapiens
ggcacgagactcgtgccgaattcggcacgagcaacagcaaaagcctagtgcattgggagatgtgcaacctccctgaaaatcttttctgtttctggagtacttcaggggtggcctctggccccagagcctttgccacagtgctcccaccagcccccacctcatccgtctgtttgcagagcctcatctacaggtccccacgctgccttctttactcactctgcgcttggccgttttgttatttggcttagtctacattgggcggaagtctgtgtgcacagagtgggtgttccttcgagccccttccactcagagggccacacccagcgatgccagtgaaggtggcacagcctctcttcagtttctcctgactgtgatctcactggggtagaattcccctgagagaatccctcactcacggctccctttgccagagtcagttcaatcaggtctgatgtgagcaatttacacacttgtctcagaaagtccctcagggtttgtagaggactgcaggggggcatccgctgcagactcagcctttctctgcagccatcctgcagtgggggtgagcgggcacaggctgagaactgctcttgggtggtggaagcaggtgtcacggtgcaagtctccccctgcacccctcccccagcttgagccgtgtcacccccctctccctccagcatgggcctgtgtctcaggctctctggaaggtggccctgccccggaccctcttgcaggtgtcctggtttgacttggaactagatggccatctttccaggctttggtggcccaagagcagtctgggtggatggaagtggctgtcccctcctctccagcccctgcccacccactggtggaggtgctaactagcagggacgtggcataggatgggagctgggcgtgaggtgcttggggtccattctttgtccctcagcttctcagagtccggccagcccttgtgttcccgtgccccacactttcctcctccccactgcagtgagtcaatagtccagggtggggcctggcctccctgccctgattggggactcaggaggtgaggcctgcggggcttcctgccccctccttgcccacctgcctgcccccgggcagcacgggagggagagcagggtgagcacgcttgttggtttcagatgcactttctgcttgccattgmccgtatctgtgcgttccttcatcctggtcctggctttatggaacaccatgtttttagcatgtttttaaataaaaacggataaagtgtcaaaaaaaaaaaaaaaaaaaaaaaaa

SEQ ID NO: 262 - DNA, 1911 bp, Homo sapiens
ggcacgagcggcacgagcggatcctcacacgactgtgatccgattctttccagcggcttctgcaaccaagcgggtcttacccccggtcctccgcgtctccagtcctcgcacctggaaccccaacgtccccgagagtccccgaatccccgctcccaggctacctaagaggatgagcggtgctccgacggccggggcagccctgatgctctgcgccgccaccgccgtgctactgagcgctcagggcggacccgtgcagtccaagtcgccgcgctttgcgtcctgggacgagatgaatgtcctggcgcacggactcctgcagctcggccaggggctgcgcgaacacgcggaggcacccgcagtcagctgagcgcgctggagcggcgcctgagcgcgtgcgggtccgctgtcaggaaccgaggggtccaccgacctcccgttagcccctgagagccgggtggaccctgaggtccttcacagcctgcagacacaactcaaggctcagaacagcaggatccatcaactcttccacaaggtggcccagcagcagcggcacctggagaagcagcacctgcgaattcagcatctgcaaagccagtttggcctcctggaccacaagcacctagaccatgaggtggccaagcctgcccgaagaaagaggctgcccgagatggcccagccagttgacccggctcacaatgtcagccgcctgcaccggctgcccagggattgccaggagctgttccaggttggggagaggcagagtggactatttgaaatccagcctcaggggtctccgccatttttggtgaactgcaagatgacctcagatggaggctggacagtaattcagaggcgccacgatggctcagtggacttcaaccggccctgggaagcctacaaggcggggtttggggatccccacggcgagttctggctgggtctggagaaggtgcatagcatcatgggggaccgcaacagccgcctggccgtgcagctgcgggactgggatggcaacgccgagttgctgcagttctccgtgcacctgggtggcgaggacacggcctatagcctgcagctcactgcacccgtggccggccagctgggcgccaccaccgtcccacccagcggcctctccgtacccttctccacttgggaccaggatcacgacctccgcagggacaagaactgcgccaagagcctctctggaggctggtggtttggcacctgcagccattccaacctcaacggccagtacttccgctccatcccacagcagcggcagaagcttaagaagggaatcttctggaagacctggcggggccgctactacccgctgcaggccaccaccatgttgatccagcccatggcagcagaggcagcctcctagcgtcctggctgggcctggtcccaggcccacgaaagacggtgactcttggctctgcccgaggatgtggccgttccctgcctgggcaggggctccaaggaggggccatctggaaacttgtggacagagaagaagaccacgactggagaagccccctttctgagtgcaggggggctgcatgcgttgcctcctgagatcgaggctgcaggatatgctcagactctagaggcgtggaccaaggggcatggagcttcactccttgctggccagggagttggggactcagagggaccacttggggccagccagactggcctcaatggcggactcagtcacattgactgacggggaccagggcttgtgtgggtcgagagcgccctcatggtgctggtgctgttgtgtgtaggtcccctggggacacaagcaggcgccaatggtatctgggcggagctcacagagttcttggaataaaagcaacctcagaacacttaaaaaaaaaaaaaaaaaaaaaaaaaaaaaaaaaaaaa

SEQ ID NO: 263 - DNA, 833 bp, Homo sapiens
  misc_feature (793)..(793): n equals a,t,g, or c
  misc_feature (798)..(798): n equals a,t,g, or c
gggcctgcagggaattgggcagagcagccatcaggtaggctgcgttgaggatctttgctcttccatccgcctttgatcgtcttcctcttcagccatcaggtaagccaagatgggtgcatacaagtacatccaggagctatggagaaagaagcagtctgatgtcatgcgctttcttctgagggtccgctgctggcagtaccgccagctctctgctctccacagggctccccgccccacccggcctgataaagcgcgccgactgggctacaaggccaagcaaggttacgttatatataggattcgtgttcgccgtggtggccgaaaacgcccagttcctaagggtgcaacttacggcaagcctgtccatcatggtgttaaccagctaaagtttgctcgaagccttcagtccgttgcagaggagcgagctggacgccactgtggggctctgagagtcctgaattcttactgggttggtgaagattccacatacaaattttttgaggttatcctcattgatccattccataaagctatcagaagaaatcctgacacccagtggatcaccaaaccagtccacaagcacagggagatgcgtgggctgacatctgcaggccgaaagagccgtggccttggaaagggccacaagttccaccacactattggtggctctcgccgggcagcttggagaaggcgcaatactctccagctccaccgttaccgctaatataagtaaagtttgtaaaattcatacttaataaacaatttaggacagtcaaaaaaaaaaaaaaaaaanctcgnggggggggcccggtmcccatttscccccaaaaggg

SEQ ID NO: 264 - DNA, 2927 bp, Homo sapiens
gctttttcataatctttccagagtcatcttagtgggatttggggaagcaacagggctgtgtggggtaacctgccacctttaagtggaarkcagaaatggagcaagagccacaaaatggagaacctgctgaaattaagatcatcagagaagcatataagaaggcctttttatttgttaacaaaggtctgaatacagatgaattaggtcagaaggaagaagcaaagaactactataagcaaggaataggacacctgctcagagggatcagcatttcatcaaaagagtctgaacacacaggtcctgggtgggaatctgctagacagatgcaacagaaaatgaaagaaactctacagaatgtacgcaccaggctggaaattctagagaagggtcttgccacttctctgcagaatgatcttcaggaggtgcccaagttatatccagaatttccacctaaagacatgtgtgaaaaattaccagagcctcagtcttttagttcagctcctcagcatgctgaagtaaatggaaacacctcaactccaagtgcaggggcagttgctgcacctgcttctctgtctttaccatcacaaagttgtccagcagaagctcctcctgcttatactcctcaagctgctgaaggtcactacactgtatcctatggaacagattctggggagttttcatcagttggagaggagttttataggaatcattctcagccaccgcctcttgagaccttagggctggatgcagatgaattgattttgataccaaatggagtacagattttttttgtaaatcctgcaggggaggttagtgcaccttcgtatcctgggtaccttcgaattgtgaggtttttggataattctctcgatacggttctaaaccgtcctcccgggtttcttcaggtttgtgactggttatatcctctagttcctgatagatctccggttctgaaatgtactgcgggagcctacatgtttcctgatacaatgctacaagcagcaggatgctttgtgggggtcgtcctgtcctctgagttaccagaggatgatagagagctctttgaggatctgttaaggcaaatgtctgaccttcggctccaggccaactggaacagagcagaagaagaaaatgaattccaaatccctggaagaactagaccctcctctgaccaactaaaagaagcctctggcactgatgtgaaacagttggaccaaggcaataaggatgtacgtcataaaggaaaacgtggaaaaagggctaaagatacttcaagtgaagaagttaacctgagtcacattgtaccatgtgagccagttccagaagaaaagccaaaagaattacctgaatggagtgaaaaagtggctcacaacattttgtcaggtgcttcctgggtgagttggggtttagtcaaaggtgctgagattactggtaaggcaatccagaaaggtgcttctaaactccgagagcggattcaaccagaagaaaaacccgtggaagttagtccagctgtcaccaagggactttatatagcgaagcaagctacaggaggagcagcaaaagtcagtcagttcctggttgatggagtttgcactgtagcaaattgcgttggaaaagaactagctccacatgtcaagaagcatggaagcaaacttgttccagaatctcttaaaaaagacaaagatgggaaatctcctctggatggtgctatggttgtagcagcaagtagtgttcaaggattttcaactgtctggcaaggattggaatgtgcagctaaatgcatcgttaacaatgtttcagcagaaactgtacaaactgtcagatacaaatacggatataatgcaggagaagctacccaccatgcggtggattctgcggtcaatgttggcgtaactgcctacaatattaacaacattggtatcaaagcaatggtgaagaaaactgcaacacaaacaggacacactctccttgaggactatcagatagttgataattctcagagggaaaatcaagaaggagcagcaaatgtcaacgtgagaggggagaaggatgagcagacgaaggaagtaaaggaggcaaagaagaaagataaatgatgaagtgctgggaatcacttataccaaagccttatgaaatggatgaaattttgttaaataggcaaatgtggaattcctcacagattaaccagtattttttaaatgtattcattcctacaaattaactttcataaattttatggcatgtcttctatttaaaaggaaaagaataagtattcttgcatctggccttagaaatgtgaagttatattctcaagtttatttttttccaagtgtagctaaaatatttttgcaggtaaaataaagctgatagtacatgtgttgttcaaaccttgttaaacctaatattgaactatttttatatctgctgtctttcagaaggcaaataggaaactatatatttgcttaaaaattggcatttagtaaccttaattctttttatagaaggaatgacttaaagtattgtcccctctttttgcactaattgtggatttttttagatgcttctcaaaattttcagtgtgtaagctaaacaaaaactaaaactaagaattctcaaaaaaacttgttcaaaacagggaaagactgatgaaaagtaaaatggactacttttgtaacttacctgtttgttaggaaatggaatggtctctttgatttaaaatgaataaaaatagattattacgtcttttgtattgagactgtattgttatgagcctaggaaatttgggaacatgattgtattgtattaaaattcgaagtgattattatcagcttaattggattaaaaaagtacttcaagaaattaaaaaaaaaaaaaaaaaaaaaaaaaaaaaaaaaaaaaaaaaaaaaaaaaaaaaaaagggggggggc

SEQ ID NO: 265 - DNA, 1249 bp, Homo sapiens
  misc_feature (1138)..(1138): n equals a,t,g, or c
  misc_feature (1196)..(1196): n equals a,t,g, or c
  misc_feature (1202)..(1202): n equals a,t,g, or c
  misc_feature (1225)..(1225): n equals a,t,g, or c
acgtcccgcgcgtcggcggccgcggagcagcgcagggagccaggcgggctgccggcgggtgtgaagaaaaaaatgacactccaatgggctgcagtggcaacctttctttatgccgaaataggactcattttaatcttctgcctaccttttattcctcctcagagatggcagaagattttttcatttaatgtctggggtaaaattgcaactttttggaacaaggctttccttaccattatcatcctattgattgttctatttctagatgctgtgagagaagtaaggaaatattcctcagttcataccattgagaagagctccaccagcagacctgatgcctatgaacacacacagatgaaactttttaggtctcaaagaaatctttacatttctggattttccctatttttttggctagttttgagacgtctggttacgcttattactcaactggcaaaagaactgtcaaacaaaggtgtacttaaaactcaagcagaaaatactaacaaggctgccaaaaaatttatggaagaaaacgaaaaactaaaaaggattttgaaaagccatggtaaagatgaagaatgtgttttggaagcagaaaataaaaaactagtagaagaccaggagaaactgaaaactgaattaaggaagacttcagatgccctttctaaggcacaaaatgatgtgatggaaatgaagatgcagtcagagagactttcgaaagaatatgatcaactcctgaaagaacactctgaacttcaggatcgtttagaaagaggcaacaagaaaagactgtgaactttataaaagacacttgcaatatactgtgtcaaaatgataattttgttatgttagcctctagaaaatttaagttcagaaaaatgcactatgaccggttcgtaatttttttaatgccacacataggttgtattgtaatggcattatcaaaatatttgatgatgtttcagatatattgcaaagtctgtattccagctcttaagaaaaatataagcatgttaaataccatatttacatattgataatgtcattggtatatggtggctgtttaccaataaaaggaaaaaattcattaaccggttgcttccaaaattaggaagwtytamgttgcatgaaaccnttaataggccttggaaagctttggattaaggttttccaggtaattaataacccctttnaattcnggatggatggtgtgtttggaaanaggtgttccatttccggccaattt

SEQ ID NO: 266 - DNA, 1129 bp, Homo sapiens
  misc_feature (564)..(564): n equals a,t,g, or c
gggtcgacccacgcgtccgcaaaggttcatgctattcgatagatgctttcaaaatgatgagtgggaaatgtaactttgtcatcttgcagagcctacaatgcaaacattttttccgccccatgtacagtttcatttacatagtgttgtcaaggaataagtgatttgtttcacttaagtgatttttccaggtaattgaagcttacctctttgtgcacacattattctttgcttaaactttctttgatgaaaacatggcacakggttctttcctttttttttgcttggtacatataaatgtggctacatcttttcttgacttggggttatcatgataaagattgctttgttctgtgccgtaatcctgttattgacagctgaattgtgtgggattgagagcctgtatgtgaatagtcacagatccatattcttttagagttaccattattactaataatatagcycctctgagtcattagcaaatcccaggcaggatgctaagaattcatatacattataatcttggctaaaccatccaccccactccaagaaatgatcattattatncctcctactttacaggtaaaaattgaagtttaagggataagtagtaagtggtagagttgagatttgcatccatgtctctctaactgcaagatgcctgttgccagttatacttcttctatttctcctctctgcccctctttgggtatttctgtctgtccggttgctttaaaagcctttgcccaggtaagggcccgagattaggtctgtgcctattttgtggaaattattggtatgtttttcgttaagtggagttctgaaggcatttttgctgatttctgggttcccagacatctgcacggttgccgtttctagaagtctaacctgtgaattcatcactgtgtatgctaaggctttgggagggattataggattttctgcattatgattaagcagcataatcaagaaacttgcagtcagaggaaagcgtggcaattctgtaatgcagaagttggcagaycttttctgtggagggccagatactaaacgtcttagttcattttgtgttgctataaaggtatacctgaggctgggtaatttattaaaaaaaaaaaaaaagggcggccgc

SEQ ID NO: 267 - DNA, 2587 bp, Homo sapiens
  misc_feature (1765)..(1765): n equals a,t,g, or c
  misc_feature (1821)..(1821): n equals a,t,g, or c
ggtctttgccctctcaagttgctcttgaatgttgattcaactcattaggacatacttggatgatgaattagaaggagcatctttgccctctacttacagatcctaggaacaatttgtggaattatcagtaagcaatatctgtaacagataaaatgtctgctttccctttgcccctcttagcctatgacatgccacatccaatttgtcttcgttccaactgtgagaggtcttaatttcatcattctggccttttgcagttaaatattctccaagggatatgatctatggggagaggactgatagtggaactaatctttcaaggttctgcttaagcaattgtagataacataggagaagaaactctggaaacaattatgattatcctagttctgcccctgtggaaattcaatccgaaacccttcatgtttttgcttctctcttctctacatggatggaatatgttatacttttttgagctgaaaaatctaaataattagaaaaagacaaagttgtaatgagttttctgtttaaacttataggaccctttctaataaaagtgttattttaatcattgaatcgttagttaactgctttgtatggttatgtcttgtctctctttaatccagggactgcaagcaactaggcaaaaaactaacaaaaaaaccaatgttttataagagtggttctcaaactttaaagtgctgattaaagcacagattgcccaggcctcaccctcagtagatgggtatggggcccaagaactttcaacaggagatgctgctgstgcagcttgtctaagaactacacttggaaaattactaatttgtgtaataaatacctgaccatttggaatccttagaggatggaaatattttgtaatgctgtgtgcaagatttgatatagaaaaacttgggttcaagtggcaattcagcagattacaagaggtgaaacaactgagtttctgagactcagttttattatctgaaagtcaggaatgaaaataatgcctatgtggcagaactgctataaagatcagacaaggtcgtgtatgggaaaggccttggtaaatggaaaagcacaatctaagtgtaacttattctagatgtgctttcaataggcaagttttatatacctaagactaaaagcttgcattttaatccctgggattgaaatctttcaccatcatccccatgatggtaataacaacaataacaatactagtgcactatttattgtattttctgcaatgggcacttaatatgttttgattatatatttcaaaaacctcataaaatctattttatcatgtatattatttgcttacctaagagtgtactggacagaatttaaatttttcttgagggcttagggcagtgcagttcttagggtgtgtgatgtctctgtctatatagatgatttgatttaaaaatgtgttatatgtgatacatttataacggaatattttttgctaaaaagaaatgagctaccaagctataaaaagatatagaggaaccttggatgcmtttttcyaagttaaagaagccaatctgaaaaggctataaaactgtatgatttccaccatatgacactctggaaaaggcaaaactatggagatattaaaaagatcagtgkttktcaggggttaaaggggaggaagggataaatagscagagcacagatgtttaggscagtgaattattctgtatgattcatattggtggatccatggtcattatacatttgtcaaaactcatagagtgtgcancatcaagagtgaactctaatgtaaactatggactatgggtgataatgatgtgtcancataggtacattaattataacaaatataccactctggtgcccagtgttaatactgggggaactgatgtgtgtagaggacaatggtatatgggaactttctgtaattttgggaactgaaaactgctcttaaaagaataaagtgtattaaaaaggatcacaccaaaaaatgaattgcaaaattcatgacctcatgtgaaagatagtgactgtggtagatagaataatggcccctaaagatgaccacatcctagtccttggaacctgtgaatctgctactttacttggtaaaaggggctctacagatatgattaagttaaggattttgagatgggaaggtcatcctggattrtctragtgggtgcagtgtaatcacagggtcctttaaagatggaggcagactgtcagaggaattggcacaaaagcagaggtcacacacacacacggggggatagagagagagagagagagaggaagatgttacactgctggctttaaagatggaggaagtggctattaagtcaagcaaggcatgcaacctcaaaagctccaaaaaacaaggaaatgaccttcagaaggaattcaaccttatattccttgctgacccattttagacttttgactatctgaactttaagttaataaagtgctgttgttttaagccaataaattggtggttatttgttacatcagcaataggaaactgggataatgatttttcaatgaaaatttagacaagattagaaaaaaaaaaaaaaaaaaactcgag

SEQ ID NO: 268 - DNA, 3097 bp, Homo sapiens
ccagcttgctcgcactcggctgtgcggcggggcaggcatgggagccgcgcgctctctcccggcgcccacacctgtctgagcggcgcagcgagccgcggcccgggcgggctgctcggcgcggaacagtgctcggcatggcagggattccagggctcctcttccttctcttctttctgctctgtgctgttgggcaagtgagcccttacagtgccccctggaaacccacttggcctgcataccgcctccctgtcgtcttgccccagtctaccctcaatttagccaagccagactttggagccgaagccaaattagaagtatcttcttcatgtggaccccagtgtcataagggaactccactgcccacttacgaagaggccaagcaatatctgtcttatgaaacttgctctaccagcaatgcgatgcccagccaggggccagcgggtctggggtctatgtgaggatgtggaagagacagcagcagaagtgggagcgaaaaattattggcattttttcagggcaccagtgggtggacatgaatggttccccacaggatttcaacgtggctgtcagaatcactcctctcaaatatgcccagatttgctattggattaaaggaaactacctggattgtagggaggggtgacacagtgttccctcctggcagcaattaagggtcttcatgttcttattttaggagaggccaaattgttttttgtcattggcgtgcacacgtgtgtgtgtgtgtgtgtgtgtgtgtaaggtgtcttataatcttttacctatttcttacaattgcaagatgactggctttactatttgaaaactggtttgtgtatcatatcatatatcatttaagcagtttgaaggcatacttttgcatagaaataaaaaaaatactgatttggggcaatgaggaatatttgacaattaagttaatcttcacgtttttgcaaactttgatttttatttcatctgaacttgtttcaaagatttatattaaatatttggcatacaagagatatgaattcttatatgtgtgcatgtgtgttttcttctgagattcatcttggtggtgggtttttttgtttttttaattcagtgcctgatctttaatgcttccataaggcagtgttcccatttaggaactttgacagcatttgttaggcagaatattttggatttggaggcatttgcatggtagtctttgaacagtaaaatgatgtgttgactatactgatacacatataaaactataccttatagtaaaccagtatcccaagctgcttttagttccaaaaatagtttcttttccaaaggttgttgctctactttgtaggaagtctttgcatatggccctcccaactttaaagtcataccagagtggccaagagtgtttatcccaacccttccatttaacaggatttcactcacatttctggaactagctatttttcagaagacaataatcagggcttaattagaacaggctgtatttcctcccagcaaacagttgtggccacactaaaaacaatcatagcattttacccctggattatagcacatctcatgttttatcatttggatggagtaatttaaaatgaattaaattccagagaacaatggaagcattgcctgtcagatgtcacaacagaataaccacttgtttggagcctggcacagtcctccagcctgatcaaaaattattctgcatagttttcagtgtgctttctgggagctatgtacttcttcaatttggaaacttttctctctcatttatagtgaaaatacttggaagttactttaagaaaaccagtgtggcctttttccctctagctttaaaagggccgcttttgctggaatgctctaggttatagataaacaattaggtataatagcaaaaatgaaaattggaagaatgcaaaatggatcagaatcatgccttccaataaaggcctttacacatgttttatcaatatgattatcaaatcacagcatatacagaaaatacttggacttattgtatgtttttattttatggctctcggcctaagcacttttttctaaatgtatcggagaaaaaatcaaatggactacaagcacgtgtttgctgtgcttgcaccccaggtaaacctgcattgtagcaatttgtaaggatattcagatggagcactgtcacttagacattctctgggggattttctgcttgtctttcttgagctttttggaaggataattctgataaggcactcaagaaacgtacaaccacagtgctttcttcaaatcatatgagaaatactatgcatagcaaggagatgcagagccgccaggaaaattctgagttccagcacaattttctttggaatctaacaggaatctagcctgaggaagaagggaggtctccatttctatgtctggtatttgggggttttgtttgtttttgctttagcttggtgaaaaaaagttcactgaacaccaagaccagaatggatttttttaaaaaaatagatgttccttttgtgaagcaccttgattccttgattttgattttttgcaaagttagacaatggcacaaagtcaaaatgaaatcaatgtttagttcacaagtagatgtaatttactaaagaatgatacacccatatgctatatacagcttaactcacagaactgtaaaagaaaattataaaataattcaacatgtccatctttttagtgataataaaagaaagcatggtattaaactatcatagaagtagacagaaaaagaaaaaaggactcatggcattattaatataattagtgctttacatgtgttagttatacatattagaagcatatttgcctagtaaggctagtagaaccacatttcccaaagtgtgctccttaaacactcatgccttatgattttctaccaaaagtaaaaagggttgtattaagtcagaggaagatgcctctccattttccctctctttatcagaggttcacatgcctgtctgcacattaaaagctctgggaagacctgttgtaaagggacaagttgaggttgtaaaatctgcatttaaataaacatctttgatcacaaaaaaaaaaaaaaaaaaaa

SEQ ID NO: 269 - DNA, 835 bp, Homo sapiens
ccaccagggacgaccgctactgaggaactagtggaycccccgggrctkgmagggaatycggcagaggtttattgagaggttttagcatgaaggctgttgaatatagttgaaggccttttctgcatctattgagataaacgtggtttttgtcattggttctgcttgtgtgatggattacgtttattgatttgcatatgtttaaccagccttgcatccctgggatgaaactgacttgatcgtggtggataagctttttgatgtgctgctggattcggtttgccagtattttattgaggattttcacaccaatgttcatcagggatattggcctgaaattttgtttttttgttgtgtctctgccaagttttgttatcaggatgatgctggcctcatgagttaaggaggattccctctttttctatcgtttggaatagtttcagaaggaatggtacaatctcctctttgtacctctggtggaattcagctgtgaatctgtctggtcctggactttttttggttggtaagctattaattgctgcctcaatttcagaacttgttactggtctattcagggattcaacttcttcctgctttagtcttgggtgtatgtgtccaggaacttatccatttattctggattttctagtttatttgcatagaggtgtttatggcattctctgatgatagtttgtatttctgtgggatcagtggtggtatcccctttatcattttttttattgcacctatttgattcttctttcttttcttctgtattagtctggctagtggtctattttgttgatcttttccaaaaaaaaaaaaaaaaaaactcgag

SEQ ID NO: 270 - DNA, 879 bp, Homo sapiens
ggcacgagaaactacaaattttaaatagtatatttccagggataggttgtcctgttcctcgaattccagctgaggccaatcctttagcagatcatgtctctgctactcgaatcttgtgtggagcccttgtctttcctactattgctacaatagttggtaaattgatgttcagtagtgttaactctaatttacaaaggacaatcttgggtggaattgcgtttgttgccataaaaggagcatttaaagtttacttcaaacagcagcaatatttacgacaggcacaccgcaaaattctgaattatccagaacaagaagaagcataaaactgacttctggttgttctgcagttctctcatccttatgaatctgttgtgttgttttgattccatcattaatgcacttgtggagacttgtgataagctgctgctcctatattttttaagaaatataataaagcacttagggcaggggaaatcatctcggtaatcatggaacctaaggatgtgatttgttttcattgtttgtatgtactacttttatggcagtcatatgaaccattatcttagcatggtaaacctgggttttgttcatattttctccagacagaaatgcaaagatcaaactgtgcaaatattaaaaaaatgcacatgctgttttattcaaatgcctcttttgtacatgttcatgtttagtgttttctcagaatcagcaactcaaggtactatgaggatttttctcactgacataatttgattacatactaaataagaggatatgttaatatgaggaaatgtaaattaaattagttataaataaataaccaaaaatgtatgtaaacattcaaatgattatctgaaaaaaaaaaaaaaaaaaaaaaaa

SEQ ID NO: 271 - DNA, 919 bp, Homo sapiens
ggcacagagaaaagctagccactggtattttgttttgtttaaaaaaaaaaagaaagaaagaaagaaagaaaaacggaaaggaacctagctgcctgtatctttcatttttaaaatagcacttgagttattttctgagtaatccaataaagaacttttgatgacagccagaatgtgttagaactctggctgaacatttcatctcctgtgagtcagaagggctttatttctccctttgatggggccccttcttctttctggtgctctggaarttgtttagrggaaagaattctaattttaattaattgcgcrtgagttaatctcactcgcttttctgcttccaggcatcttaggaaaaacmaatggttttagtaggcatcccttatctactaatgcttttttaaaacaaacagggacatttttattatagatttgatttttttaatgaatgtttttaaaaatatataaataggacaccaaagcggcagggttttttttggggggagggggtttgtttyccaactcaagatggcacattagtggccagcaatattttttaactcattccaaccaggaagcttttttatacattgcctaaatctacgccaaccagaaaatagtctcatctctttttttctcaaatgagatccgtgttttattttagcattaaattagttacactgtgatgactggcctattacctgactcagctccctctaccttgaaattgacatttttaaaaaatgcaactaagtggttaatagtgtgtgacgctcaaagttaatgtaaactggaaaggttgtgtgtcgttgctttttgtgttttggttaggcttggttttgttttttaatttttatactttctaataaatttgcagtttcattctttcaaaaaaaaaaaaaaaaaaaaaaaaaaactcgag

SEQ ID NO: 272 - DNA, 575 bp, Homo sapiens
ggcacgaggcttttttagctcaagagtttgttattaccccccttctgaagcttacttccatcaattcctcaaactcattctgtgtccatttttgtgcccttactagagaggatctgggataatttggaggagaagaggcattctggttttttaaattttcagcatttttgcacggttttttcctcatcttagtggatttatctacctttgtactttgaggctgatgacctgtggatgagattctgtgtgggggtcctttttgtcgatgttgatgttattgctttctgtttgttaggtattctaacaggcaggcccctctgctgcaggtctgctgcagtttgctggaggtccactgcagaccctatttgcctgggtatcaccagcagaggctgcagaacagcaaagattgctgcctgctccttcctctggaagtttcgtcccagaggggcatggacctgatgccagctggagctctcctgtataggtgtctgtcaactcctgttgggaggtctctcccaatcaggaggcatggaggtcagggacccacttgaggagcagtctgtctcttagcagag

SEQ ID NO: 273 - DNA, 454 bp, Homo sapiens
ggcacgaggcttgtgagctcaccaaacaaggatttcagtgtagattttgtctttcttgaacttaaagaaacaaatgacaaagtttgaatggaaaagcctgctgttgttccacatctcgttgctgtttacattcctttgtggagcctacatcttcctaagctttttagcaggtatatgttgaacacttctgtttcatggttgagacagaatcagaggccatggatactgacaactgatttgtctgttttttttctctgtctttttccatgactcttatatactgcctcatcttgatttataagcaaaacctggaaaacctacaaaataagtgttgtggtttatctagaaaaatatggaaaatattgctgttatttttggtgaagaaaatcaattttgtatagtttatttcaatctaaataaaatgtgaattttgtttaaaaaaaaaaaaaaaaaa

SEQ ID NO: 274 - DNA, 788 bp, Homo sapiens
ggcacgagccttcatccaggtgagaatgtgctgcagctggtttctttgggaagcctgtgggttaaagtaagcgatagtctatatgccgtgtggccatctacgaataagggctgggattgctggtggctctggtgcagcacagtcactgctttttccatacttggagagcctatgggagtgcgattttgatagggcttgaattgcaggaagagcccatggctcccaaggtggggcttgcatttctatcaagtagctgttaataatggggcagttgctgggcaactgtgtgctcagcagctgggcttttccctcagcccctctactaacctgctgtgaggcaagacaagggcaggacactaacgttcctgtctcctgattctttttctttaccattccttaagagaaggaaagcagagacggtccagtcctgtgatttctcagtgcttgttctaatcatatgtgctgatttcctgttgaatgaagatgaaggccgggtgcggtggctcaggcctgtaagcccagcactttgggaggccaaggtgggtggatcacctgaggtttggagtttgagaccagcctggccaacatggtgaaaccccatctctactaaaaatacaaaaattagctgggcatggtaagtgggcgcctgtaatcccagctacttgagaggctgaggcaggagaattgcttgaacccaggaggcagaggctgcagtgagccgagatcgcgccatcgcactccagcctgggcgacaacactgtctcaaaaaaaaaaaaaaaaaaaaaaaa

SEQ ID NO: 275 - DNA, 908 bp, Homo sapiens
ggcacgaggtaatggctgaggcacaaggagcgagtattttaaatcaggcttatgaatgtgctctgtggatacggtttgcccatagggaggtggttttgggggttgcgaatcatactcaagctgtccctgaccgactcaccagtattctacaaacttactacaaacctctcaaaggaccatcttggaagacactagcaagggcgtgcacaatcccctctgacgttgctggctggtggtggaggccacggagcctccctgtgtgagactgtactatgtggtcactagaatgttttgaaagacagttctctgcaggcccggcaccgtggctcacgtctgtaatcccagcattttgggaggctgaggcgggtggatcacgaggtcaagagatcgagatcaccctggccaacatggtgaaaccctgtctctactaaaaatacaaaaattagccgggcgtggtggcgggcacctgtagtcctagctactcaggaggctgaggcaggagaatggcgtgaacccgggaggcggagcttgcagtgagctgagattgcgcaactgcacttcagcctggcgatagagcgagactccatctcaaaaaaaaaaaaaaaaaaaaatagggacttactgggccggtcggggagggggaggcgggatgggacacccaacactttttccatttcttcagagggaaactcagatgtccaaactaattttaacaaacgcattaagaggtttatttgggtacatggcccgcagtggcttttgccccagaaaggggaaaggaacacgcgggtagatgatttctagcaggcaggaagtcctgtgcggtgtcaccatgagcacctccagctgtactagtgccattggaataataaatttgataaggtggtgaaaaaaaaaaaaaaaaaaaa

SEQ ID NO: 276 - DNA, 1891 bp, Homo sapiens
ggcacgagtgcacctgcaagcatgggggtggcaggagccacagagctggctgctgagaggagctgcagatctggagaagacagcctaggtaaaggtggacagtgtgagagctgctgatgagatagctgctgaataaaactacattttacctgcctatggcccgccaggttttctttcagctatcgcccatccacccagtcccctcgaacctcagcatgggctggaacctgaccctgggcatgacatttggcatagttgtggacctgacacctgtgtttgtcctagtcctgtttctccctgccttcctgttcctctcgctgccctcatggtcactcccaagggatccaacccatgttaagtatgggctggaggactgcatgaatgcctcatgatcttcccagaggcaaaggcacctactgccttccaaggtcagtgggaggttgggatcaacactgtttattatgcttaggacaaaaaagatagggagaaagatgtgcaccttacagtcatctttctgggatagaacacaatgggtcttctcctgcctcctggatatgttagtcaaggccagtccatgctacacatctagtctgacttctaaaatagaagcaccagatgaattcagccctgagagaattttcagcagctgtgggggcgctggaggaaacactattaaatagttttgcacctgagacagatagcctcactcgcctcaccctagtcctggtggcatttgtctcaggtgcaaaatttaagaaagaaaccttggagtgctcaccctgtggctgggtagatggtcctaaagtggtggttttcaagcctgagtgtgtatcaggatcatcaggggagcttgctaaagagcagttcctgcggtcagaccctcatgcattttgagcaggtgtggggactgggaaactgcatctgtaacctgctgtaatctaacgcttatctaaatactactgtgctcacacagagaacaccgcaaaagtagaggtgttcctccagagggcaggtgagcagatggcacagtctgcttggaattcagtcaggtgatgagagatgagatgaggcactcctagctttgggaagagggagctgaaagatgaacctttgcaggtgcccacggtcaaagtggtggtttaatgccatgccatgcccattttctgttggccttggcagggagttacagccctaccttaggacctggctccttatttctgctgtaggctctttcctgccctggccgagatggagtggaatgagacctagaaacatcaagctaaatacatgtcctcagaaagataaaggtttacattttcacccccatcaaatctgaaagctctctgcctgtgtttttctaagggatagggacatcattactcagtccacaacctggactcatgtagggtcccctgtcagtaaaggagtcagtcaagcccaccaggtataccaaggactcttaccctcagcccctactccttggaaagctgccccttggcctaatattggtgtttagcttgagcctgactccttctcaacactaagagctgatgaagtcctgaagcagaaagagctctgacctgagagtcaaacatccttattctgatctcagctcagcccctgatttgttgtgtgaccctggatatgtcacttcctgtctttttgactttttaaaatgaagggtagactagaggagagcttctaaaactttaatgtggtcaacgaaatggaataggaaattccacaagtctgtccttccacaaaagcagcaaataaggtggcaaaaactcaaatttatgggaactctggaaacgaattgaaagtttacagcaatcaggtgaatacctaagaataaaagctggatttagtaagaaaaaaaaaaaaaaaaaaa

SEQ ID NO: 277 - DNA, 2267 bp, Homo sapiens
aaccaatcacaaagtgtgggcattatttaaatcttgattcaaataaacaaactgaaatatataaatgacacttatgaaacaaaaatgtggccactgattgggtatttgactaaatcactgctcaattttattttgtgcgtgataatagcaatgtgcttatgtgttttatcttctagtgatacatactgaaatatttacagatggaaataatataatgccaattattttcttggaaattaatgtgggatgtgggaaagtagacagagatagagatttaacaagatggattatgagctgataattgttgaagttgagtgacaggcacataggggtttattataatatcccgtcttcttttgcatatgtttaattttccataataattttttaatgttctaaaaatttaaactttattttccaatcaaatggaagtctttagagattttattttgcaagtggcaatatgattaaaagggaaataggaaagataaattaagcaatgatttgcacattaattggcagttggggaagactaaagaccaggagattagttaagagtctcttacagcatccctatctacattggaaaaagtctgactgaggtaacattaatagaaatgaaaaggaaaaagtgacaggaatgattttgaggagcatcaaagttcgctgctacttgaatatgaaacactaagcagagaaagattaaaagaggacacaaaaatctcaaacctggcatattttaaaaatagttatgtcatgaataaatataggccagtcaagatgacaaattgttgggtgatgaggtaacaaatttacttctagacatcaagtttgagaggatgaagtgaccacttgctattaaagtaaattattgtttacctacacatgcattaaaaaaaatcctttgtgctgtctcctgaaatgtgattatgtgtttaaaaatacagtgtcataaattaaacttagcataataaaataattgaataaaataaaactataagtcaaatttccttgttactaatattaaaatagcccaaacccttctttgataaaattctacttttttgtcatgttttaccatttgtttacattatttccctgcaaaaaatgttccttgatatcataagtagatctgtatatgtacttattttatatcactttccctgtctctatacatctaaacatataaagcaatgaacacatcataggtgcccaataaataccaagttttctggccaatatgctcacttattgcaagcagtactgagaagaataagattgtaacgctgccagataatttggaaagtcttctgaagcttccttaagtaagataacatcattattttattaagtagtatcattaattatcttaagtaacatcatcaatactgaaataatttcttctagtgacaaactacggaaatacatatagtagaaactgtgtctaagtcagacttttgaatttcatttaagacaaacttagttgtacactattaaaagtctataataaccacaatactgatcagtgcttagcatgtccatacccaaaagtttggaatttgtcatttttaatccctagcatcatacattcccatatcctttaccttagtaagtgattccttgtgaccaagtgaaccactctaattacctccataaaaagaaattgagaagatgtctcaaaaacaataaaaagcagaaatatattgttctctaaaccctctgattcttgacagtttttgcttcctagatccaccagttcagcatgctacccaatactgacaactaatcccagactttctttgctacttgaagccaaggcaacatccaactacatcatctctcgctgtttgcttgaaaacaaatgtgaaactatttcattcgtttgcttgaacttaccaataaatacatggctagaggtcatttagtttggcagtattctgattcagcaaagcaataaaaccaacccaaactatttgaaatcccaatgtccaggaccctggagcaccatgtctcttgctgtcatagcacctgactgtgagtgtgtttcctcactcgcctctgaaagctggcggcaagacccttgaccatcaaacaggagaaaaatcctcatcatctatcaagggggccatagttggaatctttctctgttatgcacatagaatgttcctgcagaaacaaagatctttccatgaacagtaataagttccctcttgtttcaacaatgattggttgaattcgatatcaagcttatcgataccgtcgacctc

SEQ ID NO: 278 - DNA, 2805 bp, Homo sapiens
cggacgcgtgtttaggttacaggcatatactagtgtctcaaaggcttcacttggccttgcagatcacagagaacttggaaagatgatgaatacaataatttttcatacaaaaatggtagattccttggtggaaatgttggtggaaacatcagatctctccatattttgtttttatagtcgtgcttttgagaagatgtttcaacagtgtttggagttaccctctcaatcaagatactcaattgcatttccactactttgcactcattttatgagttgcacgcatgaactatgtccagaagagcgacatcatattggagatcgcagtctttccttatgtaatatgttcctagatgaaatggccaaacaagctcgaaatctcatcactgatatgtgcacagaacagtgtacccttagtgaccagttgctacccaagcattgtgccaaaactatccagtcaagcagtgaataagaaatcaaaaaagcagactggtaagaaaggggaacctgaaagggagaaaccaggtgttgagagcatgaggaaaaacaggctggttgtgaccaaccttgataaattgcacactgcactttctgagttatgcttctctataaattatgtaccaaacatggtggtatgggaacatacctttaccccacgagaatatttgacttctcatctggaaatacgctttaccaagtcaattgttgggatgactatgtataatcaagccacacaggaaattgcaaaaccttcagaacttctaacaagtgtaagagcatacatgaccgtactccagtcaatagaaaactatgtgcagattgatattacaagagtatttaataatgtgcttcttcaacaaacacaacatttagacagtcatggagagccaaccattacaagtctatacacaaattggtatttggaaactttgttacgacaagtcagcaatggccatatagcatattttcctgcaatgaaagcgtttgtgaacttacctacagaaaatggattaacattcaatggcagaggaatattctgacatatcagaaatgaggtcattatcagaactactaggcccatatggtatgaagtttctaagtgaaagccttatgtggcatatttcatcacaagttgctgaacttaagaaacttgtggtggagaatgttgatgtgttaacacaaatgaggaccagctttgacaaaccagaccagatggctgcactgtttaaaagattatcatctgttgacagtgtcttgaagaggatgacaataattggtgtaattttatccttccgatcattggcacaagaagcacttagagatgtcttatcctaccacattccttttcttgtaagttcaattgaagattttaaggatcacattccaagggaaactgatatgaaggttgcaatgaatgtgtatgagttatcatcagctgccggattaccttgtgagattgatcctgcattggtcgtagctctttcttcacaaaaatcggaaaacattagtccagaagaagagtataaaattgcctgccttctcatggtgtttgtggcagtttctttgccaacactggccagtaatgtgatgtctcagtacagccctgctatagaagggcattgcaacaacatacattgcttggccaaagccatcaaccagattgctgcagctttgtttacaattcacaaaggaagcattgaagaccgtcttaaagaatttctggcgcttgcatcctccagtctactgaaaattggccaggagacagataaaactacaacaagaaatagagaatctgtttatttactgctagatatgattgtacaagaatctccattccttacaatggatcttttggaatcttgttttccttatgtcttgctgagaaatgcataccatgctgtctacaaacaaagtgttacatcttctgcataaaattacctacttaatcaagataagcacgcatttttgttgccttggttttacctgtagactgtggaactattttaccttaagacctgaaaaagttttgtggattataaatttctttcatacggttgtattttctgatcattggtttcttaatatggttgtactacagtatacttggttgatttaggttgcacattcactgaattcactgagattattcctataattttaaagtatcatttatttgaaaaacatacattatcaacatgtttttgatatttgataatgaaaaaaatctttgcttgtttatttctgaaaaagaactgtatttagtgattattttagatagtgatattatagcattcatctgtgtgtaaattatttcatatagggaagagttctgatctgtacctatggttcttattgaaaacaacattggatgtgcatttctgtgatgttatgaatacatttctactttattttgaaacatttgccaaactaaatactgtaacactgtataacatttaaaaatgttaaagaactgcttagtattagaagcagatcatttcccaaaattctaagagcagcagcatatgttgttgcttgtataaagcctagcgataatttttagactaacttccatggtgccctgttggcattagcactaccattgtaccctgctgtataataaacaatcttagacatttatcaactgttgatacaaatgttagtccctaaccactttttatatatgttttaaatttttgaaattcaagtgtaccttccataacataaaataaacactagactgtaaaaaaaaaaaaaaaaaaaaaaaaaaaaaaaactcgagggggggcccgtaccctaatcgcctgtatt

SEQ ID NO: 279 - DNA, 2455 bp, Homo sapiens
  misc_feature (2454)..(2455): n equals a,t,g, or c
ggcacgagcttgaaagcatgaagaccagttatatagggaacaggtttctctcagtggcacattttgctttttctgagccccaaatacattgcctgggcatgaacattgttaccgtaaattgcacatggtcatggactgaattatgtgactttaaaggatgtaactgcccaacatttgcagattctgggtggtctatgtgaccatttgtctcgtatccaaaaaccccggggctattggaacccttccaacactttttcctttgtcatagacaagtttatatataacttaccaagatgttggctgtcctggtgtattgccagacagctctcttttggttcccattccaaatgtgctgctgtccttctttgcatttcacaatatcaaagaaaccaccacccttcttcctaacagcattttatgccttttattccacattaaatgggaattgtgcctacttaggagtgcccctccaattaattacatgtgtccaagaataatccaagctagagacacaaggtgggaaaacatttcaaaaaaaaaaagtcctcttaaggccagtaatttatctgaaaaggtattttatcacaccttgacaccttatatatgagcctattaggagctgcaggtggtttcatagggtaaaatccaagaaaagagaaggatgtgtggggtttctattagaagataattttgttctcattttaccttttcttttatgatccttctctgctagaacaggttaattctccaaatttgttttgttttgttttgttattttttagggaactcttttgcaaaagcaatggtcggatgtaaataacatttaaagtatagtgcacataacttccccggactgttccaatctgataatttgtaaatgctttagagtttttttaattaacacttgtgttgctaaattctatttatgtaagtctgctaaagttttttagcccacttaaaacttaagacaaccatttaaaataatggatgggttactatgagcaatttcgctttcagaacccccttgttttagtatatgaaaaagcctaatgcgcattaatgaggttgaagagactatgagaaatatgtatagtgtatattttaaaacagctttgcttgtattgtgaagatttaaaaacaaacttgagatttttaacgtaactattaacacagttttaacataagttatcccactgggtttaagagcatcttgaatgtataatcctttttgtaacccaggttggtttctacttttaccagtcacccaaacatatttatgtttttagttttatgtactcatttccctttgttttcctcaaacagcatgatttttttgcacatgtagaaattttttaaaagaaagaaattagtacatcattttctctggattttcttcacttccctcttcctttctactaactccttccttaaaggccatatcactccatttgcattatttgtgcaaatgccagggttggtttttatttttatttttgctatttacctaaaaaaagaaaatgcttcagtcaattgcttttttatttaaaaaaaaagaaaagaaaaaaagctgtaaccttatcatttctgagtagaccattgagcgatgaatgcacacctgtagtagcccaggaccagctgtggtggctaaagggaatatgttaattaagcaagaggttcttttctaaaagtggtatctgttatccacaatgtattttagttattcccacaagtcaggggtccagataaaatgagggttatcagctaactgatatgctatcattgaggttcatcaatgaatttgtacatttctagttccctttggtgaagggaaaaatgatgattttgcaagacctagattttggcttggtttcttgcctccttttttggcagccttcatcttctcatctcccaaaccccctgagcccgtagkttttcatagtggacaaagaacttgtggtcttttaaaactgggactgatacttttttgagagagtatcgtgtcgaaagtgtgatgttctaccactttaccaataactaattttaaatacacattgtcctctcgatttttggaccaaacagacgctcacagtggaggcttatcaagggttgcattggggaagaagcctctccctctctgtcagcaccagctggtaaaggtgactgtacagatgtgcattttccttttggtataaatggtccacagcactaactggtaaggcttattgtacagtatattgtcagtattcttctggttcagcataccttatagttcatatataacctgtattaattgtatagattgtgcattaaaagctgttaccaagttgtcagaacataagagcgaaaacaaggtcatatgtaatattttgtttgtaagtatcctttgtatcatagcaaaggaaatgtttaaaaaaatcaactgtaataaagtaattttagtacaaaaaaaaaaann

SEQ ID NO: 280 - DNA, 1173 bp, Homo sapiens
gaactagtggatcccccgggctgcaggaattcggcacgagccgatctgctccggccgtagtaatccgtgaagaggccgtcagggttgagcaggtagatggcaatggagtggtccacgatgtagtcctggtcctcatccttggggcctgcattgtagtacacgcggtaactgtgactagcctgggcaacctgtttggtggagccggtcagacccaacagtcttgggtggaagtcctggacgtagcgggccatggcttcaacgtcgtcccgctcggggtccacagtgatgaagacaggctgcactggaggcaaaccaggctctgcttccagctgccgcaccacctgcaccagcttctccagctcgtctgggcagatgtcagggcagtgagtgaagccaaagtacatcagcacccactggccccggaagtcagccttgcagcgagcccggcctctgtgatccagcaggtggaagtcgccctggcccacagctgcctggcgcagggcttctgttcgcttttgctgctgcagcctctccttctcagccctcagggccagccaggccccaccgagtccagccccgaacaggcctgtgatcagcagccgggttcgaagcccagggccctggggctggccctgcccacctgtctctgcagggccctgccttgacaaaagccaggacctcagatgcagggcctggcctcccagggtcccagggaggacccgaggcttgagctgagagagcctgtgccaagctgtggggctccgagtcagcagcagcatggatctgatgctcctggaaacaagcacaggcgtcaggagccagaagggaaggcccaggacagtgcctgggctgcccctgcgacttgagaccagccacccatctgaaggacccagcccacgttcaggcttaacaggcatttgcagctgctcacctgagctcagaactccacctccaccaaacatccacacctgggcaaccacacctgtcactcctgtcctctacctgggatcaccagcctgtcaccgcaccctgccctgcacctgcacctcagcaaggtgaacctcttgctgacggaaagcattccaagtgcatgccttgcctgaactaaccacgttatctatttgcaataaacccatttcttaaaaaaaaaaaaaaaaaaaaaaaaaaaaaaaa

SEQ ID NO: 281 - DNA, 1098 bp, Homo sapiens
gcgagccccaggaggcccctgattccactgctgcaggaggctcagcctcgaagcggatggcgctggtgctggaacgggtgtgcagcactctcctgggcctggaggaacacctgaatgccctggaccgggctgctggtgacggcgactgtggcaccacccacagccgtgcggccagagcaatccaggagtggctgaaggagggcccaccccctgccagccctgcccagctgctctccaagttgtctgttctgctcctggagaagatgggaggctcatctggggcgctctatggcctgttcctgactgcggctgcacagcccctgaaggccaagaccagcctcccagcctggtctgctgccatggatgccggcctggaagccatgcagaagtatggcaaggctgctccaggggacaggactatgctggattctctgtgggcagcggggcaggagctccaagcctggaagagcccaggagctgatctgttacaagtcctgaccaaagcagtcaagagtgccgaagctgcagccgaggccaccaagaatatggaagctggagccggaagagccagttatatcagctcagcacggctggagcagccagaccccggggcggtggcagctgctgccatcctccgggccatcttggaggtcttgcagagctagggtgtgtgactgcctcccttggcctcagctcctctcactgctgtgctgaggtggcctttgtcacttccttctgccttccaaccctcaccttcccccggcctggccccattggcccaccctctaagttgagcaggaaatcctccaccaagcttccagaactacagacagcacccagagtgagctggagtgggtccccatgcctctccagcatgccctttccctttgcaggagggtggagtccctgggtcatgccctcccctgccagctctgggcttcagagataaggcattttccttgtgcagcctttacctggcaatcctaatttggttttaagactccctgtgaaatgctttccgaaccttaaccccagtgagcgtgaaaaagaaagttaataaactataatacatggaagcaaaaaaaaaaaaaaaaaaaa

SEQ ID NO: 282 - DNA, 1760 bp, Homo sapiens
ggaggagctcaacagcgggaaggtgatgtacgccttctgcagagtgaaggaccccaactctggactgcccaaatttgtcctcatcaactggacaggcgaggacgtgggaccccaggccccagtgggctctgtgtaccagaagaccaatgccgtgtctgagattaaaagggttggtaaagacagcttctgggccaaagcagagaaggaggaggagaaccgtcggctggaggaaaagcggcgggccgaggaggcacagcggcagctggagcaggagcgccgggagcgtgagctgcgtgaggctgcacgccgggagcagcgctatcaggagcagggtggcgaggccagcccccagaggacgtgggagcagcagcaagaagtggtttcaaggaaccgaaatgagcaggagtctgccgtgcacccgagggagattttcaagcagaaggagagggccatgtccaccacctccatctccagtcctcagcctggcaagctgaggagccccttcctgcagaagcagctcacccaaccagagacccactttggcagagagccagctgctgccatctcaaggcccagggcagatctccctgctgaggagccggcgcccagcactcctccatgtctggtgcaggcagaagaggaggctgtgtatgaggaacctccagagcaggagaccttctacgagcagcccccactggtgcagcagcaaggtgctggctctgagcacattgaccaccacattcagggccaggggctcagtgggcaagggctctgtgcccgtgccctgtacgactaccaggcagccgacgacacagagatctcctttgaccccgagaacctcatcacgggcatcgaggtgatcgacgaaggctggtggcgtggctatgggccggatggccattttggcatgttccctgccaactacgtggagctcattgagtgaggctgagggcacatcttgcccttcccctctcagacatggcttccttattgctggaagaggaggcctgggagttgacattcagcactcttccaggaataggacccccagtgaggatgaggcctcagggctccctccggcttggcagactcagcctgtcaccccaaatgcagcaatggcctggtgattcccacacatccttcctgcatcccccgaccctcccagacagcttggctcttgcccctgacaggatactgagccaagccctgcctgtggccaagccctgagtggccactgccaagctgcggggaagggtcctgagcaggggcatctgggaggctctggctgccttctgcatttatttgccttttttctttttctcttgcttctaaggggtggtggccaccactgtttagaatgacccttgggaacagtgaacgtagagaattgtttttagcagagtttgtgaccaaagtcagagtggatcatggtggtttggcagcagggaatttgtcttgttggagcctgctctgtgctccccactccatttctctgtccctctgcctgggctatgggaagtggggatgcagatggccaagctcccaccctgggtattcaaaaacggcagacacaacatgttcctccacgcggctcactcgatgcctgcaggccccagtgtgtgcctcaactgattctgacttcaggaaaagtaacacagagtggccttggcctgttgtcttcccctattttctgtcccagctcatccgtgtctctgaagaacaaatatgcttttggaccacgaaaaaaaaaaaaaaaaaaa

SEQ ID NO: 283 - DNA, 658 bp, Homo sapiens
tcccttgcttgatgcaacactgttccaaaagagggtggagagtcctgcatcatagccaccaaatagtgaggaccggggctgaggccacacagataggggcctgatggaggagaggatagaagttgaatgtcctgatggccatgagcagttgagtggcacagcctggcaccaggagcaggtccttgtaatggagttagtgtccagtcagctgagctccaccctgatgccagtggtgagtgttcatcggcctgttaccgttagtacctgtgttccctcaccaggccatcctgtcaaacgagcccattttctccaaagtggaatctgaccaagcatgagagagatctgtctatgggaccagtggcttggattctgccacacccataaatccttgtgtgttaacttctagctgcctggggctggccctgctcagacaaatctgctccctgggcatctttggccaggcttctgccctctgcagctgggacccctcacttgcctgccatgctctgctcggcttcagtctccaggagacagtggtcacctctccctgccaatactttttttaatttgcattttttttcatttggggccaaaagtccagtgaaattgtaagcttcaaaaaaaaaaaaaaaaaaaaaaaaaaaaaaaaaaaaaaaaa

SEQ ID NO: 284 - DNA, 520 bp, Homo sapiens
ggcacgagcggagtttgagccccggaggcagagcggctgccatggccaagtacctggcccagatcattgtgatgggcgtgcaggtggtgggcagggcctttgcacgggccttgcggcaggagtttgcagccagccgggccgcagctgatgcccgaggacgcgctggacaccggtctgcagccgcttccaacctctccggcctcagcctccaggaggcacagcagattctcaacgtgtccaagctgagccctgaggaggtccagaagaactatgaacacttatttaaggtgaatgataaatccgtgggtggctccttctacctgcagtcaaaggtggtccgcgcaaaggagcgcctggatgaggaactcaaaatccaggcccaggaggacagagaaaaagggcagatgccccatacgtgactgctcggctccccccgcccaccccgccgcctctaatttatagcttggtaataaatttcttttctgcaaaaaaaaaaaaaaaaaaaaaaaaaaaaaaaaaa

SEQ ID NO: 285 - DNA, 325 bp, Homo sapiens
gcacgggaactattgatacatgcaataacctaggtggatctcaaagtcattctgctgagtgaatgattccagttacatagcattctggaaaaggcaaaactgtggtgaccaggtaacaagcatgattgccaggggttggtggtggggaaagcgtgtgactaccatggggtagtatgaggtgatttttgaggagatgaaactgttctgtgtcctcattgtggtagtggttacatgagttagtacatgtgttaaaactcatagataatacgcttccccaaggaatccatttactatacattaatttgttaaaaaaaaaaaaaaaaaa

SEQ ID NO: 286 - DNA, 878 bp, Homo sapiens
  misc_feature (219)..(219): n equals a,t,g, or c
  misc_feature (222)..(222): n equals a,t,g, or c
  misc_feature (862)..(862): n equals a,t,g, or c
ctattatatcgcggcctctcgacttttgagactcgcgtttccttggccagyggtaacacaggacgtgtgtgcgcatgtgcaagtgtggatgtatgtgtgtgcgtgtgttttgctcatttctttagggaacttgggagtcggggttggaggtgctgggcaatggaacttcaaattcaatgtcgcccagcagtgaggggagtcgggaggtgaggcctgtangcnaaccaattggtggagtctcagcgatacccaggtgagaagtggttcacccagagggcagggtgggggcctcgggcagatctgtccctcttggcccctctgtcctcaaatgtccaaaatgttggaggacctctgttcatatcccacgcctgggctcttgccagcagtggagttactgtagagggatgtcccaagcttgttttccaatcagtgttaagctgtttgaaactctcctgtgtctgtgttttgtttgtgcgtgtgtgtgagagcacatcagtgtgtgcaggctgtgtttccccatttctctcctcccttcagacccatcattgagaacaaatgtaagaaatcccttcccaccaccctccctgcctcccaggccctctgcgggggaaacaagatcacccagcatccttccccaccccagctgtgtatttatatagatggaaatatactttatattttgtatcatcgtgcctatagccgctgccaccgtgtataaatcctggtgtmtgctccttatcctggacatgaatgtattgtacactgacgcgtccccactcctgtacagctgctttgtttctttgcaatgcattgtatggctttataaatgataaagttaaagaaaaaaaaaaaaaaaaagggnggccgctctaaggggt

SEQ ID NO: 287 - DNA, 1496 bp, Homo sapiens
ccacgcgtccgcggacgcgtgggctagctttgtcttcaatggctttctggacttcatcctccgacctgatgatccccgggcccaaaccctccgtcgcctcttcgtctttaagctgattcccatgttgaaccccgatggtgtggtccggggacactaccgcacagactcacgtggagtgaatctgaaccgtcagtacctgaagcctgatgccgtcctgcacccggccatctatggggccaaagctgtgcttctctaccaccatgtgcactctcgtctgaactcccagagttcctctgagcaccagcccagttcctgtctccctcctgatgctcctgtttctgacctggagaaagccaacaatctccaaaatgaagctcagtgtgggcactcagctgacaggcataacgctgaagcctggaaacaaacagagccagcagaacagaagctcaacagtgtgtggattatgccacaacagtctgcggggcttgaagagtcagcccctgataccatcccccccaaagagagtggcgttgcttactatgtggacctgcatggacatgcttccaaaaggggctgcttcatgtacggaaacagctttagtgatgagagcacccaggtggaaaacatgctatatccaaagctcatctccttgaattcagcccacttcgacttccagggctgcaatttctcagagaagaatatgtatgcccgagaccgtagagatggccagtctaaagagggaagcggccgtgttgcaatctacaaagcctcagggataatccacagctacacacttgaatgcaactacaacactggacgctcagtaaacagcatccctgctgcctgccatgacaatgggcgtgccagcccccctcccccgccggctttcccctccagatacactgtggaactatttgagcaggtgggacgagctatggccattgcagccctggacatggcggaatgtaatccgtggccccgaattgtactgtcagagcacagcagccttactaatctacgggcctggatgctgaaacatgtacgcaacagccgaggcctaagcagcactctgaatgtgggtgtcaacaagaagaggggccttcgaactccacccaaaagtcacaatgggttgcctgtctcctgctccgaaaacaccttgagtcgggcacgaagttttagcaccggcacaagtgccggtggtagcagcagcagccaacaaaattctccacagatgaagaattcccccagctttccttttcatggcagtcggcctgcagggctgccaggcctgggctctagtacccaaaaggtcacccaccgggtgctgggccccgtcagaggtaagccagtctgggagcccctgcaacatgtgttcggttgtctggggcattgctgggggaagtaagagcttgaagatatactgttggcccaggaccaaggggtgaatcaataaaattagtttgtagcagaaaaaaaaaaaaaaaaaaaaaaaaaaa

SEQ ID NO: 288 - DNA, 1135 bp, Homo sapiens
ccacgcgtccgcttttgtatctcaagaattgagggttttgttttctgatctcaggttttattattggtgggagcctgtgtttcttcctgggtagaattgaataagattttccaggaaaggcatttgtgtagctaattacagattatggtgcaaagtatgtctcatattcctccccctaaccccagctaattgctgtatacttgacagtttatttcaatattgtattaagacattggttttgtgctggacagagtaaaagggagatggtatttttttttaaaagaacaatttatttcataattaagtatctaaatacttggttgggaataaatgactaattagaacagtacctttaggtattctgatacctctacttagaaatgccttttcttttcttgcaaaaattacttggcagatttgatgaaaaagaaaatgtgtccaactgcatccagttgaaaacttcagttattaagggtattaagaatcaattgatagagcaatttccaggtattgaaccatggcttaatcaaatcatgcctaagaaagatcctgtcaaaatagtccgatgccatgaacatatagaaatccttacagtaaatggagaatactctttttagacaaagagaagggctttttatccaaccctaagattacttcacaaatatcctttatcctgccacaccagcaggttgataaaggagccatcaaatttgtactcagtggagcaaatatcatgtgtccaggcttaacttctcctggagctaagctttaccctgctgcagtagataccattgttgctatcatggcagaaggaaaacagcatgctctatgtgttggagtcatgaagatgtctgcagaagacattgagaaagtcaacaaaggaattggcattgaaaatatccattatttaaatgatgggctgtggcatatgaagacatataaatgagcctcagaaggaatgcacttgggctaaatatggatattggctgtatctgtgtttgtgtctgtgtgtgacagcatgaagataatgcctgtggtatgctgaataaattcaccagatgctaaaattcaaaaaaaaaaaaaaaaaaaaaaaaaaaaaaaaaaaaaaaaaaaaaaaaaaaaaaaaaaaaaaaaa

SEQ ID NO: 289 - DNA, 2704 bp, Homo sapiens
ccacgcgtccgcttcttcagctatgctgaggtgctgaagcgggagccgggggccctgggagcacgctgctggtcactctatggccgctgctacctccgccacttcaacgagctggagcacgagctgcagtcccgcctcaaccgtggctacaagcccgcctccaagtacatgaattgcttcttgtcacctcttttgacactgctggccaagaatggagccttcttcgctggctccatcctggctgtgcttattgccctcaccatttatgacgaagatgtgttggctgtggaacatgtgctgaccaccgtcacactcctgggggtcaccgtgaccgtgtgcaggtcctttatcccggaccagcacatggtgttctgccctgagcagctgctccgcgtgatcctcgctcacatccactacatgcctgaccactggcagggtaatgcccaccgctcgcagacccgggacgagtttgcccagctcttccagtacaaggcagtgttcattttggaagagttgctgagccccattgtcacacccctcatcctcatcttctgcctgcgcccacgggccctggagattatagacttcttccgaaacttcaccgtggaggtcgttggtgtgggagatacctgctcctttgctcagatggatgttcgccagcatggtcatccccagaggctatctgctgggcagacagaggcctcagtgtaccagcaagctgaggatggaaagacagagttgtcactcatgcactttgccatcaccaaccctggctggcagccaccacgtgagagcacagccttcctaggcttctcaaggagcaggttcagcgggatggagcagctgctagcctcgcccaagggggtctgctccctgaaaatgccctctttacgtctatccagtccttacaatctgagtctgagcccctgagccttatcgcaaatgtgggagctggctcatcctgccggggccctccactgcccagagacctgcagggctccaggcacagggctgaagtcgcctctgccctgcgctccttctccccgctgcaacccgggcaggcgcccacaggccgggctcacagcaccatgacaggctctggggtggatgccaggacagccagctccgggagcagcgtgtgggaaggacagctgcagagcctggtgctgtcagaatatgcatccacagagatgagcctgcatgccctctatatgcaccagctccacaagcagcaggcccaggctgaacctgagcggcatgtatggcaccgccgggagagtgatgagagtggagaaagcgcccctgatgaagggggagagggcgcccgggccccccagtctatccctcgctctgctagctatccctgtgcagcaccccggctctggagctcctgagaccaccgccctgcatgggggcttccataggctctacggtggcatcacagatcctggcacagtgcccagggttccctctcatttctctcggctgcctcttggagggtgggcagaagatgggcagtcggcatcaaggcaccctgagcccgtgcccgaagagggctcggaggatgagctaccccctcaggtgcacaaggtatagacaaggctgagcagggttcctgtggcccaggatggaggccaccgctgccctgccatcccgtctgcctgccatgggacggctcctctgagtgttccctggccccacgtgtgtggtgtttgtgtgtctgtgcctggccaagggaggtgccaacactgggcttgccacagccccaggagaggaatttggggcctaggaaccgagggcacacgggactctagcctcatccccaggacccccttggctcagagtgtggtgctagaaactggtccccagcccagccccagtactgccacctttacacctacccctgcaagtccccagagggctgcccacgatagaagctgccaagcagggagaacctgtgccaactgtggagtggggaggttgggcctggaccctcaacccctgcaaccttccctagccccctcaatagatgagcaggtcaggctgtggcccttacctcacccgcagttctcgcccagtgctgcagccggctcacctctctccgcttcttgcacatcactggcctgtgtgtgctgcttgctcctgttctgttcgcttgctcccgttccgttcggcttttgctttgcgttagggtgaagaccctagcgtccagctcccctcaacgctatattttgacactaaaaaagaaggtttctaaattgtaggagcaggatggaaatactttgctgcccttgccatcttttaggatgggcccccaggagactgaggtcttcctgggccctcattgctgcttatcgtaccccccatcacctgcacatgggacagaccgggctggagggtgaccttggctgtgtacgtcccagcaaaagagctctggcccgcatctcgctgtgccctgaagggggatgaagggcgatgcctcgcccgaggctttgggctgctgcactgcatgctgggactgctcctactctctgtcccacccctcacccagctgtggtccggctttgggagagtggtgaattgcgctgcccgaactcggagcggagcagggtagggaccgtgtacagcttgataacccttaataaaaagggagtttgaccagaaaaaaaaaaaaaaaaaaaaaaaaaaaaaaaaaaaaaaaaaa

SEQ ID NO: 290 - DNA, 1225 bp, Homo sapiens
  misc_feature (1214)..(1214): n equals a,t,g, or c
ggcacgagccgggtcggcgctcctgcctccctgcagggagctgcttatgggacaccgcttcctgcgcggcctcttaacgctgctgctgccgccgccacccctgtatacccggcaccgcatgctcggtccagagtccgtcccgcccccaaaacgatcccgcagcaaactcatggcaccgccccgaatcgggacgcacaatggcaccttccactgcgacgaggcactggcatgcgcactgcttcgcctcctgccggagtaccgggatgcagagattgtgcggacccgggatcccgaaaaactcgcttcctgtgacatcgtggtggacgtggggggcgagtacgaccctcggagacaccgatatgaccatcaccagaggtctttcacagagaccatgagctccctgtcccctgggaagccgtggcagaccaagctgagcagtgcgggactcatctatctgcacttcgggcacaagctgctggcccagttgctgggcactagtgaagaggacagcatggtgggcaccctctatgacaagatgtatgagaactttgtggaggaggtggatgctgtggacaatgggatctcccagtgggcagagggggagcctcgatatgcactgaccactaccctgagtgcacgagttgctcgacttaatcctacctggaaccaccccgaccaagacactgaggcagggttcaagcgtgcaatggatctggttcaagaggagtttctgcagagattagatttctaccaacacagctggctgccagcccgggccttggtggaagaggcccttgcccagcgattccaggtggacccaagtggagagattgtggaactggcgaaaggtgcatgtccctggaaggagcatctctaccacctggaatctgggctgtcccctccagtggccatcttctttgttatctacactgaccaggctggacagtggcgaatacagtgtgtgcccaaggagccccactcattccaaagccggctgcccctgccagagccatggcggggtcttcgggacgaggccctggaccaggtcagtgggatccctggctgcatcttcgtccatgcaagcggcttcattggcggtcamcgcacccgagagggtgccttgagcatggcccgtgccaccttggcccagcgctcatacctcccacaaatctcctagtctaataaaaccttccatctcataaaaaaaaaaaaanaaaaaacttga

SEQ ID NO: 291 - DNA, 1324 bp, Homo sapiens
  misc_feature (3)..(4): n equals a,t,g, or c
  misc_feature (1241)..(1241): n equals a,t,g, or c
  misc_feature (1288)..(1288): n equals a,t,g, or c
  misc_feature (1323)..(1323): n equals a,t,g, or c
gcnncccggaattcccgggtcgacccacgcgttcgcccacgcgtccgttcacaggtacagtctctataactataaaatccaggaaatgagagtcccattagggtttaaatcactatttgattaaatgtttcaatcaaacccattttgtaatgttttatatgcacacttacctaaaatgtagtattattcaagagctatgattgctgtatgtaatgtaatttagttaaaatggatgcaaattcatatgattccagttacatatgaacttaaaattagatgtctgctgctttttgtatcattttccagaaaaatgagtcaacaaccaattaggaaactgtaccagtcaactcttgattacaaattgacagaaaccattaataacaaagcaacacagtatgagtataatacaccaaaaggaacataggtagtgtactactgggcttgtttttcagctgaggcctcaatggaactttgtgagtctcctcctctacttcacttcctttgccttcagtttgaatctcactgggtcagagtcagggatttgaacccctcgtggccctcctgaatcaggttgcagtataatttcgttgacactttctcccaatccccaagtatagcaataactctactttcccccaagaggaacaagaaaacacaataacacattaacaacagtgacaatctttttatttccctgkttacttacggcattaaaactccaaactcgtacagccttaatttccaartcaatgcaatattactgtgtctcttggtagagaattccccttttcttggtgctatgctatcagagtccaaaatcaaaaggacagaaagcagacaattagaatgtgtcaataagtgtaatctcaaaggcttgcatcccagtttccagtcctaggactccagacgcatatattttagctaagggggtaaaagaatgccatgtggtagtcacttattcagaacataaactgtattctgcaggacagtacctcaaatttgcaagctattgactctgaatgaagctcatctgagttttcatggagtatgcaatacccacaaatcccttgaacattagctcattgctttgtttctctataaagttatttcctttaaactgaagcaactttgtgtgggataccatgcccttgcatatggtagacaatctatagatagagcaaggacagagaaaaatgatcaaaaaaaaaaaaaaaaaaaaaaaaaaaaaaaaaagggcggcnactatagaggatccctcgaggggcccaagcttacgcgtgcatgcggngtgtttacctcaaatcaactatagagagtgtcccnt

SEQ ID NO: 292 - DNA, 1500 bp, Homo sapiens
atggactgccgtgagcccagaccttaaacgtaaacattcagcttcgcaggtactttgggctgcacacgcttctccggacccaaaagatgcacatgcttttcagaaaccgtaagtttacctggggctgtaaaaccgcacatcgcgactttgcaccgtgcacacgcttgccccgatgtgagatttcccctgggttcgcgctcgggtccgcttcttaaatacactgcctcagcggtgtggatggcacagagctgtggcagccctactgaaaccttaaacaggcttcctggggtcataaacatggataccgagacttagatcacctcccacaacttaaacgtaccccttcactccactgccttcgccccttcctgcagcattcgcatctagttgttcaaaagtgctttccgggtcctcagacatgcaccccaaggttttaaacctcacgtgcaagtactagatgggcttccctgtgcaatagggatgtcaggcgcgcagttttgcacacgattgccaagatgtgagatttactttaggttgcaccttaaccgtcgtttttaaatatgatcgtcccatcttgatgtgctgctcctgctgtggaaggtatccctgggttttaggcaagcatatgtgttctttactatggctccagatcccagcatatttgaagtcctgagtcaacctgctctcctagacaagcagacattaagtatgtcgcttgggctcttaagtgcgttctcctgacttttacccatctttgtggcagtaaatgcatacgtgtcactgtatatgcggactagatacctcaggtcccagcgccataaacaacttgtatgttgtaagtgtaccctcatctcgaaagtcacctccagctgtgcgttttaactcatctcagatgctggatgtccggtgtggtgcctgaagcccccggggcaacatccactctctgtccaactcattctaacgccaagatactcaggttttctatctgatcttctgacgactgcccaaaagtcagaatcacctgcgtgggtgaagaatcacctgcgtgggtggagaatcacctgcgtgggtggagagcaagtttgttcaggtttttctctttttaagcactcacaaaataaaattttttgtgtttgctagtattctggaaggaaagatctccttgtgcttcatagaaaatttggaaaatacctgtttgtaataagataaaaataaatcacccttataatttgttttcccccgcctggaggcgcctattacggggaaactctcgtgggtttcctgctgccaggctgtttgcggagctttcccttgtttgctttgagatgtttttggttttaaaaaacaataagtgaggtcaggcttggtggccctcgtctgtaatcccagcactttgggaggccgaggcgggcggatcacttgaggtcaggagttcgagaccagtctggccaacatggtgaaaccccatctctactaaaaaaaaaaaaaaaaaaaactcga

SEQ ID NO: 293 - DNA, 776 bp, Homo sapiens
ggcacgagtgaagtagaacatgcatgagaaagaatgcagaaatcatgaataaacagctccagaaagggatcacgcccaactaaccagcacccgaattcagagcccaccagcccccgggatcccggccacgtccactctgaccccatgcctgcaaggatagggtctctatcgtgacttctaaccccaccaggtacttttgcctctttttagaaatggaatcatacagtctgtactcttttgtgcctggtttgttttggttaacattgcgtctgggagttttatctctgtccagggttggcgaaccccagcttacaagccaaatctggtcctttgcctgttttcatatggcctgtgagctaaggatggattttatgtttttaaatagttgcgggggggggcgggggggggaggaaagaatgatattttgtgacgcgtgaaaattatatgaaattcaaatttgtgtccacaaattgactgggcatggtggctcatgcctgtaatcccagcactttgtggggccgaggtgggtgggtcacttggggccagaagtttgctaccagcctgaccaacatggttgaaaccccatctctactaaaaggtacaaaaaaatagctgggtgtggtggttgatgcctgtaatcccagctactcaggtggctgaggcaggagaatcacttgaacccgggaggcagagattgcactgagccaagattgtgccactgtacttcagcctggatgacagagtaacactgtatctcaaaaaaaaaaaaaaaaaaa

SEQ ID NO: 294 - DNA, 543 bp, Homo sapiens
ggcacgagctaagccctgcatccatgatgaggccggggcaggtctccctcctgggtcctgatgctgtttctgtgctcggctctggcttgggcctcagccctggcaccagctctggccgcaaccctgaccctggctctgggccgggcactctgccggatcccagctccaaacccctccccggctccagatccacccccagccctactcctgtggaatcttctgacccaaaggctgggcacgacgctggtcccgaccttgtgcccagcccagaccttgatcctgtgcccagcccagaccctgatcctgtgcccagccctgatcccaaccctgtgtcctgccctgacccctgttctcccactcgtggcactgtcagcccagccctccctaccggcgagagtccagagtgggtacaggagcaaggggcactgctggggcctgatggctgaaggagacgccggcatcctcgggggcctggggaagttgtgtgttgtgcagtcagtaaaatcctcccactgccaaaaaaaaaaaaaaaaaaaaaaaaaa

SEQ ID NO: 295 - DNA, 728 bp, Homo sapiens
ggcacgagaataaaaaaaaattagtcgtggtgccacttgcctgtggtccccactgcttgggaggctgaggtgggagaattgcttaagcctgagagttggaggctcagtgagccatgatcatgccactgcactccagcctgggtggccattgaattctgcgtggattgcctcagtttgccttgtcagccaacttccactggctgccttggcactgccatgacagcacagctccacaccagagctggggtttctcttcagtcctgggtaccccttggcagagggatttgctgaggaaaattaggtatccttcctagccctccacacacttccaaaccagggctgcggatctgatggatgccaggaagacagccttgggctgagagtgacatcactgcaagagttgagagccagcgtctaaagtgtccacggcatcctgggaggttttatccttggtgactctaatggtagatttttgtccaccttgttctatttgcttttgtttgtttttgatttttctgttttaaaattttaaggagagatggggtttcaccgtgttgcccaggctggtctcaaactcctgagctcaagcgatctgcccaccttggcctcccaaagtgctgggattataggtgtgagccaccgcatccagcccacattgttctatttgtatttcatgaaagcagttctgaatgagagtaaatcaaaaaaaaaaaaaaaaaaaaaaaaaa

SEQ ID NO: 296 - DNA, 2301 bp, Homo sapiens
  misc_feature (36)..(36): n equals a,t,g, or c
  misc_feature (237)..(237): n equals a,t,g, or c
  misc_feature (250)..(250): n equals a,t,g, or c
aattcggcacagagaatagccaggcaggacagaggnaaactccaccagtattgagcccaggcttctgtgggagaragtggagaagctggtgcccagacctggcagtggcagctcctcagggtccagcaactcaggatcccagcccgggtctcaccctgggtctcaragtggctccggggaacgcttcaaagtgagatcatcatccaagtctgaaggctctccatctcagcgcctggnaaaatgcagtganaaaaacctgaagataaaaaggaagttttcagacccctcaagcctgctggcgaagtggatctgaccgcactggccaaagagcttcgagcagtggaagatgtacggccacctcacaawgtaacggactaytcctcatccagtgaggagtcggggacgacggatgaggaggacgacgatgtggagcaggaaggggctgacgagtccacctcaggaccagaggacaccagagcagcgtcatctctgaatttgagcaatggtgaaacggaatctgtgaaaaccatgattgtccatgaygatgtagaaagtgagccggccatgaccccatccaaggagggcactctaatcgtccgccagagtacagttgaccaaaagcgtgccagccatcatgagagcaatggctttgccggtcgcattcacctcttgccagatctcttacagcaaagccattcctcctccacttcctccacctcctcctccccatcctccagccagccgacacccaccatgtccccacagacaccccaggacaagctcactgctaatgagactcagtccgctagtagcacactccagaaacacaaatcttcctcctcctttacaccttttatagaccccagattactacagatttctccatctagcggaacaacagtgacatctgtggtgggattttcctgtgatgggatgagaccagaagccataaggcaagatcctacccggaaaggctcagtggtcaatgtgaatcctaccaacactaggccacagagtgacaccccggagattcgtaaatacaagaagaggtttaactctgagattctgtgtgctgccttatggggagtgaatttgctagtgggtacagagagtggcctgatgctgctggacagaagtggccaagggaaggtctatcctcttatcaaccgaagacgatttcaacaaatggacgtacttgagggcttgaatgtcttggtgacaatatctggcaaaaaggataagttacgtgtctactatttgtcctggttaagaaataaaatacttcacaatgatccagaagttgagaagaagcagggatggacaaccgtaggggatttggaaggatgtgtacattataaagttgtaaaatatgaaagaatcaaatttctggtgattgctttgaagagttctgtggaagtctatgcgtgggcaccaaagccatatcacaaatttatggcctttaagtcatttggagaattggtacataagccattactggtggatctcactgttgaggaaggccagaggttgaaagtgatctatggatcctgtgctggattccatgctgttgatgtggattcaggatcagtctatgacatttatctaccaacacatgtaagaaagaacccacactctatgatccagtgtagcatcaaaccccatgcaatcatcatcctccccaatacagatggaatggagcttctggtgtgctatgaagatgagggggtttatgtaaacacatatggaaggatcaccaaggatgtagttctacagtggggagagatgcctacatcagtagcatatattcgatccaatcagacaatgggctggggagagaaggccatagagatccgatctgtggaaactggtcacttggatggtgtgttcatgcacaaaagggctcaaagactaaaattcttgtgtgaacgcaatgacaaggtgttctttgcctctgttcggtctggtggcagcagtcaggtttatttcatgaccttaggcaggacttctcttctgagctggtagaagcagtgtgatccagggattactggcctccagagtcttcaagatcctgagaacttggaattccttgtaactggagctcggagctgcaccgagggcaaccaggacagctgtgtgtgcagacctcatgtgttgggttctctcccctccttcctgttcctcttatataccagtttatccccattctttttttttttcttactccaaaataaatcaaggstgcaatgcagctggtgctgttcagattctaaaaaaaaaaaaaaaaaaaaaaaaaaaaaaaaa

SEQ ID NO: 297 - DNA, 281 bp, Homo sapiens
ggcacgaggggagtgggaatatgcgtgtgtgggtgggaatcggtaagaaatgcacctagcttttcatattgtgtttattctccaggctattgcttgcttcagctgcagcctgcctgtgctggctgctggggtcgataggcttttgtcgtaataggcagagatgacttgcatcccagctttccaccaaccaaattcaaacattcactgcttatttgttacagactgtaattattaaagtccctgagagctgttttctcccgttaaaaaaaaaaaaaaaaaaa

SEQ ID NO: 298 - DNA, 1061 bp, Homo sapiens
ggcacgagggacattgcccccccgcctgctgaggctgttccttcctgctgcacttgagcagcctcatcttccttcatctcctctcatgttcacttctctttgcctggaccaatggggaaaaaagtgcacagaatgagattatgtgactacagcaattctgagttagctttgattgctctgcagtaaaattaagggaccatatctttctcatgcacatgatatatagtttcaaatatagatctgtacatacgtgatgatgaaaagttcttcaggatgaggatgtatcagagagtgtgaattgaggccagtcttctgtttcctcccaaactcttaacagattgcatatcttcatgcaaatcttttcatgtattccttgtatactacctatagaaaggtgggacttgggagggtcacttacaactcctgtgatcttattttctcctccaggggctccttgaatagagttttcccccattttactggccaaggctgcagttagagctgtggtttgtcctgcaggggatatttgtcagtgtctggagaaatttaggttaacgcgactggagaagtgctattggcatctagtgagtggaggccagggatgctgctaaacaccccgcggtacacagcagaccaaagaatgatctagccccagatgccagtagtgctgargttggaaaactcttaagttagtaaatatacaactgataggaaaaacatgaagtttcaataattaaaaagctttgcacgaaagtttattacagggctgggcatggtggcttaggcctgtaaatcccarcactttggggggccgaggtgagaggatcacttgagcttaggaatttgagacctgtgttggcaacatagtgagaccccatctctaatatatatatatctgggcatggtggctcctgcctgtagtcccagctacttgggagggttgaagtgggagaatggcttgagtccaggaggttgaggctgcagtgagccatgattgcatcactgtactccagcctgggcgacagagcaagaccctgtctccaaaaaaaaaaaaaaaaaaa

SEQ ID NO: 299 - DNA, 349 bp, Homo sapiens
ggcacgaggtcaaaactaagaaattactactgctgtaagactgctaactaaactatgcatattcgaattgcaccagtttttccattaatgtccttttgctgttctaggacagcatattgagtttagtgcaacttgcctttatgctttattttaatgcccttgaattctcatctgttattagtgagtctcttatttatctctttgttttgagcttccttctctgctgttggtatgttgctttaatggagaggttgcatcaaccttcatttttttttttgagacagcctgggcaacagagggagacttcatctcaaaaaaaaaaaaaaaaaaaaaaaaaaaaaaactcgag

SEQ ID NO: 300 - DNA, 1019 bp, Homo sapiens
  misc_feature (1)..(1): n equals a,t,g, or c
ntggtgggatttttgtataaagtaagagataaggatccagtttcattcttctacatgtggcttgccagttttcctagcaccatttattgaatagggtgtcctttccccactgtatgtttttgtatgctttgtcaaagatcagttggctataagtatttggctttatttctgggttgtctgttctgttccattggtctatgtacctgttgttatactagccccatgctattttggtaactatagcattgtagtatattttgaagttgaataatgtgatgcccccagatttgtyctttttgcttagtactgctttggctatttgggctcttttttggtgccatatggattttaggattgtttctgattgacaaaggtattttgatgggagttctgtgaagagtgatggtggtatcttgataagaactgcattgaatctgtagcttgctttaggcagtatggtcattttcacaatattgattctacccatccatgagcatgggatatgtttccatttgttkgtgtcatctatgatttctttcaatagtgttttatagtttttcttgtagagctattttacctccttggttaagtataaccataagtattttattttattttttttgcagctgttataaaaggaatggaattgttgatttgattcttagcttggccgttgttggtgtatagcagtgctactgatttgtgtacattgattttctatctggagaatttactgaattcatttattagatctaagagctttttggatgagtctttagagttttctaggtaaatggtcatatcattggtggacagtgacagtttgacctccttttttccaatttggatgccctttcttttctgtctgattgctgtggctaggacttccattactatgttgaatagaagtggtgaaagtgggtaaccttgtcttgttccagttttcaggggcgtaggcaaagaattcatgactaagaacccaaaagcaaatgcaacaaaaaaaaaaaaaaaaaactcga

SEQ ID NO: 301 - DNA, 1057 bp, Homo sapiens
ggcacgagccttcttcaagaaaggctgtccaactagctctcacttcctctcgtgtgttcagtgtcacccggaagcagagtttaatgtgactaaagtcaacattggctcacactgtcagggagtgtgggaagatgagtaaggactcatcgcagggcgatacccacagcttaaaataggcaccttcccctcccaggtctggttagggcagttgttacatatgaggggcgtggagttttgtcttgtattttggccttgttggtaaagcattccaaagcttcgacacaccctcctttcagcccattaggaaaggctgttgattgtaatattcacacagctccctgggctatggttaagagccttgcagaaggactgggagaagccctgtgtgtttgaagtattgtagcatcagaaaaaaacaccggaagaaggcaggtggggacaaggtgcctatgtctgctccttggaattcctttccttactgtccgaggcaactacagggaaagcaaagcgtgagcccccaaatccacacctgggaggaacgttcccctttgcaaggcatgggactggctggccctgtgtctcacgggggctctgagttttgaggtcacactagcctcctgaggcctggctgagagggctgggttgggggtcaggaggccccctgtagccacgaagcttcctctggggcattgttaaaggttcaccctctttttttgtggggtatcctggaagatctcaagaaactgagcttggaagaagagaggctgagagggtctcccgccgcctgcgttctctgcagctatggccccacagcctccagtgaccatggaggggaaggtgccacccgccttggctgctgaaagggtgatgctcttatgcctgagtcttggctcctgtggtcctgcagagaccctgtgggggccgcccggtcgtcacctgcactcatcttgggttttccttccttttccaccctaagctgaaggtatttttttcctgttttcttcactctaacttggggaagaaggaagatcctttatggaaaaaaaaaaaaaaaaaa

SEQ ID NO: 302 - DNA, 554 bp, Homo sapiens
  misc_feature (16)..(16): n equals a,t,g, or c
  misc_feature (26)..(26): n equals a,t,g, or c
  misc_feature (94)..(94): n equals a,t,g, or c
aggtcactcattaggnacccccaggntttacattttatgcttccggctggaatggtgtgggaattgtgagcggataacaatttcacacaggaancagctatgaccatgattacgccaaagctcgaaattaaccctcactaaagggaacaaaagctggagctccaccgcggtggcggccagctctagaactagtggatcccccgggctgcaggaattcggcacgagctactaataattattacattttgactaccacaactcaacggctacatagaaaaatccaccccttacgagtgcggcttcgaccctatatcccccgcccgcgtccctttctccataaaattcttcttagtagctattaccttcttattatttgatctagaaattgccctccttttacccctaccatgagccctacaaacaactaacctgccactaatagttatgtcatccctcttattaatcatcatcctagccctaagtctggcctataaaaaaaaaaaaaaaaaactcgagggggggcccggkacccattsgccaaakgggggggttta

SEQ ID NO: 303 - DNA, 1273 bp, Homo sapiens
  misc_feature (37)..(37): n equals a,t,g, or c
  misc_feature (45)..(45): n equals a,t,g, or c
  misc_feature (338)..(338): n equals a,t,g, or c
  misc_feature (820)..(820): n equals a,t,g, or c
ctcgagttttttttttttttttttgttattgcaggtnagcatgtnacattatttgtgtgttgccttccctactagaacatcagctccacaagggcaggaatttttgcctgttgtcaccacgatgtccctggcacccagtatgttcttggtgtctccattgatgatgcagggatgtgtggatatggggcagtggactgtgagcatgtgatgagcatgtgacccagcccctagtgaccgcaccacatggcacaggttgcttataaaaaccattttaaattaaaaaagggaggaagcatcagtgcacacagatggggacacaggggcagagggccagcccnaagtacagtgtggtcaccccacagcccagtggrcccagggcagactcccctcgcagcacagacagctgaggcccgggtgctggttcctctaggtacagctttggtccttgtgggctcagaggtctgcctttcggaaacttgctctgttcaaggagttcctgaggccgggtggggtgggtgccatcagctggggcaggcgctgggtaagcaggggctgcagagcctcccgcaggcggcagtagttgcgctccagctcacggtggtactccttctggtccggcccaatcagggcyttatttttccgcagcgcatcctcacatttcttgcagaagtccttgaagcagagccgcaatttgttgtgatgccggaagarcttggggtcttccgggatctctgctaaaaacacctgggccacctccactggcgtyagcaccgtctcctcccggtggcacacacggatgcgagtcttgatgtaggggaangcktggtcggtgctgaagcagcgtcttacgcttgtgttgctcgggcagctccccgtgtgcgcgcccatccggcgtgaacggcgtgcagaacaggaatgtgcgaagcccatagttgcggtcaaagtaggtcacccggtccttgagctcgtaggtatcaaagtacggttccacatacgtgatctggatgtaggccttttgtgagtcaagcttggacttgtccacagggttagagtctttgataatctcaacgacgtcgtcgccaaatctctccgtgtagaactcctccagccggtgtgagatctctgccagcttcgtgatcgatggctccttgtacacaaactcctgctcatccaggtcaccgaagtgggcgccgtagaagcccacgcggaaatacgtcccgaacacgcgctcccagccggaactctggtgcatgatcttggtgaaggctgtgcc

SEQ ID NO: 304 - DNA, 882 bp, Homo sapiens
  misc_feature (17)..(17): n equals a,t,g, or c
  misc_feature (24)..(24): n equals a,t,g, or c
  misc_feature (36)..(36): n equals a,t,g, or c
  misc_feature (40)..(40): n equals a,t,g, or c
  misc_feature (880)..(880): n equals a,t,g, or c
tggtaaatattgcaaantactccnttactaattggnaacnaaagctggagctccaccgcggtggcggccgctctagaactagtggatcccccgggctgcaggaattcggcacgagcccccttcctgcctcgggctgtgcatctctctctggaacgttctttgcggtctcctcaccgccacttttcttcacacctcaacataaatgccacccccttggaggggccttcctggtttggctgagcctggtcccatgtgggctctgcatgggcccctggatgttaccttggttgtagctgagtgcggatgtggcttgtccacaggaggctgatgtccctgragctgtgacttggtctacctgggcctggacccacgtggccggcccggggcctgtgcgtggccagctcttgcacactgccttagagctggtgtggcttgttgaaccccgttgcagacgcacacgcacgtgggtccccatggctcctcgggacatggaggctgcccrsgctcagggaagagtccttgttgggacctccaggactcttcccagcccccgcctccctcctggggcctccagggcagaaagcccctttcccgggcaggaggacagggtgtggatatacaggctgggagggtctgtgggcagcagccgaggcccaggttgggggagcctcacctaggatgaggctagggctggcagaagatccccacagaggagccaggaggaccccacagtcactctagctcccagggcctggaggtgcaggcgagccccgtggtctccgggcagccggccctgccccactcacctctcctgcccttcccgctgcaaaaaaaaaaaaaaaaaactcgagggggggcccggtacccaattcgargttcnct

SEQ ID NO: 305 - DNA, 1648 bp, Homo sapiens
ggcacgaggtgacgggagcaattagagagcagtagcttctgatgacccacgtgtaggaatgaaggatggggagaactcggcccttacctccttcctgcttccatccatggggcttggagggtctggagagcttcatggtgggcttatttccatttgtgcagaggtggctgggaagctcaggaaccacaggcttttgttttgagtcaattggctttctctctctcttgcagggaagtactacatggccactatgaccatggtcacattctcaacagcactcaccatccttatcatgaacctgcattactgtggtcccagtgtccgcccagtgccagcctgggctagggccctcctgctgggacacctggcacggggcctgtgcgtgcgggaaagaggggagccctgtgggcagtccaggccacctgagttatctcctagcccccagtcgcctgaaggaggggctggccccccagcgggcccttgccacgagccacgatgtctgtgccgccagaagccctactgcaccacgtagccaccattgccaataccttccgcagccaccgagctgcccagcgctgccatgaggactggaagcgcctggcccgtgtgatggaccgcttcttcctggccatcttcttctccatggccctggtcatgagcctcctggtgctggtgcaggccctgtgagggctgggactaagtcacagggatctgctgcagccacagctcctccagaaagggacagccacggccaagtggttgctggtctttgggccagccagtctctccccactgctcctaagatcctgagacacttgacttcacaatccacaagggagcactcattgtctacacaccctaactaaaggaagtccagagcctgccactcccctaattccaaaaaaaagaggaactctacaaaggccaagatcacagagtacagtcttggagggacagaattgtttgtgctgggtattggagctctcagtggggagcacatgggttataatgagaaactgaactgtactgctgcatttcctgtcttccttcctaggtggctgctttgcagggctttggctgttacctttccctgctgaggggctcagggaaaagggtcggggattctcagtcgagtttccagagcaggaggccctacagacatttggccccaaatccctgactcaataaagtaagcgtgtacctagcacctcctcgatgccctgtgttacccatgaggtctgtggtagtggaagctgggggtccaggtctgtctacttcaggtctcatggccgctggcgcaagtccaagttcaaagcctgagaacctgaagttctaatgtccaatggtaagagaaggatgtcccagctccaggaaagagtgtgaatttgcctttcccttatttttttgtcctctccatgccctcccacattgagagtggaacttgccactgagtccaccaactcacacgccaatctcctgctgcaaaccctcacagacacatccagaaataatgctttcccagctgtctgggtattgctggtgtccatggtggtgggttatcagaacttattaatgtcactgtcactaaagttggtatataaccccccactgctaaatttgactagcttaaaaaaaaaaaaaaaaaaaa

SEQ ID NO: 306 - DNA, 762 bp, Homo sapiens
ggcacgaggtgacttcgctcatcacggtcagtcattccttctcctttccagggtgctgggggctggggttccctggcccaagggtccagcctcctctcaccccattccaggtggcatactgcagtctggctctttctcccctccctccccacccaagcctcacctccccaccccttgaacccccatgcaatgagcttctaactcagagctgatgaacaaaagcccccccacccccaatgcctgcctcctcactcctccgtcgctgcccttcacaccttttggtgctacccctccccagagttaagcatggatgtctcctgatcccaggctgggacccctacccccaccccctttgatcctttctacttccacggtgaaaggactgaggtcggactacagagggaagagggacttcccttgactgggttgtgtttcttttcctgcctcagcccagctctgcaaatcccctccccctgcccctcacctccccaggctcaccttgccatgccaggtggtttggggaccaagatgttgggggggtgaatcaggatcctaatggtgctgccctatttatacctgggtctgtattaaaagggaaagtcccccctgttgtagatttcatctgcttcctccttagggaaggctgggatatgatgagagattccagcccaagcccggccccccaccgccaggccatagggcataatttgcatctcaaatctgagaataaactgatgaactgtgaaaaaaaaaaaaaaaaaa

SEQ ID NO: 307 - DNA, 1474 bp, Homo sapiens
  misc_feature (1452)..(1453): n equals a,t,g, or c
  misc_feature (1460)..(1460): n equals a,t,g, or c
  misc_feature (1463)..(1463): n equals a,t,g, or c
gggttcgacccacgcgtccgggtttccaaattatgtttactttgatttgattatatgttggtatctcccaaatataggttaacttagctatttaaatggtatcttttgacatttaaaaagaattaagtacctgtcaaatctwgcattgaggttgcagttgaataagataaaagcttaggatgtcaaaaaataatatagagaaatattataagattttatgattattcttgamgtttttgatgcaaaaggaaaatatgctgaatagttcttccaaaaaatattatttccctcaatattttatttgtagccatgtaatttaaagagaacagaaaataactgcaatcaaaagtatggtttaatatcaatcaaagtggcacaacagaattgataagatctttataacaatcaattggctgatattaaaatattgattttaattgatcttttcaattaaaatctttagggcctgtaactcataaaatcagcatccaccacaatatatggtcattattggtttgtaagcatagatcaccattgactcctacctggagagacatgtctatttctaaaaatccagtagtttctttgcattctcagtagtacacgttgtatatatatatatgtaacaaatttggtagttttcagtatgtgtgatgtcctttgggggttatttatcttgctggtccataggaggggtacactaccccaagaatcaagacatctgagttctagttctagttctagctctgccactgaagagccaccttacctggggcaagttagccattgtctcccagtcatgtttaccacccatgaaaggactcgtcggtttgatgtttccattaagctcaatgagtaactctaatagttactcttgaatctggattgaaaaacaccatgcatctgatgagataattcataaatgttgccccttttttaaatgatacaaccctaaaagtgactgaattgcccaagtgcttgaacatggcagaggtagttactcytattttgcagtttgtgcacttaaaaattcctacagtgattgttactttactggggaaaaaagatgaggtgaaacttcctcccaaggaattaaaatatctgtagaagccatggcttgcttttataatgtggaaatcatttgatttgctgtaattcacgcagatccctccttttgtcagggggaaatgatttgcatcatgttcttttttcataatgcttttacttcctgtttggatcagttgtatgtaaatgtacatttttgttactttgctgtgcccgttagaatttatcttccataaagtatttctcccattgagtctaatgatgtatactttgcctaggtctttccaaaattaaatttatgtaaatgtctattttatataaaatatgattaaaataaaaaaaaaaaaaaaaaaaaaaactcgagggggggcccggtacccaattcgnnctatagncanacggggttaca

SEQ ID NO: 308 - DNA, 1286 bp, Homo sapiens
  misc_feature (1232)..(1232): n equals a,t,g, or c
  misc_feature (1241)..(1241): n equals a,t,g, or c
  misc_feature (1263)..(1263): n equals a,t,g, or c
tatagtggaggggaggaaaggggggtgataccttgcagtaagtaagtcgaaatagcatgcctgaaaatttgaaacagaccattctaacacccaaggcttgtttataaaatacttgagaattacattaatgtggaatcaacagatgcagaagaatataacataacttttaaaagctttcataaataccagcagcaattgtaagcaaatctacaaaggttcttgaacctttctattatatacaaaactgaaaagtcattaaggagttcaactaatcaggaattaaatggtcatttatttcatgcagtatgatttaaggtatttcttgagattctggtcaaatgtcataatcagcaaacgggattaaaaaaaaaactccaaaatcactaaataattatctaaataatggtattggagaacttgtttcctgctatttggaagagattgttgcttcattgctagtttgtatttctaacttctacagttatagactccactgtgctttgtgtctgaatttctcagtatagacattttgtttactgtatgcttgcatatttattttcaactttgyytgtctttaaaattgcttgaggaaaaatggttgtaattaatttctgctacagaaaagccacctggtacgttttgtctcatcaggattgttttaaattctaaactataagtttgttcagaggggcttttgcaatgatagcagaaaactgtacaaatgtacagttagttatagaggttcttgttgaaatgaacttaccatctgatgatatgtatgtacagctgtgtacttgagtcttttttagtttacttagaaagactagcagtttgacctgttaaacaggactagttcaagtcaagaaactaaggttgttgtatacacctggaggcatctgttattcagcttatcctttgagtgggtatttggcacaatgaggataaacttatgtgacccacttgaatggctgatctaataatgttgacattatgcattctgtacttagtgaaatgtcagatgaaaataactgatgaataatttttttgtattaaagggatgggaaaagaacacatgaatttgttaataaagcactatgatctgcaaacgatggaatgtttcataaagatctaaagaaataaaggaaactttaaaacaaaaaaaaaaaaaaaaacycgagggggggcccggtacccaattcgccctatagtgagtcgtattacaattcactggncgtcgtttnacaacgtcgtgactgggaaaancctggcgttacccaacttaatcg

SEQ ID NO: 309 - DNA, 721 bp, Homo sapiens
  misc_feature (673)..(673): n equals a,t,g, or c
gtcctcacccagtatactcctctttttactcagcttgataggaatctttccagtcctctctgcatttatatgtatacatcattcgtattcgtgaccctaataatgatacccagtcagctcacaccagcaagaaaaagtatttttcaagccctctggaagcattggaagctccaagtgagcataagtgaaaataccctaagagatacttccaggttctagatccaggtgtttcattttccccttgttttcccactacattgtcatctctccaaccttatctttagttttgtttttttcatggaagaccagaaagcccctttccccaaagtgttaaaatctggggtgaaggcaactgacctcattgcatactttggcaattcaaagttataaaatgttagccgggcacggtggttcacgcctgtaatcccaacactttgggaggccaaggcgggcggatcacttgaggtcaggagtccgacaccagccggrccaacatggtgaaaccccatctctactaaaaatacgraaattaatcaggkgagatggcgcacacctataatcccagctamttgggaggctgaggcatgagaatcgcttgaacccaggaggcagaggttgcagtgagtgagcagagatcgtgccactgccctccagcctgggtgacagagcaagnctgtctcaaaaaaaaaaaaaaaaaaaaaaaaaaaaaaaaaaactcgag

SEQ ID NO: 310 - DNA, 1210 bp, Homo sapiens
  misc_feature (1204)..(1205): n equals a,t,g, or c
  misc_feature (1209)..(1209): n equals a,t,g, or c
ggcacgagcgacaaagcctttgaccgcatcaccacgaggagtgagaagccactgcggacatcaagcgcatcttccacactgtcaccaccacagacgaccctgtcatccgcaagctggcaaaaactcaggggaatgtgtttgccactgatgccatcctggccacgctgatgagctgtacccgctcagtgtattcctgggatattgtcgtccagagagttgggtccaaactcttctttgacaagagagacaactctgactttgacctcctgacagtgagtgagactgccaatgagccccctcaagatgaaggtaattccttcaattcaccccgcaacctggccatggaggcaacctacatcaaccacaatttctcccagcagtgcttgagaatggggaaggaaagatacaacttccccaacccaaacccgtttgtggaggacgacatggataagaatgaaatcgcctctgttgcgtaccgttaccgcagtggaagcttggagatgatattgaccttattgtccgttgtgagcacgatggcgtcatgactggagccaacggggaagtgtccttcatcaacatcaagacactcaatgagtgggattccaggcactgtaatggcgttgactggcgtcagaagctggactctcagcgaggggctgtcattgccacggagctgaagaacaacagctacaagttggcccggtggacctgctgtgctttgctggctggatctgagtacctcaagcttggttatgtgtctcggtaccacgtgaaagactcctcacgccacgtcatcctaggcacccagcagttcaagcctaatgagtttgccagccagatcaacctgagcgtggagaatgcctggggcattttacgctgcgtcattgacatctgcatgaagctggaggagggcaaatacctcatcctcaaggaccccaacaagcaggtcatccgtgtctacagcctccctgatggcaccttcagctctgatgaagatgaggaggaagaggaggaggaagaagaggaagaagaagaggaagaaacttaaaccagtgatgtggagctggagtttgtccttccaccgagactacgagggcctttgatgcttagtggaatgtgtgtctaacttgctctctgacatttagcagatgaaataaaatatatatctgtttagtctttcaaaaaaaaaaaaaaaaaaaaaaannaaana

SEQ ID NO: 311 - DNA, 1445 bp, Homo sapiens
  misc_feature (1017)..(1017): n equals a,t,g, or c
  misc_feature (1441)..(1441): n equals a,t,g, or c
acagttcgcgtgcgtttccttcgcctacttggcctacatgccttctgcccgtgaagcgatgtttcccctcgaaaggccgtaggctacgccgtcagaatcggtttttcagtgagttttgacccctccgacgctccgtcgcctgacagaatcgcggcgttcttcgtaccgcccatcctccgcggacgcccgctgccatggcgactctgctgcgccctgtcctccgtcggctctgcgggctcccgggcctacagcggcctgcggcagaaatgcccctccgggctaggagcgacggcgccggcccgctatactcgcaccacctccccacctccccgctgcagaaagcgctgttggccgccggctccgcggcgatggcgctctataacccctaccgccacgacatggtcgcagttctaggggagaccacaggacaccgcaccctgaaggtcctcagggaccagatgaggagggatccagagggtgcccagatcctgcaggagcgtccccggatttcgacatccaccctcgacctgggcaagctccagagcctgccggaaggctccctcggtcgcgagtatctccgtttcctggatgtgaacagggtctccccagacacccgagcacccacccgcttcgtggatgatgaggagctagcgtatgtrattcagcggtaccgggaggtgcacgacatgcttcacaccctgctggggatgcccaccaacatcctgggggagatcgtggtgaaatggtttgaggctgtccagactggcctgcccatgtgcatcctgggtgcattctttggaccgatccgacttggcgctcagagcctgcaagtgctggtctcggagttgatcccatgggccgttcagaacgggcgcagagccccatgtgtcctcaacctgtactatgagcggcgctgggagcagtccctgagggctctgcgggaggagctgggcattacagcaccacccatgcacgtccagggcttggcctgagctcctgagccagcggggcctggcntacctcccccatcccctgcttcccttggaggcagagggctcccttgactacctttgttcctcttctttgaacactgacccttggacaacatttatcataatttgtcataaccactgctgagtggccttgaggacgaaccccgcagggagcaagcagtacagtggcattcccagggggaccagcagctacccaaggagaaccatgcatgaacagtatcagtcgtctgggctcatgctgggatgtcgcagtgctcctgttgcaactcctcccagccagccaggtttgctgggggccaggctgggtgtcctcacaggagtgagggctacacccaattccaaaagcctgagaagagagaagtggagggggaggcgagtgtgtgaataaaggctcccatcaggtcaaaaaaaaaaaaaaaaaaaaaaanaaaa

SEQ ID NO: 312 - DNA, 1633 bp, Homo sapiens
  misc_feature (1599)..(1599): n equals a,t,g, or c
aattcggcagagcatagtctttcaaatttggacatttaaaaaagaaacttttactgtagtcatgaagtagtatcaaagtttaccacaagtttgtattgagagaagaacaaacaatatatgctaatatgaaaaacagctctacttagaaagctactgcttgggttttcttattaggcatagttctccagactgagttggttttactcatctacatgatttttccttgccttatggaacagaaattcaggcccactcgaattcagttattttagggctctttaaaatccagtatttgtgatttaaatgatgcggagggactttcattacctgtgtctttgcttatttctctctggccctcagaacaccccaccctgacctttaggggaaattgacagaggcagagggtttcacctgcctcaattgtcaccagccctgttacattcttccttccaagccttagcctcacagggaccttctcattattgaacaawtgccttcaaagcagtagaatagcccaattgttatggagattaaagataccgattgcaaaactcctgtaaataaaatcttcactgacaaacccagtttcttttcataggcttttcttctgtaatctctttctggcagaacatctcatgttttgatgttagagattcagttaccaaccacagtaaataaagcaaaataataatagaaaaatagtatagaactcaccctaaaaacaaacattggccaaccatgtttattttttgtctctctttgcactcctgagaattgataggggaagaatgtaccacctctaattcaggtgatttctgattagcaagctatggaaagtcttcaggttgagttttagccagttcacgctcccctaaatggcatggaatagactattttctgttttaagaaaaaatagaacaatggcactaaatgcttgactgaatgtttgactaaatgttgactgaatcatggataggaaagattgggcagaaaagacagccactgcctccagacacaggatgccacaatcctgggcaccatcattattccatacaaccttagggtcatttttagggtttagaactttctcaatagggtttcaagattttgaaaagtgtcttccaattctgatctccgtagatcctgttatgggaattaacctttttggaaggggattcttgttcttaaagatgaaattccctactttctttcctggagggaatcagtatgggcagagggaagaggagatggcgattctgacctgtgtgtctcatgtcacctaacacctatggggtggcatgaaacttgagctttaaaacacaccaggggccaggcacagtggctcatgctggtaatcccagcactttgggagaccgaggtgggtggatcacctgaggtcaggagttcgagaccagcctgccaacatggcaaaaccccgtctctactaaaaatacaaaaatcagctgggtgtggtggcgggcacctgtaatcccagctacttgggaggctgaggcaggagaatcgcttgaacctgggaggcagaggttgcagtgagccgagatcaggccattgtactctagcctgggtgacaagagtganactccatctgaaaaaaaaaaaaaaaaaactcgag

SEQ ID NO: 313 - DNA, 1406 bp, Homo sapiens
  misc_feature (294)..(294): n equals a,t,g, or c
  misc_feature (1336)..(1336): n equals a,t,g, or c
gaagaaatgtagattgaaagtagaggttgactccagccaggaccaaaataatatagttattttttaggggaactataaaaagaacaacagtttttcctagcatttggcataagacctaggattttaatgaaagttgaaattcaaatgcctgagactgccccatactgtgagggtcttattagccttgtytttggaaggagacttactgtctctcttcctaaatttaaatggcttgttttccctacctatattatggcaggcagagtgggatatttaaggtattgtctattccanatctctgcccttctcattttctagggrttgccctgcattccatttacactgttacacttagacgtgtgaatttgacctgtctcccgggcatttggaaacggggtatgattctactcctagtctgtctctgaagcaggggaggtgtaaatcctggtgacgtatgaactagaggggttggcctgcagtgagggaagcatgatggagttgggtgcgtggagaagggaaaaaaatcaagagatatgctcaagttcctctgtgtagccctccagttcccagagaccccggtgtacttacaacaaatgaaaagggggtgtgttcatattttccttaaattttctcaaggggttttgggaacgttcaaccaaaggtaccctaatatagtggtaaaaaagaagcctgagatttctagagctgctgtgaagamctattagaaggsggartataagattctaagtacgggactaagttactgaaaatgtggccccatagagaaagctgctctacccttcccttagtgcagacattgaggttggggttcattctgtgacgtcatagccttgctttgaactagaaggagaagcatttgttagataccaggttgggttgggataaaacaaacagaatgttgcttctcagtacagctgcctgtttgcagggctaattctctaagggtctcaggatactcagaggcatagcagacttgggcccagagcacagggataggcaaaacttttctgttaagggctacttagtaaatattttaagctttgcaggtcctatggtctctgacattactactcaactgtcccatggtaagataaaagtcacagacaatatgtaaacaaaatggacatagctgtgttccagtgcaacttttttttttgagacagtcttgctctgcctccaggctagagagcagtggcgtgatcttggctcactgcaacttccgcctcccaagttaagcgattctcctgtagtcccagctactcaggaggctgaggcaggaaaacagcttgaaccagggggtcagaggttgcagtgnactacggtgcactccagcctggcaacagagtgagactccatctcaagaaaaaaaaaaaaaaaaactcgta

SEQ ID NO: 314 - DNA, 1282 bp, Homo sapiens
ggcacgagatttttaatttttgttaatatcaacagcaaaagcctagtgcattgggagatgtgcaacctccctgaaaatcttttctgtttctggagtacttcaggggtggcctctggccccagagcctttgccacagtgctcccaccagcccccacctcatccgtctgtttgcagagcctcatctacaggtccccacgctgccttctttactcactctgcgcttggccgttttgttatttggcttagtctacattgggcggaagtctgtgtgcacagagtgggtgttccttcgagccccttccactcagagggccacacccagcgatgccagtgaaggtggcacagcctctcttcagtttctcctgactgtgatctcactggggtagaattcccctgagagaattccctcactcacggctccctttgccagagtcagttcaatcaggtctgatgtgagcaatttacacacttgtctcagaaagtccctcagggtttgtagaggactgcaggggggcatccgctgcagactcagcctttctctgcagccatcctgcagtgggggtgagcgggcacaggctgagaactgctcttgggtggtggaagcaggtgtcacggtgcaagtctccccctgcacccctcccccagcttgagccgtgtcacccccctctccctccagcatgggcctgtgtctcaggctctctggaaggtggccctgccccggaccctcttgcaggtgtcctggtttgacttggaactagatggccatctttccaggctttggtggcccaagagcagtctgggtggatggaagtggctgtcccctcctctccagcccctgcccacccactggtggaggtgctaactagcagggacgtggcataggatgggagctgggcgtgaggtgcttggggtccattctttgtccctcagcttctcagagtccggccagcccttgtgttcccgtgccccacactttcctcctccccactgcagtgagtcaatagtccagggtggggcctggcctccctgccctgattggggactcaggaggtgaggcctggggggcttcctgccccctccttgcccacctgcctgcccccgggcagcacgggagggagagcagggtgagcacgcttgttggtttcagatgcactttctgcttgcattgccgtatctgtgcgttccttcatcctggtcctggctttatggaacaccatgtttttagcatgtttttaaataaaaacggataaagtgtcaaaagcaaaaaaaaaaaaaaaaaaaa

SEQ ID NO: 315 - DNA, 1053 bp, Homo sapiens
ggcacgagcccggatggaagctccggccgcggagtgatggtggcctcagcgaagatgggccgggcagggaccatggcggtggcagcagagcttcgagagctgtgcccaggagtgaacaaccagccctacctctgtgagagtggtcactgctgcggggagactggctgctgcacctactactatgagctctggtggttctggctgctctggactgtcctcatcctctttagctgctgttgcgccttccgccaccgacgagctaaactcaggctgcaacaacagcagcggcagcgtcgaaatcaacttgttggcctatcatggggcatgccatggggctggtcctttccctaccggttcactgcttgaccttcgcttcctcagcaccttcaagcccccagcctacgaggatgtggttcaccgcccaggcacaccaccccccccttatactgtggccccaggccgccccttgactgcttccagtgaacaaacctgctgttcctcctcatccagctgccctgcccactttgaaggaacaaatgtggaaggtgtttcctcccaccagagtgcccccccccatcaggagggtgagcccggggcaggggtgacccctgcctccacacccccctcctgccgctatcgccgtttaactggcgactccggtattgagctctgcccttgtcctgcctccggtgagggtgagccagtcaaggaggtgagggttagtgccaccctgccagatctggaggactactccccgtgtgcactacccccagagtctgtaccgcagatctttcccatggggctgtcttccagtgaaggggacatcccataagtagttttgagagggtggatgggttacttgcccaccagaaacagccctagtcccaactccttgcgttcctttggcccctccctgcctacctagaatctgcctgaaagggctggagaggggcagtattgggggactgtgctagctttacccccgcaggacatacacaggagcctttgatctcattaaagagatgtgaaccagctaaaaaaaaaaaaaaaaaa

SEQ ID NO: 316 - DNA, 1238 bp, Homo sapiens
  misc_feature (19)..(19): n equals a,t,g, or c
gctgcagaagacgacagangggtacggctgcgagaagacgacagaaggggggattggccggaagcaggcgccgcttcgaggcccgcggaaaacgcgcgccgagacccgctcctgcagtattagttcttgcagctggtggtggcggctgaggcggcatggatctcagcgagctggagagagacaatacaggccgctgtcgcctgagttcgcctgtgcccgcggtgtgccgcaaggagccttgcgtcctgggcgtcgatgaggcgggcaggggccccgtgctgggccccatggtctacgccatctgttattgtcccctgcctcgcctggcagatctggaggcgctgaaagtggcagactcaaagaccctattggagagcgagcgggaaaggctgtttgcgaaaatggaggacacggactttgtcggctgggcgctggatgtgctgtctccaaacctcatctctaccagcatgcttgggcgggtcaaatacaacctgaactccctgtcacatgatacagccactgggcttatacagtatgcattggaccagggcgtgaacgtcacccaggtattcgtggacaccgtaggatgccagagacataccaggcgcggctgcagcaaagttttcccgggattgaggtgacggtcaaggccaaagcagatgccctctacccggtggttagtgctgccagcatctgtgccaaggtggcccgggaccaggccgtgaagaaatggcagttcgtggagaaactgcaggacttggatactgattatggctcaggctaccccaatgatcccaagacaaaagcgtggttgaaggagcacgtggagcctgtgttcggcttcccccagtttgtccggttcagctggcgcacggcccagaccatcctggagaaagaggcggaagatgttatatgggaggactcagcatccgagaatcaggagggactcaggaagatcacatcctacttcctcaatgaagggtcccaagcccgtccccgttcttcccaccgatatttcctggaacgcggcctggagtcagcaaccagcctctagcagctgcctctacgcgctctacctgcttccccaacccagacattaaaattgtttaaggagaaccacacgtaggggatgtacttttgggacagaagcaaggtgggagtgtstctgcagccgggtccagctacttccttttggaaccttaaatagaatgggtgttggttgattaattttaaaaaaa

SEQ ID NO: 317 - DNA, 1954 bp, Homo sapiens
ggcacgagcggcacgagcttgagttagaagaacctcagctctgtagtgatcttattttactgttttcccaggatagaatgcccttggtaccacatactgtatgcagagtatttatgattgcttgagtacagttccttggaaaggacacaaggggtttcataaagcggtactaaaaatctgcttttctccctagcatttaccaacaaccttgcgatccgatggcttgaaataatggtcagagtgcatgttacccaacttctcctggctgctcctactctgtcacactgcacacagatcatgcccgccaccaccctacactccccgacctcacccaccagtcagacagtttaagtcctgctgacgcaccaggcgtgtgttggctcgtggttgtacttttcatgagtagcagggaagatacactccaggaaggygggatacaaattattgaactgtgtgacttaaaagctccagtgagtttcgtcggaagtataggagtttgaaagtgctccccagtcaaacccagaactacatagggtcagccgtggttgagctaatttctgcttacacatgtgtggagggtgtcattttctgactacgcctaggcctgagtggacagccgattaaaagatgtaaattcgtggattgtatcaaggagagcgggttccatctttgtggtcaggagggggcccactcttttgttccgcaaagggtttatctggatgttccttgctggaagttgcttttccagtttggatcaaaccacttaagtggagctccagcctcagtccttgcaataaaaaaaaaaaagtcctggaaagccagaattttgctaatatcttacatagaatctcaatgatgggaattgggagtagaaggcagagagtggtgcttggctgatggaagttaaaagttgggttaataataaactacatttatatatcagttaacagcttgctaagtgcccacatattatttgagcttcatacttgcttgctgagaaagaatggctattattatcattatcatcattaccactttccattttatagataacaaaattgaggctctgagaatttaaagagattttccccaaatcattaaacggtgacttctgaatctggatatatgacaagacctctgtccccagtccccttgctttcacctctataatatatagtagctaagctcagctttctgagaacttccctgkcttatgtcatatttgacattataggagaattgaagatgttttgtaagtacatactttgtttactacctcagtagccagtataacaaatggcactgaagttttatgctttgcttgctaaaaccagcaccatttgtgaaacaggtcttggctccgagttacccttaaatgtaactcctttattataaaatcatttgcaargagctgcagagawcaaggaatasactcttcccacttccctaatgccaggtagtactatgacaggacttcatagtaccacttcttcaacaaaataagtgtctgcagtgaaatatttgttaaaatgcacatttctcagtgaatatatttcttttaaaactgaaaaaaatagtacctaacggaaattttatcattgctttaaaatgtattttaatgaagatattaaaaaatacctttgatggattcttcaatattgtcgaactgctcaaaatgattatactgttatatgaagtctaaaatctttcatgcaacttacaagaatatttttgttgtatgcaacacagttggaaaattctagtgggaccatgtccatgcaattactgattatgtaatgctgtaaatttttgataagcatgttccaagttttcctgttctaaaaacaaaaacattaaaatcacccactgttgaagacaaaagatcattactttattaggagatattattagatatgtttagaactagttaaaaaaaaaaaaaaaaaaactcgag

SEQ ID NO: 318 - DNA, 464 bp, Homo sapiens
cggcacgagctggtttctacatggaagactaaactcatgcttattgctaaatgtggtctttgccaactaaatttaagatgcagcattttagaaatttacatatcaatgtttctacagtattgtttgctaatttttaaataaagtcatgatcagtgtgcatttgtgattatatgtgtactcattctcttacctagcgaacaagatcttttcagagtggtgtttctaaaagagcatgtacaaaagtggcctgtggacatttaggcctgggtgatgcatttgctcttcctgtttgtgccaatgtatcaatgtagagttgctctgttttcttcaactgtatttattgctgcatttctcagcataaacttatcccattgtattttttataaataaatattttttttgaactttaaaaaaaaaaaaaaaaaaaaaaaaaaaaaaaaaaaaaaaaaaaaaaaaaaaaaaaa

SEQ ID NO: 319 - DNA, 2206 bp, Homo sapiens
ggcacgagctggactccctgagtttgttaaaatagtagaagttgggcctagggatggattgcagaatgaaaaggttatagttcctacagatataaaaattgaatttatcaatcgactttcccaaactggcttgtctgtaatagaagtgactagctttgtgtcttccagatgggtaccacagatggctgatcacactgaagtaatgaaaggcattcatcaatatccaggagttcgctatcctgtccttactcctaatcttcagggttttcaccatgctgttgctgctggagctactgagatatcagtttttggagctgcatctgaatcctttagcaagaagaatattaactgttccattgaagaaagtatgggaaaatttgaggaggttgttaagtctgcaagacacatgaatattccagcacgagggtatgtgtcttgtgctctgggctgtccatatgaaggaagtattacaccgcaaaaagtgacagaagtgtctaagaaattgtacggcatgggttgttatgagatctctctaggagacacaattggagtgggaactccaggaagtatgaaaagaatgttggaaagtgtgatgaaagaaatcccaccaggtgctcttgctgttcactgtcatgacacatacggacaagccttagcaaatatccttacggcccttcagatgggaattaatgtggtggactccgcagtatccggattaggtggctgcccttatgcaaaaggtgcttctgggaatgtagccactgaggatttgatatatatgcttaatggcctggggctcaatacaggtgtgaatctatacaaagtgatggaagctggtgactttatttgcaaagctgtgaataaaaccacaaactctaaagtagcacaagcctccttcaatgcttgacttgaatggatttatgacgtaccgttgagaagatcaatttcagctacaatactcatctgaaaatcattaatgccaacttgctctgatatgtgaagtaatggacaagaatgggaaaaaagagatccttttcaaaaagattataactggatagattaagtcaacaaaatgcaatatcagtcatcaggtaaattgcaagctgaggataaataataaaacttgtcataattttgaacttggaaaaaagtttcttttgctctcatagaaataactttttaatttagtagatgggaaaattgacttcgtatttccccaagtatcaaatactgtgttaatacttaatcaagcaggcttaacactgtgtacatattgtcagtagtttatgagctcctgcatagtatgcagagtgtgtggcctcaatattatacattatgcctctggatctcaactactcatttgccaagtcagttatgttatggaccaaaagccaaatctccatctgaccctacataattttagcaatagaacttttatatttcaagtatggctaacatctgttaactatttcagtgactttatctggttccaagaggctgtggccaatggcaagatgccatatcctggaaacatattacgacctcccatgtttgttacatgcatccagtttaccacactttacctgtcatcagttatagtaaaaaccagcatggtgttactcaactattgagaaattgtaagctattttttttgtcctgatgtctaaattgcagtgataagaataggttgatacatgtatcataatctacctttataattttcagatcactttcaaattgcccaaggaaatattgtgatcctaagaatattaagataattttaggttaatgaaatacccattttccttttattcatggtgctttgcttacccacattattttttggtgtattttttagtggttattttagaagttgaagtggctgaaattttgtctattgtcttagaattgattgccagaaattgcaagatgtaatatatcaaagtcagggatgaggagcaggaggactattcaagataaacttctgtaacctatgcatattttatgggggcagtattattacaaatggatctgaaatgtcagttctagtatttagagagacttctctaataataccgggtgatattatctttgagtaaatttgaatataaattgaaacataaaaatgagtattgtgaactttctcggaaatattcattaaaaccattgaaataaaaataaattcaagaaaaaaaaaaaaaaaaaa

SEQ ID NO: 320 - DNA, 956 bp, Homo sapiens
aatttcccccaggtccctgcaggtaatccagggaccccatagggagaacaggctgactggggcattaggaatgtttgtacctctctgcttccctggcagcctggggaagggtgcagggctcagtgcgctaaaccatggtaaacatcttcaatagaactaccctagaatttagtgagtgtgagactgagatattgctcagaataaatttattccatagccatttaggattgcatgttctggacaaaccttgtccagtatgttttctgtttgagctttttcattcttttgttaagccaacaagttgagaatttggccctgctgggatccatgtagtgggcactagctgctctttggccaaggccttcataaatgattcagtctctcattatctgtcctctagccccacaccctgatttagaccgtggcaaaggaagaacttgaggtcaagaccaaccaaatctgtgaattaaagctgttatttttttctctgcaagggcgctttgcttcaggtctgggctatgtgcagaacctaagcaggctgtgagagttagaagaggcagtattacatgttaggcccagaacaccatgggaaaaggtttatgtagtgtatcttagtggcctgcctagctgcctctggggccaggctgacttctgatgtccacattagctcgtacctgaaccctgttgctgaatgccagccctgttctcctgtaactattatatacgccatggcctggggggcattgaaggaagtaagctctcagagatcctaacactggctgggaacctctgactcagagcatgtctttaaagagtccacatctggccaggcgcggtggcacatgcctgtaatcccagcactttgggaggccgaggcgggtggatcacgaggtcaggagtttgagaccagcctggcaacatagtgaaaccccatctctaataaaaaaaaaaaaaaa

SEQ ID NO: 321 - DNA, 1198 bp, Homo sapiens
  misc_feature (362)..(362): n equals a,t,g, or c
  misc_feature (1081)..(1081): n equals a,t,g, or c
aattccccgggtctagttcatttccactcatatctatttctgctaatagattgacagcaacctttggtttaatgctgtgttctctagctacaccaacaagttatatattcctttccaatattaaccaagtatttattttatgttagcctatgactgagttttatctatgcttgcacatatatagaatgtaaaaatataattctccatgtttaatgtatccatataaaaatgaaaatacccattttctgcattcttaaagggttaagaaaagtaacatgtaataagcacatggaggactttagaccatttcttgtgttagaggagactttatacatttgtgaggttttctgtcttttggtccntttatgktcttagtccattycattattgttttaatatttctaccaggratgaccargaaargrgaaaggaggaaaaaaatgtgttaatcattttcttttaatggtatgtcagcagaaggggttctgactgtaagctaatgtgcacttgtgcctgtcccctttgtcttaaactaaagttggtggtatgaatcgaaaaatgtgtattggkttaaaaagcmgtttatgatwtgaaacagtcttccagtttttatatcaactcctttgctttcaacagtcagttcaaagcaccatttattgatggtttactgtatgccagacactgtatttttyctttasgtattaccctacttaatcctcaacacaatttwatgaagtagtwattgttagcctgaaactggcatttctccayccttttatggtgctgtctttgaaaagtctcagatgtgtaacatgtcctagaagtagataattatcaaaggaagactgcaactgcaactcacttccctctgagaaaaaatatccctgactagattacatatctagttccagaccagaacctggtggtattaaaagtgttttggttgactattgtataccataatgagtacctacattcccaaattgcctgcctggttgttgtacagacttaaaaatctagcctgccttgatttttacttttcagatacacatgtttaaagagatctttgctggtcacagtngctcacacctgtattcccagaactttgggaggccaaggtgggaggattgcttgagcccaggagtttgttcaagatcagcctgggtctctacttaaaaaaaaaaaaaaaaaactcgag

SEQ ID NO: 322 - DNA, 2174 bp, Homo sapiens
ggaattccccgggggaatgggccactgattcatttcgtggttaactggaatactgctttttaattgatacccagctgtatctaaatcattacaatactggacagatagtgtagtgcagagtatttgaaatgcagtgctttgtttggcaaagatttatttaatggtttcattttctctgcaagaagaaaaaaagcagatcatcgaagctcttattatttgcactgtggcagattcacttgagttcagaagcctagggaaaaggtgggacttttgaaactagggcagtaggtaaatgtggacacaccttcgtttgtatttgattagggatctgacagcgtgcatatgtgtacaggtttgcacgtgtgcatacacacatatacaaatcatagaaaaccataggtgttctgtgagagagaaaattttgctacttaaatacagcgtgaattctcatcctgatagttgcagaaaatatttcttttaaaatggagattaatgtctaattccatataaagaagattataggaaaggtgatttaaactgtaagtagctttgttcactaaaacgctagatttatttgaaacagtgttttatttcttttggaaggcagacaactagtttaatagtgtacatatgaaacgctaatttggcttgttaattggatgcaattaaattgaggttattttatactgcttaattgttagaaaattacatgcgttgccatgcctgtgtaatgtgaagcaaaagcgaagggtatagcaggagtgggggtgggagggacgcaagatctagtcctgtctttgcaattaactttctgtgaaaacttggaaacaagtcatcgaagctctttggacctcatttggaaatggaagagattggaacagatggctcctaaagcttcttccagctcatattctatcagtttataaattctactttgtagttgtagagaatgcaatgtcattatattctgtaattatggtattacaaggatgaactaaacacttaaaaaaatcagcacagtgccaatttagcaaatccgttagaaggaaggcaatttaggcttaaagagcactcacctgtgccaggctccatcccaggctctctctccacattacgtcacttagccctcacaaccaacctgagaagatttagttttttatcttgatgtgtatacttaaagaaacttccattcggaaaggttttgtggggatgctttgctagtcattggtgaagcaggattcgaactcagggttctttggctccgaaaatgctttgtctttttacccatttcacgcagtataagcaattgtttacacatcaaaattatttcaaatatttaaaaaaggccaaccatatttatcacttagcacaatgtttccccttagtagtatatggataaacaggtagcccacgggattaagaacctcgatttgaagtcagacagaatagggcaaattccagctccaccaccacctgggggaatttgggtatgttacttaacctccctgaggttacaaaatgaggataatacccattcaagagtcattgggaaatttttatgagaatgtttgtacccatctcaatgagcacatagtaaacgtttaatacctggtagctatgggttattattaacaaggtattagactataagaaaaacataggacaattcaaattgttgtgacagtaaaatattaaatattttcaaatggtccattaaactcttgactgaaatggtttaagaaacaatgttagaatgacatggtttcacatttaacagttaacaaatggaaatatcaattaaaatctggggtgtttctcactgagctcagccagtgctatgccaatgaagtgaactaaattctctggttctttgtggaaaatcattctgaagtttttgctctaaaaatagcttttggggcctgaattaccccttaccccactcgaacttctgtgcaagagccagaggaccagtgattactcgtggggcccttgggcctacttaagagactcaacttgggtgttcacaggactgttgactttaattctaaaaaaatttattaattcaacagagatttattaagcacctgctctgggaaagggctgttctagacactggagatccatcaatagacaaaaatagtaaaaaaaaaaaaaaaaaactcgagggggggccc

SEQ ID NO: 323 - DNA, 682 bp, Homo sapiens
  misc_feature (665)..(665): n equals a,t,g, or c
  misc_feature (673)..(673): n equals a,t,g, or c
  misc_feature (677)..(677): n equals a,t,g, or c
gagtcaatattttttggctttgtagataaagacttaaatttttgtgcaacatagtggtgttaaagcacacatccattggactatgcaaatcaatttctactagcagcactgagcaactgggcacgtgctagtacgcaccccctcctactctaactgtgctagctcttgggttgaggaatggaatgggtagccttctgcttactggagatgcacagagaaacatggctgaaaacagctttaaaaagaacatgtctttgggttcatgtgtggtgctgctgcccgggtgtaaactatccccacccagggccagccattatcaccagacctcttctgggcctggctgtgaagccctgtttttggtattcagaatggatctttaaggctcagatgggctcaaattgaaaccttgtgttttataaaatggatgtttagtaaaggaactggttctcagttatgtttacagcacttggaattgtgtgttcttgtacattttgtattttaaaaccttttatgggagtgcagtgctccttacacaaatacaaagggaagaagagccagcagttgaggctcctcagttttagtgctgaaataataaacagtgacaggtcaacagtaaaaaaaaaaaaaaaaaaamctcgagggggggggcccgggtaccccaaatncgccctanaagngaggc

SEQ ID NO: 324 - DNA, 1743 bp, Homo sapiens
ggagaagagagaggcaagggcaggagtgaaggagagagctgaagcctggggctccgagatggtcagaggatgggagacggggcagtgaaacaaggcttcttgtatcttcagcagcagcagacgtttggaaagaaatggcgccgcttcggcgcctcactgtatggagggtcggactgcgccttggcccggctggagctgcaggagggcccggagaagcctcgtcggtgtgaggctgcccggaaggtcatccgcctcagtgactgcctgcgggtggccgaggccggcggagaggccagcagcccccgggacaccagtgccttcttcctggagaccaaggagcgcctgtacctcctggcggcccctgcagcggagcgcggcgactgggtgcaggccatctgcctcctggccttccccgggcagaggaaggagctctcggggccagagggaaagcagagccggcccttcatggggaaatctaattgtacagcttgcgcagtcacagtcggcccccacaaggaatttgctgtgaccatgagacctacagaagccagtgaaaggtgccacctgcgggggtcctataccctccgggctggggaaagtgccctggagctgtggggtgggcccaagccagggacccagctgtacgactggccctacaggtttctgcggcgctttgggcgggacaaggccgtcgctgcgtctctggagagggcaactttgagttcgaaacccggcaaggcaatgagatcttcttggccctggaagaggccatctctgcccagaagaatgctgcacccgctacaccccaaccgcagccagccacaatccccgcctcgctgccccggcctgatagcccctactctcggccgcatgactcactgccgccgccttcacccaccacaccggtgcctgctccacggcctcggggccaggagggggagtatgccgtgcccttcgatgcggtggcccgttccttggggaagaacttcaggggcatcttggcagtccctcctcagctcctggccgacccttctgtacgacagcattgaggagaccctgccccctcgacctgaccacatatacgatgagcccgagggagtggctgccctgtccctctatgacagcccgcaggagccccggggtgaggcatggaggaggcaggcgacagctgacagggaccctgctggcctccagcatgtccagccagctgggcaggatttctctgcttctggctggcagccaggaactgagtatgacaatgttgtactaaagaaaggcccaaagtgacagaggcagcagagggatggtccaccgccccttggcttctgctggtgactcctcctggccactgcatcagaagaacctcctctgccccttctggagcccgaggcctggcctgtcttcgttggggctgataaattgcctctcccagggcctgctgggtgagtcaccatcccaaagcaggaagggtgccctggagagaaccaccctcctcctactctttttccacttcctcctctttctttccccagctgaggaggaacctggggcatttagggcagaggacaaaaggatgtcagcaattgcttgggctgcttggctatgcaagcctcctgcctgctgatggccacttcagggacagcctgggcccaggcacccagggggatggcggcagcttcctgcacctttcagatttcttggtggcaattaaagcattttcagaacaaaaaaaaaaaaaaaaaa

SEQ ID NO: 325 - DNA, 825 bp, Homo sapiens
ccacgcgtccgtgctgaggtagaggcagcgcaagaagaggcctttgccgctggtcgggattgggatgtcgaagaacacagtgtgcgtcggcccgcttccggaaggtggacgtggatgaatatgacgagaacaagttcgtggacgaagaagatgggggcgacggccaggccgggcccgacgaggggtaggtgggactcctgcctgcggcaatgatccttgcattcaccgccctccccaccccagcccagcccagcccgcccttctcctggggacccgggagcctgcaggatccgcggggcaccggcgcggagctgccctctcaacctgcggcttaacctgtctctttgggatcgcccgctctgaaaaggcaagggggaatcccccgtttcctacccagtcggcaggaaacgcgaaggtcccactcttggaaacctgccctcccccgcgcgccttccacgcccccagattcctcaggttggacccgaatgcctgcctgcctcgggaactggtcccgccggccgcgccctcgcggcgctttggggaagcggtcccttgctggtggggaaggctggtgccgaacgccttagtttttcttcctagaactctgatttcctggggtcacattagctccagaaatttctgattgtggggaacctgcatctttccttagtggttttgttttttgttgtgtttttgttattggtagcgttaacgtagtttattccttaccggggggcggggggagatgggactgttcgaaaattgagggtccctgtgctttcagcccattggcctttttaaaaaaaaaaaaaaaaaaaaaaaaaa

SEQ ID NO: 326 - DNA, 2221 bp, Homo sapiens
ccttgtcctcggcttggaacatagcttctcttttatatggttaacaaatgcctatttgtttggtggcctggcaaacgaaagcgaagattcaaacaataatgttcccagatatttaaatgatttttatgagttggagctacagcatggctctggtgttgtgggttggagcattccagtgactaaaggggttgtgccttctccaagagaatcccacacagctgttatatattgcaaaaaagattctggaagtcctaaaatgtatgtttttggtggaatgtgtggtgctcgcctggatgacctatggcagcttgacttagaaactatgtcatggtcaaaaccagaaactaaagggacagtgccacttccacgaagccttcatacagmcagtgttataggaaacaagatgtacatttttggtggatgggtcccacataagggggaaaatactgagacttcacctcatgattgtgaatggagatgtaccagttcattttcttacctaaatctggatacaacagagtggaccaccctagtatcagattctcaggaagataaaaaaaattcaagaccaagaccaagagctggccactgtgctgttgcaatcggcactcgattgtatttttggagtggaagagatggctacaaaaaagcactgaatagtcaagtttgctgcaaggatctttggtatcttgatactgagaaaccaccggcaccatctcaagtacagctgatcaaagccactaccaactcctttcatgtcaagtgggatgaagtgtctacagttgagggctatcttttgcagttgagtacagacttgccataccaagctgcatcatcagattcttcagcagcaccaaatatgcaaggagtcaggatggaccctcacagacaaggcagtaataacatcgttcctaacagtatcaatgatacaataaacagcacaaaaactgaacagccagccacaaaagaaacttcaatgaaaaacaaaccagactttaaagcactgacggattctaatgccattttatatccatctttggcatcaaatgcttctaatcataatagtcatgtggtggatatgctaaggaaaaatgaaggtcctcacacttcagcaaatgtaggtgttctaagtagttgcctggatgtaagaacagtaattcctgaaacatctgtatccagtactgtttccagcacacaaactatggtaacccagcagaccattaaaactgaatcatccagtacaaatggggcagttgttaaagatgaaacttcactaacaacattcagtaccaaatctgaagttgatgaaacatatgcactgcctgcaacgaagatcagccgtgtagagacacatgctacagcaacgccgttttctaaagagactccttcaaatccagtggccacagtgaaagcgggagaacgacaatggtgtgatgtgggaatttttaaaaataatacagctttggtgagccagttttatttgctgccaaaagggaagcaaagcatctcaaaggtaggaaatgcagatgtacctgactacagcttgcttaagaaacaagatcttgktccaggcacaggatacagattcagggttgctgcaatcaatggttgtgggataggtcctttcagcaaaatcagtgaatttaaaacttgtattcctggttttcctggagctccttctgcagtcagaatttcaaagaatgttgaaggtatccacctttcctgggaacctccaacctcaccttctggaaatattttggaatattcagcctacttggctatccgcacagcacagatacaagataatccaagtcaacttgtgttcatgaggatttattgtggtcttaagacatcatgtatagtaactgctgggcaacttgcaaatgcacatattgattatacatccaggcctgccattgtgttcaggatatcagcaaagaatgaaaagggatatggaccagctacacaagttcggtggcttcaaggtaacaataagaaagcacctttaaattgaattggtttttttactgaagctattgtgatgatgattatttattagtaactggttatgaagatttgtcatttaaaagagtattctctggctgtatttccagcagttatgaacttgagtttgtaaattgttcttaaaatgtatttgctgaattatagatccaaataaaagaaaagaagcaaagacaaaaaaaaaaaaaaaaaactcgag

SEQ ID NO: 327 - DNA, 1662 bp, Homo sapiens
  misc_feature (382)..(382): n equals a,t,g, or c
gcgcgttcctgcaaaggtagaggcacgggctgggggcgaccaggacggtgcccgcccacaagtacgtcttggctgtcggcagctccgtcttctatgccatgttctacggagacctggcggaagtcaaatctgaaattcacattccagacgtggagcccgcagcctttctgatcctcttaaagtacatgtacagtgatgagatcgatctggaagccgacacggtgctggccactctgtacgctgctaagaagtacatcgtcccagcattggcaaaagcctgtgtcaactttctggagacaagtttggaagccaagaacgcctgcttcctgctgtcccagagccggctgtttgaggagcccgagctgacgcagcgctgctgggnaggtcattgacgcacaggccgagatggccctacggtccgaagcttctgtgagatagaccggcagacgctggagatcattgtcactcgggaggccctcaacaccaaagaggcggtggtcttcgaggccgtcctgaactgggccgaggcggagtgcaagaggcaggggctgccaatyaccccacgaaacaagaggcatgttctggggcgagccctctatctggtccgaattccaaccatgaccctagaggagtttgccaacggsgctgcccagtcagacatcctgactctggaggagacccacagcatcttcctgtggtacacggccaccaacaagccccgcctggactttcccctgaccaagaggaagggcctcgccccgcagaggtgccaccgattccagtcttctgcctaccgcagcaaccagtggcggtaccgcgggcgctgcgacagcatccagtttgcagtggacagaagggtatttattgcagggctgggcctgtatggctccagctctgggaaggctgagtacagcgtgaagattgagctcaagcggctcggggtggttctggctcagaacttgaccaagttcatgtcagacggatccagtaacaccttcccggtctggtttgaacacccggtccaggttgaacaagacaccttctacacggccagtgccgtcctggacggcagcgaactcagctactttgggcaggaggggatgacggaagtgcagtgtggaaaggtggccttccagttccagtgctcctcggacagcaccaacgggactggggtccagggtgggcagatccctgagctcattttctatgcctgaggtgcccggggaggctgcagcaggtcagcgagtgagtggaggggaagtcaagatgctaactgcttcttgacaccatgaaaggctgctcttaactttgtctctctttgacatgtagtcagctgaagcttgactgtgtagagacattttccacacagccagaacccagggattggagtcttaggcatctctggtacagtggggtgcacgtctcaggtggaggaagatttacggctcaagacaggccccagatcccctcccagtggcacccaygccacctgctttgaggggttggatcttcctgctaccctcttggattctaagtggttccaagcttaacttgagaccttcccttcaaatctaaaattggcaaaaagtcacttaaaatagtggacttctgtaataaaggttgcctaaaataaaaaaaaaaaaaaaaaaactcgaggggggg

SEQ ID NO: 328 - DNA, 2055 bp, Homo sapiens
ggcacgagtttcccacctcggctgcacctgggcactggaggctgaagagcatgccccctagcttcggtactctgacaccttctcttgcacttgcggatgatgaactggaataacgatgaaagaaagcacatccgatctcaacattcacgtcctgccctataaccgattaattaattgatccccagctagactagtgttggagaaatcagcatgttaaaacaactgttgatgatagctgttggagtaaagttgcagtggaagctatggctgcaaaatcgttaaaatcttcaaggtgaactggcacaaaggttaatctcaagatgccgctagtgaaaagaaacatcgatcctaggcacttgtgccacacagcactgcctagaggcattaagaatgaactggaatgtgtaaccaatatttccttggcaaatataattagacaactaagtagcctaagtaaatatgctgaagatatatttggagaattattcaatgaagcacatagtttttccttcagagtcaactcattgcaagaacgtgtggaccgtttatctgttagtgttacacagcttgatccaaaggaagaagaattgtctttgcaagatataacaatgaggaaagctttccgaagttctacaattcaagaccagcagcttttcgatcgcaagactttgcctattccattacaggagacgtacgatgtttgtgaacagcctccacctctcaatatactcactccttatagagatgatggtaaagaaggtctgaagttttataccaatccttcgtatttctttgatctatggaaagaaaaaatgttgcaagatacagaggataagaggaaggaaaagaggaagcagaagcagaaaaatctagatcgtcctcatgaaccagaaaaagtgccaagagcacctcatgacaggcggcgagaatggcagaagctggcccaaggtccagagctggctgaagatgatgctaatctcttacataagcatattgaagttgctaatggcccagcctctcattttgaaacaagacctcagacatacgtggatcatatggatggatcttactcactttctgccttgccatttagtcagatgaggtgagcttctgactagagctgaggaaagggtattagtcagaccacatgaaccacctccacctccaccaatgcatggagcaggagatgcaaaaccgatacccacctgtatcagttctgctacaggtttgatagaaaatcgccctcagtcaccagctacaggcagaacacctgtgtttgtgagccccactcccccacctcctccaccacctcttccatctgccttgtcaacttcctcattaagagcttcaatgacttcaactcctccccctccagtacctcccccacctccacctccagccactgctttgcaagctccagcagtaccaccacctccagctcctcttcagattgcccctggagttcttcacccagctcctcctccaattgcacctcctctagtacagccctctccaccagtagctagagctgccccagtatgtgagactgtaccagttcatccactcccacaaggtgaagttcaggggctgcctccacccccaccaccgcctcctctgcctccacctggcattcgaccatcatcacctgtcacagttacagctcttgctcatcctccctctgggctacatccaactccatctactgccccaggtccccatgttccattaatgcctccatctcctccatcacaagttatacctgcttctgagccaaagcgccatccatcaaccctacctgtaatcagtgatgccaggagtgtgctactggaagcaatacgaaaaggtattcagctacgcaaagtagaagagcagcgtgaacaggaagctaagcatgaacgcattgaaaacgatgttgccaccatcctgtctcgccgtattgctgttgaatatagtgattcggaagatgattcagaatttgatgaagtagattggttggagtaagaaaaatgcattgataaatattacaaaactgaaaaaaaaaaaaaaaaaaaaaaa

SEQ ID NO: 329 - DNA, 1247 bp, Homo sapiens
aattcggcacgagagtccacacagcaatctcctttcctcttcagtgagaacacctctcctttgatcaacattatttattcggcttagtttaaaattcctcttgaggagaagtttctgggactaaacatttgaaaatatttgaaataaaaaaattacctgtttttaagtgacaaaaattattaatttataagttacttaggaatgttctcaggtgcaagtaacagatgacacaaacacagcagattgaatcggcgatggtacaattttctcatgtaacataaatgcagcagctgcatttgttgggtggctcagtggccttttgggcttttccttcatggttgcaagatggcactactccaactcaagcatcatgtttgtattcaagacagaaggaaagggagacggtttgtatcagtcactctgacccttttatcagaattgcataagtgctcttagaagcagtctgcttctccctaagatctttgctcagatgttattgggcagagcttttttgtgtgtgtagtgtctaatggttgcaagggaggttgggaaaaatgattcttttttttctggcttttatagtggaagcaggcaaaagattagttgggtgtagttgttgggttagccggtcatcatgctctgcccctaagtgctcagaatactgaagactaaagatgcaatgacaaacaagatagtccttattgtttttgtttgtttgtttgttttttgtttttagatacagctataattttattacaaaactgttcttttggcattagttagttacagtgatagcaagataatgtgagtgtgcagactggctctgatggaaccactgtattccctgcttactgaaccaaacttcagctacctcatatccattacatacaagtgacctgcagttattactgctacaaatcttgacgcgtgtaccgctgagggaggagctgatgctaagggatttgattacatgttgataagactacaaaagttcgtttatgggactttttcttcctcttcccatgcaatgactttgctttagaacaatcacatggcttagagctagtctgagtagcagcagcacccaaggagcgtcagttcttgttaaaaagcaatacctgtgtgatgcatttttacgccacaggcaaagggaaggatcaccctcattttaaactcctgcagagtcccttaataaaatatcaaagcattccaaaaaaaaaaaaaaaaaaaaactcgagggggggccc

SEQ ID NO: 330 - DNA, 1587 bp, Homo sapiens
aattcggcacgaggtcgactggaatacttgggagatgagatgacaggtctggtcatgaccaagacaaaaactcagcgtggcctcatggagcccatcactcacatcaggaagccccactccatccgggtggagacaggattaccagcccagagggacgcttcataccgctacacctgggatcggagtctgtttctgatctaccgacgcaaggagctgcagagaatcatggaagagctggatttcagccagcaggatattgatggcctggaggtggtgggcaaagggtggcccttctcggctgttactgtggaagactacacagtgtttgaaagaagtcagggaagctcctctgaagacacaacatacttaggcacattggccagttcctctgatgtctccatgcctattctcggcccttctctgctgttctgtgggaagccagcttgctggatcagaggcagtaatccacaggacaagaggcaggttgggattgctgctcacttgacctttgaaaccctagaaggcgagaaaacctcctcagaactgactgtggtcaataatggcaccgtggccatttggtatgactggcgacggcagcaccagccggacactttccaagaccttaagaaaaacaggatgcagcgattttactttgacaaccgggaaggtgtgattctgcctggagaaattaaaacatttaccttcttcttcaagtctttgactgctggggtcttcagggaattttgggagtttcgaacccatcctactctattaggaggtgctatactgcaggtcaatctccacgcggtctccctgacccaggacgtttttgaggatgagaggaaagtactggagagcaagctgactgcccatgaggcagtcaccgtcgttcgcgaagtgctgcaggagctgctgatgggggtcttgaccccggagcgcacaccatcacctgtggatgcctatctcaccgaggaagacttgttccggcacagaaatcctccgctgcattatggagcaccaagtggtgcaaagccctgcaccaactgtggcgccagtacatgaccctgcccgccaaggctgaggaggccaggccaggggacaaggagcacgtcagccccatagccacagagaaggcctctgtgaatgctgagctgttaccacgctttaggagccccatctccgaaactcaagtgccccggcctgagaacgaggccctcagggaatccgggtcccagaaggccagagtggggaccaagagtcctcagtggaagagcatcatggaggagatcctggtggaggaaagcccagatgtggacagcaccaagagcccctgggagccggatggccttcccctgctggagtggaacctctgcttggaggacttcagaaaggtccgtgggctgctggacaccctggtgaccgacctgatggtcctggctgatgagctcagccccataaagaatgtcgaggaggctttgcgcctctgcaggtgactctcgggcccaagcaaccttctggaaaacgggttaataaataaatcaataaagaaccttcaagtttctactaaaaaaaaaaaaaaaaaaaaac

SEQ ID NO: 331 - DNA, 1282 bp, Homo sapiens
  misc_feature (907)..(907): n equals a,t,g, or c
ggcacgagccttacccctctgctggcaagaggggacctgattcatcctcacgctaaacactcattctacccaactgattgagacagaacagaagataaactgaaacttctctgccttcccgctgcaagagtgaatgagcgatccctctcaactgactcaaaatgtttgcctcacccaggagatggagctctcgaaggccttctctggccagcggacactcctatctgccatcctcagcatgctatcactcagcttctccacaacatccctgctcagcaactactggtttgtgggcacacagaaggtgcccaagcccctgtgcgagaaaggtctggcagccaagtgctttgacatgccagtgtccctggatggagataccaacacatccacccaggaggtggtacaatacaactgggagactggggatgaccggttctccttccggagcttccggagtggcatgtggctatcctgtgaggaaactgtggaagaaccaggggagaggtgccgaagtttcattgaacttacaccaccagccaagagagaaaatcctatggttatccctgggaacgcagatcacctacatcggacttcaattcatcagcttcctcctgctactaacagacttgctactcactgggaaccctgcctgtgggctcaaactgagcgcctttgctgctgtttcctctgtcctgtcaggtctcctggggatgtggcccacatgatgtattcacaagtcttccaagcgactgtcaayttgggtccagaagactggagaccacatgtttggaattatggctgggccttctacatggcytgctctccttcamctgctgcatggcgtcggctgtcaccamcttcaacamgtacaccaggatggtgctggagttcaagtgcaagcatagtnaagagcttcaaggaaaacccgaactgcctaccacatcaccatcagtgtttccctcggcggctgtcaagtgcagcccccaccgtgggtcctttgaccagctaccaccagtatcataatcagcccatccactctgtctctgagggagtcgacttctactccgagctgcggaacaagggatttcaaagaggggccagccaggagctgaaagaagcagttaggtcatctgtagaggaagagcagtgttaggagttaagcgggtttggggagtaggcttgagccctaccttacacgtctgctgattatcaacatgtgcttaagccaaaaaaaaaaaaaaaaaaaaaaaaaaaaaactcgagggggggcccggtacccaat

SEQ ID NO: 332 - DNA, 806 bp, Homo sapiens
  misc_feature (25)..(25): n equals a,t,g, or c
  misc_feature (29)..(29): n equals a,t,g, or c
  misc_feature (37)..(37): n equals a,t,g, or c
  misc_feature (44)..(44): n equals a,t,g, or c
  misc_feature (143)..(143): n equals a,t,g, or c
ttttgacccggattaacaaattttnaccnccaggaancaggctnttgaccaatgatttaccgccaagctcgaaatttaccccttcactaaggggaacaaaagctggagttccaccgcgttggcggccgctctagaactagtgnatcccccgggctgcaggaattcggcacgagcggcacgagcgcaaagccatcgtggacaagtttggcggggcagcttccggccccacggccttgttccgcaacactaaggcagccggggcagccattggtggtgtcaagaacatgctcttggagtggtgccgagccatgacaaaaaaatacgagcatgtggacatccagaacttctcctccagctggagcagtggtatggccttctgtgccctcatccacaagttcttccctgacgcctttgactacgcagagctggatcccgcaaagcgccggcacaacttcaccctggccttctccacagcagagaaactggctgactgtgctcagctgctggacgtggatgacatggtgcggttggctgtgcccgactccaagtgcgtctacacatacatccaggaactgtaccgcagccttgtgcagaaaggactggtgaagaccaagaagaagtgaggaggtgactggctctgtgggcagagatgggcagggtgcccagctcagcagccacggcccgggggttcccttctgctccatggaggcaccagagccaggggcttaggcaagggtgtgtggcgttggttttaactgcattaaaagtacttttgtaaaaaaaaaaaaaaaaaaaaaaaactcgag

SEQ ID NO: 333 - DNA, 981 bp, Homo sapiens
ggcacgagctcgtgccggtgctctccagacctcctctctaaactgcttcattgacctaagtcactctcttcaatcccacctttgttacgttgaaatccctcatttattttcttctcaaaatgcccattatccaaatgcagaacctctgcatctccaagccagttatgctgaatttgtcaaacttagacacccttgacaactgcactcctactgtaggctcctgtgcatactgtcgtcttctgtgggggatggagaggttagtgtgatgaggtggtgtctgcccaggaggtttctttcaaacatcatggcctcccatccaatcaacatcatcaaattacatgtgtaatcaaggctctgtgccatgggggaaatgaatcatttagctaggccaggatctagtgaaagccacagagtttaaaaccatgaaagaagttgaaggcagcattcctcagctctgtgacttgtgaccctatttgaagtttcaggatttgggtgtcacaaaggattgtccctaatccttggccctggggtcttccgagtgagctggtttaatactctgagaatgagcagggagatccagagaatgaatccctgaccgcatcacctaaactgtcttccaaacatgagacaaagctgactgttcacactgattgcccagcacataccgtcttgccagtttcttcttttctcccagtctcctgttcatccattctgttctcccttggggtgggaatctatgatggaggttactggggaaacagctcagcagatttttggagaccaaaccaaaggtctcactaggaaatttatctgttttaaaacattgcttccttcctggctctgctaaattgaatgctcattgtttgttgttgttgttttttaattctaatgttcaaaatcctgcgtgctgtatgaatctagaaagccttaatttactaccaagaaataaagcaatatgttcgtaaaaaaaaaaaaaaaaaa

SEQ ID NO: 334 - DNA, 1402 bp, Homo sapiens
ggggaaggccccggacccgcaggacccccaggacgcggagtccgactctgccaccggatcgcagaggcagtccgtcatccagcagcctgccccggacaggggcacggcgaaactgggaaccaagaggccgcaccccgaggatggggacgggcagagcctcgagggcgtctctagctccggcgacagcgcagggctggaggccggcagggccctggggctgacgagccgggcttgtcccgcgggaagccctatgcctgcggcgagtgcggggaggccttcgcgtggctctcgcacctgatggagcaccacagcagccatggcggccggaagcgctacgcctgtcagggctgctggaaraccttscacttcagcctggccctagccgagcaccagaagacccacgagaaggagaaaagctacgcgctggggggcgcccggggcccccaaccgtccacccgcgaatcccaggcgggggctarggcgggcggtcccccaragarcgtggagggcgaggctccccccgcacccccagaggcgcagaggtgagccgctgtgctgtcccgttccggaggggccgctttgccggccgtgaatcccagacgaggcattgggcctttccacgcccctgggtggcggcttcctgtggtgtttgtggacgtcctctgcctgtgccctgaatccgctcctgaggctaagcgctcccaacgagaagggtccacgggaagccctcacctctgtaaacacaccctgggccagcgctcgcatccgaggggagccgccggatgtggaagaagactcggctttcctgcagccatttagtgccgccccatgctaggttatttgacattgtgcagtgtagagttgccttaaagtgcgtgatctgccagtgctttcttcaagtcacccttgccccgattcctcctgtttgcgctccccagggttgctcaagtggaaattttgtcagctgtttagccttttcgtacttggcgtgatgtcaacttcacttctaatctgcaaaagcagaagctgtttcctagtttacctcgcgtgtgtttacctatatggagtagctcgcagagatcacagaaatgcttgcagcctaaggcagggttttcagaccgtgggtcccagcccatttagtaaaatgggaaatcaattagcaagtggtcaccagcattacacagcaatgaagcagaataaagtaggccagaatgcatcatgtagtaaaggcaaatactgttttgtgaaacttttcacccatacatctaaatgtgagaactggttgcaatgtaagacatttcttgctgggaagttgtgagcaaaataagttgaaaacactaataaagatctgtctgtctgagcaaaggagactaaactccttgggctacataaaaaaaaaaaa

SEQ ID NO: 335 - DNA, 1523 bp, Homo sapiens
ggcacgaggttgtcttccatggcctgtttctcctgctgtctgggtgagtgagcctgcaacgcaatgcccatgagagtaaatgcctcctgacctaccctgctcagcactgttctagtgtcttggccttgaaagaaaagcctgacttcctgctgacacatgtggtaggggcatggcagctatgaggcacctcctacgtctgttttctggctgtggtgacttgggatttttaaccttatatatctttttcctttactcaaaacaaaacaatttttagcacactgaaaaaaaaaaaaagccaaatgttttgtgcctttctaaggcagcactgtatcccaggctgcattttaggacttaatatggaaataccagagtctgagctcctctaccttgagtttcattagtccttagtgtctaggagacaggaaagaatgctctctgtgactggagaggtgacatgcaggtgcagtgtgtctggagtccctttcccctgctgtgagacttcagtggaggagagaagcattgtaccctgggatcatttggttggttccaatcacaagcttagttatcaggttgcatgccttgtctcctgcaaaagacagaatgtttcacaattcccaggtaaactctggaccattccaagtgtcctagccttctgatgacattaattacctagttgtgtcgaggagtataggatggactctcctgagaaggggaggttggtggctttgtcttttctttttgctggatcctgaactggtctagacctcctgcccccaccccccagcccccatcagatgtggctggcctttcatttgaaggcttcagacttaaagcattaagcagctagtgccctctgcagggcctggtttccccagggaagggcagcaaggaacatgggaccagaagcctgtcctcagtaatgtgactatagtgagctttagcaaaagtttttctatataatgacatcttacttatcttttaccctttcctcagttttcccctgcctttaactaataaagaattgggagacagaaattttaaagtcctccttattcaagattttgaaattcttagcctgggagtgctggagagaacctgatgctttctccagaatgaagagtcccaatttgtatatcagtgttaagaagaaaacaaaacaaacacataggtgagattttcgtggactattttaaaaatgtgtcattaatataaaaaatttatattagcagtatttaatcattctcacctgtaaagaataagaaaaacagaaggtaaatattcttacagagaatagcagagctttaagattcattttcattttaagtccattttattttgccagtgtattaatgtttagaagtctgttttactaatgttatttattaattttttttcatttccatacacagttagttaactaaagagctttttcaagcacccatgtctgtaaaaaaatatttttaaataaagtttcttttgttgtagcagaaaaaaaaaaaaaaaaaaaaaaaaaaaaaaaaaaa

SEQ ID NO: 336 - DNA, 2116 bp, Homo sapiens
ggcacgagcctgattctacactgggaagttaggggtagaagcacacaggagcccagcacttacagccagtggccctgggggtctcctccagctccacctcatgacaccccgtgctgctgcgtgactgctcctggtgccaaggccaccgctgccatgagtctgaatggctaatgctgagattagcagggcctcccttctactggcctgtcctcctggctctcctcccttttgcctcttctggatttcaggtcagtttgaaagtgggtggctgtctcagctccctgtgagcttccatttccagtctacgctacggaagtcagagagctcagacacaaatccctcccaatggcaaaggtgctatagctgcaacttcctctgcagtgacccggtgggcagtaatctgtattagcagaattcctctcatgccagcaccagctgggggaggagagggtagtgcctgggcattctgctttgggaagaaaaaggacaatcaaaaccaagtgaaatccaaccaccatggtgtacccaacaggtggagtgggctgcaaagtccttaaacatctcaacaggagaagtagctccattttgcgggcaattattttctgcttgaaattagctgttctcaccaagaatggactgcatactaaatcaattgctccactgaggctgccataagcttcatgaagcaaagaatgattcattcttctaaagctgtgatttcctatttgctcacaagccattgcaggggaaatcctcatctttcccactcactgctacactcactgtgatgtgtttatagaccttcggggaccacacctcctccagctgtctgccttactcgaaaattagacccagcttgtccctgacttctagtagccagaaagtcttccacaagatccagccgcatgatacggagtacacacataaatgtgaaaacaaacccctccatcctttcccactgtaaatcaacagcacatgccctctgtgtctgacaattcctctcaaagacagtggctccagcagaggaaattaaggctggtgcaggtgccccagaagctgagtcatccgggatgactggtggccctgaagtcccgcccacagaaggacggccatgggagcctggcacactgccccttggtggcacaaatcctgagcaagccatgccctaaccttaaacaaggacctaggactgttttctctcccacagcctctgagaacttgccctttctctcccaatgtgatttgtaaacaattctcctacccagcctcaagtaaatatcagagttaagctggtttcatacaccatgttgacagtaaacatcttagaggacactttcaatccacccacactgcagctcagtccatctgcacaaagagaagaccccccccccacccccatcgcggtccaacttgggggtacatagatggaaaggcagcagtagtcagcaggtcaactctgtctgaaagaggtccatggcaatgtaaataccaatctactggcaaccacaaagcacccacatagacaggcactgcaaggaatggagggtttgaagaagcaggtcttgatggagttttaaagacacaaaacctccttcctttcagggtcaagggtttgttgattccgctactctgatgtggaattcaaagagatggataattatcatcctttctaagtgctgttttccataatcaggtccccgtgcttatccacatccacactccccttctctcacaaagtcctacttgtctcctgggagcccctgcacgcctcccctctctgaatctctgcgaattttcacttataaaacagtaacaactctctcaaggtcatcaaaaatggcagaacagtgttcccccatctctgaaaaatatgaatgtgagaaacggtttcatactgctgagagaatttataagacttaagcagaagaatcttcagatcccccatcccccagagatttttgcaaatgagccagcccagccacaaaaatgtatgcaaacttgaagataaaatggaattaaaatatgttttaaagagaagcaggctttggaaaaatgaggattttaataaaaacagaaattacgacaatatttctaccacaaaaaaaaaaaaaaaaaa

SEQ ID NO: 337 - DNA, 1768 bp, Homo sapiens
cgcggtcccaacccttccccatggccgaccctgaggagttgcaggtttcttcgccgcccccgccgcctccctcttctccctcctcttcagacgcctctgcagcatcttccccgggcggcccagtgagtttgggctggccagttccgagcaggagcagcggcccaacggtggaccagctggaggaagtggagctgcagatcggagacgcagccttttcattaaccaaacttcttgaagccacatctgcagtatcagctcaagtggaagaacttgccttcaaatgtacagaaaatgcacgtttccttaaaacgtggcgggacctcttgaaagaaggctatgattctttgaaacctgatgactgatttggcatacttcgttgtttaataatgactgcaataattcatacttcttatgtcatattttgtacatgtaccacacatataggatgacctctgtccagcagttctgtatatactcagaatgaaatttttcttggttttcttggtttttgtgaaagcagaataccgatgctatttttgttgcggaccagtacttgtttgtccttaaatactttatgcctctgaactttcatagaatcctttatgaaagttaacttcatcaatagacggttaatattaatagagccacagtgctaccagtagcaaactaggtagaccattatttgttttgcaacaagatgctaagcatggcagactttgaagttgcgtttcatcttaaggaccaagggaggtaactttaaggttgccagtggtggatccagctccgttaggctaagttgtctacagctaatgattgtgtctttattctatatccccagcacctaaaacagggtcacacaacattcactaaatgtttgttgaataaaagagttaacaaacataattgaaagctttttttcttcctatatttagcatgaagactgtcattgtttctctaggaaatgtatgaatctgaacttttttgacttgaagaaaaacattctttttttacagagatttggactttgatgataggttttaaaaatatatgataaatattttttgtacttgtttgatttttttttaaagactttacttcagaaagggaaagactgtttagaaagaatgcatattttttccctatttatttctgtggttactgcttttgcagtttaacagtgtttgtatttgatatttgtatatgtttgattgctatctttaaagtgccttatcagatttatggctctgtgctattactttttgagctttgcaagttgtgtacataataattctaaagaagttactttgtttgcaatgcatcaaatttaaatgatgtgattttttttgtattatttgatcttagtgacagtgttctattttgcatcctgtatcttatgttgcttttggtgttttgtgttgtgtgtcaacgattaagccaactaattctctaccatatataacttctggacatttttgatacaacatcttaattctttgtagatatggagataggtacagaactatattctaatgccccacaatggggctatgagaggggacagatggatgggcaaagaatagttttgtttaacatattaggtcatagttcttgattagtttttttagttaaagataaacacatagggtgtgatttctataccaaagatatgcttatttcagtattagaaaaatattcttcttacatctcctgaaaattgcaatttttaaaatgtgtaaaaataaattattattaaaagcaaaaaaaaaaa

SEQ ID NO: 338 - DNA, 1092 bp, Homo sapiens
ggcacgaggccgctttccccaccattgtctctttagggcctggtgtctgcccccgccctgggtgcacccatttactagcacggggccacctggttggtggggggcagaaacaaggcatggaaaaacatgacacaaatcacgtctggtaccatgctgaacctgtccatccaaaatgcctcaggcttctactcacattaaagctccccctcctcccagcccagagcctggcaattaaagtgaacatcacgtacgaagaaacatgcacgtgcgggcagctgataaatcaggaccggctctgccaattaactggtcttacatcttctgctgagagttcagaatatgtccgtgtcagccaagccccagcccaggccacagcatgtggctcgggttcacgagaaggaggggatactgctccttggggacctaagcaaatacaagaagccatcttaacttgctaatgattactaagtgctccaaagctaagaggcagaaagagcagaccagaggagagggaagagaagagggaggaggagtgaggatggcacccgaatctggaaccctttagtgagtaaaatcagtcaggtacacttggctcttgcagaccctttgtgtgtaaataaatctggatgtgggcaggcgccaagtatgatctgaaacaggcccaatcccaccctgcgagggaggtgtatgcaccctgatccctggccgcagagcgcaggggctggcggggagagtggcactgcgtgcgccgtagccggcctgcaggaggattgccttacacagctctgaactttgcgtcttttaaaataccaaggggcagtcgtttacacgtgaggctgactgcccagaatgggagattcaccttgactatatggaggtgattctgctagttttccgaggcaaggggaacccaaaatgacagtttaaagcacaaacatggccatttgtcacagcttcgggaagaaatggggaaaggtgctgagagaaaatccgtttcttacaggagacaaacaccgtttggggatgccaagcatggtttcccaggggcttcccctttctagaagagttcaccttgtacctaaaaaaaaaaaa

SEQ ID NO: 339 - DNA, 2101 bp, Homo sapiens
agccggcctcgcacttccggtggggagattccggcctggagctcccagggccgagcagaccttgggacctgtgagcgctgcatccaattaaccatgggaagggtcagcaccagccaccagccccttaggtgaggactctgcctggggctctgctgatggttccgaatcatggagctgcagagagctcctccagcctggagacgttcttggtgaaagctgtggtctaactccaccggctcttcctgcacattgtattcaagaggggtgcctgcccccgctgactcaggagctccggtgctgcagccgccacgaatggggaggtgggccctcgatgtggcctttttgtggaaggcggtgttgaccctggggctggtgcttctctactactgcttctccatcggcatcaccttctacaacaagtggctgacaaagagcttccatttccccctcttcatgacgatgctgcacctggccgtgatcttcctcttctccgccctgtccagggcgctggttcagtgctccagccacagggcccgtgtggtgctgagctgggccgactacctcagaagagtggctcccacagctctggcgacggcgcttgacgtgggcttgtccaactggagcttcctgtatgtcaccgtctcgctgtacacaatgaccaaatcctcagctgtcctcttcatcttgatcttctctctgatcttcaagctggaggagctgcgcgcggcactggtcctggtggtcctcctcatcgccgggggtctcttcatgttcacctacaagtccacacagttcaacgtggagggcttcgcttggtgctgggggcctcgttcatcggtggcattcgctggaccctcacccagatgctcctgcagaaggctgaactcggcctccagaatcccatcgacaccatgttccacctgcagccactcatgttcctggggctcttccctctctttgctgtatttgaaggtctccatttgtccacatctgagaaaatcttccgtttccaggacacagggctgctcctgcgggtacttgggagcctcttccttggcgggattctcgcctttggtttgggcttctctgagttcctcctggtctccagaacctccagcctcactctctccattgccggcatttttaaggaagtctgcactttgctgttggcagctcatctgctgggcgatcagatcagcctcctgaactggctgggcttcgcctctgcctctcgggaatatccctccacgttgccctcaaagccctgcattccagargtgatggtggccccaaggccttgaaggggctgggctccagccccgacctggagctgctgctccggagcagccagcgggaggaaggtgacaatgaggaggaggagtactttgtggcccaggggcagcagtgaccagccagggcaaatggcttagaagcaggccactccccagcctgctgccagcactcactgtgctcaagccgccagggctcatcatggtagctgggagctgtggacgggagtcaccaggtggtggggccaagccagggactcatgacttttgcccctcccttcagagcctggtcacacaaggggcgagcaccaggccagcctgggactggccagagctgggcccaagctgcgctggaatcgcagcaggagaggggagtgggctggttcttcccaccacttcccaggctctgacagccgagactcatttccaaggcacagcagctttctaaagggactgagtttggactgggttttggacctccaggggctggagcttcatcacctgggcagtgtcttttctcagagagcaggtttctttatagtttggaaataaatggttcacggtccactggccgccttgtgttgctggagacgtgggggcagggaggggacagtgtgggcctggcctctcctttcctttccctgcctggagccttcttcaaatgtctggtcttaagccaggcctccttcattttctcgctcctgttagaacaccagtcccctycccagtggggccccactgcacctgctggcaggaaataaatgaatgtttactgagwaaaaaaaaaaaaaaaaaaaaaaaaaaaaaaaaaa

SEQ ID NO: 340 - DNA, 920 bp, Homo sapiens
gagcacctcaggggaggtgaaactcaggtggtcttgtggcatgcgtgggtgtccctctgcactctggcctctgtgctcttgggtgctggtgctgtgtcacacgccagggcatgtgaaggcaccacaggtgtgaacgagtccccgatgatgacctggggggaggttgagaacacacccttgagagttgaagggtcggaaacgccctacgtggacaggacacccggcccagcttttaagatcctggagccaggccgcaggaacggctgggtctgaagatggccaacgaggccgctgccaagaaccgggccaagaagcaggaagccttgcggagagtgacggagaatctggccagcctcacccccaaaggcctgagcccagccatgtcgccagccctacagcgccttgtgagcaggacggccagcaagtacacagaccgggccctgcgggccagctacacaccatccccagcacgctccacccacctcaagaccccggccagtgggctgcagacccccacaagcacaccggcgcctggctctgccacacgcacccctctcacacaggacccggcctccatcacggacaacctgctgcagctccctgcccggcgcaaagcttcggacttcttttagagccaggcctgggctgggctcatagacgcttcacagagcctgcagggcagctgtacacccagcagaggactccagccttctcggggcccaggcctgggccagaagctgttgaccataccaggagtcactggagaaaggggctgtgctggggccagactggcacaaggcactcgtgcccacaccacaccccagggccttgccaagctgtttgctgtttaattggccccttgaactgtcattaaagaacacctaggtaaaaaaaaaaaaaaaaaaaaaaaaaaaaaaaaa

SEQ ID NO: 341 - DNA, 1444 bp, Homo sapiens
  misc_feature (444)..(444): n equals a,t,g, or c
  misc_feature (739)..(739): n equals a,t,g, or c
  misc_feature (758)..(758): n equals a,t,g, or c
  misc_feature (949)..(949): n equals a,t,g, or c
  misc_feature (959)..(959): n equals a,t,g, or c
ggcacgaggtggcttggagccagcccaccctcttatgaagtaccagtttcctcatcttcaagacagaaacagtaataggacttagcccatgaggttgctgttgattcggtgaaatgatattcataaaggtctgagcacagtggctgggacataagcactcaaacatcagctgctatcactatcgtgtccttccagtaccttttgaaaccttgtgctgatgaattcagaaagcagccctaaggctccctttccctgtgctgctctagccagtcccctcccaggcaggcaaggaagcttctccaccaatgagcctctttatgcactcatggttccatgtccaggcaggcttgggcagctggagtacagagaagcgtarggtgccttcacatacctgggatgcaaaccctgggggccagcatctcgggccgcagtggagagctgcangggccgaccctgtgactgykcacagygtwkatggggttccgcaggatggagctcacagtggtgctgggggtcaaactccggggaacagtgcctagaaatgggcttggtgagaaaagacgccccaaaggacccagccagcccaggactwacacaagcctttcccctgtatcccaggacscasccgcagtcttttgggaaaaggacttgggagatgagttttaaccaccaattcacaatgtggctgtggctcctggcctgtctccatttgtaaaaaggggggaagtctctttcatgnttcctatttcccaggttgntatggggagaaagcatgttgacaagctaagacatgtcatggatataagacaaaccatcccagacaggacagcatttcccarttctctggacctcagggctgaaaacacatggcagctctctgaaatgctgcctcccctctccctggagaytaggcatcccgaktttacaccgaccttcagcccccagcccntggctggctnactcacccacagacggcctgctagggtatagcggggggttgctgtgccggctggaatgcccaggcgagtaaggtgcccactcctggagctccggggagagttctccactggccgggacacacttctgttcctgcagatgcaagggcaagagtgtctgctagaaagagtggagtgtggccaggcgcagtggctcacacctataatcccagcactctgggaggccgaggcgggcagatcacctaaggtcaggagttcaagaccaccctggccaacatggcgaaatcccgtctctaccaaaaatacaaaaattagctgggcatggtagtgggtgcctgtaatcccagctacttgggaggctgaggcaggagaatcgcttgaactcgggaggcagaagttgcagtgagccaagactgcaccactgtactccagcctgggtgacagagtgagactccatcttagggaaaaaaaaaaaaaaaaaactcgag

SEQ ID NO: 342 - DNA, 1318 bp, Homo sapiens
  misc_feature (557)..(557): n equals a,t,g, or c
ggcacgagaattaattgccagccttggttcacactgatgagtgtgctcattggagagactcagcatgcaaaagaaaagactcatcaatttgcagttatttaatttcacgaactgccggatggtggagtcagtagcagcggctgggccgcaacatggcgcctcccacctagacttccggtcaggaaacttccaccttcctccgatttacgtgggcctgcatgagcctacttctcttcttattctagtgccagtggcctctgggagtcttggtccttcttactggaatagccctcctctcctgttacagaggcaataattctccagccttccggtcgccgccaaagcctcctgcctaatcacttcctgtattgtctccctgcggctctttgcacagaccttgggctccgtcgtctctggattcttactgatctcttcctcttctcccaaccgccttgtcatgtctctttgagctatgtcaggaggaacggaagggcactttcttactacttttgttagccaaacggacaaactgtcccctcccctttgttgtaaccacncattcaaggcttccttcagtccagccccatctcccttttcgttgcctccctttcactactccaaatgagcttgccatactttaaacgggtcttgtactttcttatcccttctctggaatgtcatttctactgaagaaaatcctactcttccctcaagacccttctttaatcccctcttgccatggaaacttgagattttcattgaggagctaagttggaaaatataaactagagctgagtctctaccctggcactattgacatttggggccagattattcttggttggggagactgttctgtgcactgtaggatgtggaacagcctcccaggcctctacctgccaaaagcacactcccctttccccaagtggtgacaaccaactgtttccagacattgccagatgtcctgaggtgggagtgagggtgaacagaattgcctcccagctgggggctgctggactaatcaacaagaagtggcaaggactgcaggcaaattgcctcagcacttagatttagcactgcaaggccacttcgacaggtggtagtgatttgtgcgtctcatttcctattcttgattgtgacaaggttctggaggatggagacagctacccctgccacagttcccacaggctatgttgtacatagggcttcatatttaacatgtgagtgaatgaaacacatgagcccgagtgctcttcaggacggcaaggcctacatcaagatggtaaaccttcagttcttaaaaaaaaaaaaaaaaaaa

SEQ ID NO: 343 - DNA, 1260 bp, Homo sapiens
  misc_feature (1203)..(1203): n equals a,t,g, or c
  misc_feature (1235)..(1235): n equals a,t,g, or c
  misc_feature (1241)..(1241): n equals a,t,g, or c
  misc_feature (1246)..(1246): n equals a,t,g, or c
ggcacgaggggaagatggggcaaggaggggtgggaaaataggtaattcatggctgcttctctaagatgtgcctgcctagccccagtaaacctacctccctccatccctgccaggccatggtggcgtgttacccaggcaacgggctcgggtacgtaaggcacgttgacaatccccacggcgatgggcgctgcatcacctgtatctattacctgaatcagaactgggacgttaaggtgcatggcggcctgctgcagatcttccctgagggccggcccgtggtagccaacatcgagccactctttgaccggttgctcattttctggtctgaccggcggaacccccacgaggtgaagccagcctatgccaccaggtacgccatcactgtctggtattttgatgccaaggagcgggcagcagccaaagacaagtatcagctagcatcaggacagaaaggtgtccaagtacctgtatcacagccgcctacgcccacctagtggccagtcccagagccgcatggcagacagcttaaatgacttcaggagagccctgggcctgtgctggctgctccttccctgccaccgctgctgcttctgactttgcctctgtcctgcctggtgtggagggctctgtctgttgctgaggaccaaggaggagaagagacctttgctgccccatcatgggggctggggttgtcacctggacagggggcagccgtggaggccaccgttaccaactgaagctgggggcctgggtcctaccctgtctggtcatgaccccattaggtatggagagctgggaggaggcattgtcacttcccaccaggatgcaggacttggggttgaggtgagtcatggcctcttgctggcaatggggtgggaggagtacccccaagtcctctcactcctccagcctggaatgtgaagtgactccccaacccctttggccatggcaggcaccttttggactgggctgccactgcttgggcagagtaaaaggtgccaggaggagcatgggtgtggaagtcctgtcagccaagaaataaaagtttacctcagagctgcamaaaaaaaaaaaaaaaaaaaaaaaaaaaaaaaaaaaaaaagggcggccgctcttagaggatccctcgagggggcccaagctttacgcgtggcatgcgacgttcatagctcttcttcccttaaagttgaattcgttatttanaaagcttaggcattgggccgtcctttttttanaacgtncgtgnactgggggaaattt

SEQ ID NO: 344 - DNA, 1915 bp, Homo sapiens
  misc_feature (490)..(490): n equals a,t,g, or c
  misc_feature (1899)..(1899): n equals a,t,g, or c
ggcgaagaggggcgsaackcrttgcgttttgagtctcgggacccctgttggagagactatggcgctcaacaagaatcactcggagggcggcggagtgatcgtcaataacaccgagagcatcctaatgtcctatgatcacgtggaactcacattcaatgacatgaagaacgtgccagaagccttcaaagggaccaagaaaggcactgtctaccttaccccttaccgggtcatctttctgtccaagggcaaggatgccatgcagtccttcatgatgccattttatctcatgaaagactgtgagatcaagcagcccgtatttggtgcaaactacatcaagggaacagtgaaggcggaagcgggaggtggctgggaaggctctgcttcctacaagttgactttcacggcagggggcgccattgagttcggacagcggatgctccaggtggcatctcaagcctccagaggtgaagtccccagtggagcctatggntactcttacatgcccagcgggscytatgtctatcccccgccagtcgccaatggaatgtacccctgccctcctggctacccctatccaccgcccccacctgagttctatccaggaccccccatgatggacggggccatgggatacgtgcagcccccaccaccgccctaccctgggcccatggaacctccggtcagcggccccgatgtcccctccactcctgcagccgaagccaaggccgcagaagcagccgccagcgcctattacaacccaggcaatcctcacaacgtctacatgcccacgagccagccgccgccacctccctactacccaccggaagataagaagacccagtaggccctcctgcctccctgcctcccaccctcatctctctaccctacccctcccatcggggctgtgctggggcttggggaggggagggggcgccttgttctccctccaggtctgatcataaacaattaccaggaactagcattgtgggacattagggcccccggcctcgggagaggtgccgcccagcttcccatgccagcccggagcccacagtgctgcccagcgtacctccctcaccgtctggggctcttctgggagcacggagcatcccctgttcctgtttcactctcagcttctcccctcgaagggactctctggccacctcctccaccgcagtccagctccctcagtctggcacccactgctacactcagcctcatgagccacttcagaccagccaggtgtcttcccgggccctgccagaccctgctcacattccctctgctggtctgtgctggtctcagaaggccaccgcgcccgcattccactcagccagggtccagctgcagcccccgccacccttccttcccttccctgtcctgggtcatgttgttgccaccctgtgtgacttttgaagctgtaaaatgagcttccagggcttgggtggcgtcggggcagggccgccgaggctgggaggaagcccttctgccttttgctggtgtttctggaatttgctttccctcacctctcacttccttctagaaggagcttcctgactggaaccagagaatgcatgtctgtccacttggtggctgctgggtggggccgggaacaagggcccctgaccctgtgtgctggccgggacctgccaccagccccccagcctgcttcttccccttaagctttgtgcccctggatgcgctaacattcactcttgtttgtccctggactggccatgaagtgaggagatggttatttaaagagaattccctatttatttgacaaaaaatccagttaatatattaatgtgaaataaaccctgtttgcacctcgatttgtttgctgaaaatgtgaaatagtaaaaatgaaataactggaaaaaaaaaaaaaaaaaaacncaagggggggcccggt

SEQ ID NO: 345 - DNA, 1070 bp, Homo sapiens
ggcacgagcagtgacgagggaaacctctcgctgagggttggggcaaagtcacccctggaaatcgaaggggccgctggtggtctcttgaggtccaccagcctcaaatgcatctcttcagacggtgttgggggcacaaccctactccccgaaaagtcgaaaacccgattcagttcctgcgagtccctcttagaatccagaccgagcatggggagaaaactgagctctccgaccacacccagggacatgctgttgtcgcccacactgcgtcctcggaggcggtgtctggagtcctctgtggacgatgcgggctgtccagaccttggaaaggagccgcttgttttccagaaccgccagtttgcccacctgatggaggaacctctaggcagtgacccattcagctggaaactcccaagcctcgactacgaacgcaagaccaaagtggacttcgatgacttcctcccagctatccggaagccccagacacctacctccttggctggatcagccaaaggtgggcaagacggttcacagcgttcaagcatccactttgaaacggaagargctaaccgttcctttctctcggggatcaagaccattttgaagaagagcccggagcccaaggaggatcccgctcacctgtctgactcgtcctcatcctccggctccatcgtgtccttcaaaagtgctgacagcatcaaaagtcgaccaggaatcccacgacttgcgggtgacggtggcgagcgaacgtcccccgagcggagagagccagggacggggaggaaagacgacgatgttgcgagcataatgaagaaatacctccagaagtaggaaccagttcagcctccttgaagctgcccttgaagacttcccgactctacaataacttggagacagagagactggccaggcctccccggtggccakagccagccagcatggccaccctcaagaggcgagatgagcccacagaggcatatcctgcggggatgctgggctcccagtgtggttggcctgaacaaaataaagtgttgactcctgggaaaaaaaaaaaaaaaaaaaaaaaactcgta

SEQ ID NO: 346 - DNA, 1159 bp, Homo sapiens
  misc_feature (584)..(584): n equals a,t,g, or c
ggtgctggccgctctagaactagtggatcccccgggctgcaggaattcggcacgagctgaagccggggacccggggggctgaggaatgctgaggcaaagtctgagcggctgcccatgccctgccctcccgtcctgcctgctgcccctatgtcagtgccctcctgggttaggagacccggaccggagacaagccaggccctgcagaccccagagcggctgggaacagtgtctggaatggggccttttgcactcgcccggccaagcctctccaaaatggattccactggtgtgggctgggacctggagcaaggtgccgccggacgcccccacagggttcccatgtttcaggctcctgccctggcctttctttctggactgcagctcagctttgttgcctgttcaatctactgatttgtttctctggaatttggggtccaaggccctgactatgaccaggatgccccagtcccttgctctaacccggctacagaagtgaaccacaggsccacaagaaccacagacagggacccttcamccccacggttagcccaggggctctagagctcactagcccaatagagggnctagacaagattcttttccaaatatcaaaactcctggcagttcctcagggacaggctctgagcagcagtgaatcagatgggggaatttggggggctcacaaagggacaggtacaaacaattcgcctgggggtcagaggaggcaattctcagctgagcccaggcctgagacccttggtgtcttaactccaccactcaaggcttttcgtgatctgacttctctcttcctcccatcttctcactgctccctgaacaagcaaaacacattcctgtctccaagctttgccctgtgttctccagcaccctccctgcttctgtctgcctatcaaacaccccacttttaaagtccccgttcaaaaaatctcctacccacgtggtttcctcattctcttccaccaacctctgtcttgccactttcaggcagggctgaagtcttccttttcacaaaacaattattaaaccatcttaagtctactgaacgttgcccctgctctagtgtctagcaccagaccagtaggtgcttaataaatgttaatggattcaatttaaaaaaaaaaaaaaaaaactcgtagggggg

SEQ ID NO: 347 - DNA, 1968 bp, Homo sapiens
  misc_feature (19)..(19): n equals a,t,g, or c
  misc_feature (291)..(291): n equals a,t,g, or c
  misc_feature (303)..(303): n equals a,t,g, or c
  misc_feature (308)..(308): n equals a,t,g, or c
gccgtgtaaatgacgtttnaaggcgagtgcggaaagtggcctggggagcctcggggagcggacgccctccgccctggtgctgacctgcctccctgccccttstgcctcctgtmagcagaggcctcggctccgcaactgccactcctcctcggggtgttgcacaagtttcgaggtcaccggcgaccccccctagcagcgcgcctggctctggcccccgcgaaggaggacggagtttgtgtgttgcatactttctaaggcggcggctgcagcagcggctccatccagcccgtnagctcctcctgnaaggnatggctggctacctgagtgaatcggactttgtgatggtggaggagggttmagtacccgagacctgctgaaggaactcactctgggggcctcacaggccaccacggacgaggtagctgccttcttcgtggctgacctgggtgccatagtgaggaagcacttttgctttctgaagtgcctgccacgagtccggcccttttatgctgtcaagtgcaacagcagcccaggtgtgctgaaggttctggcccagctggggctgggctttagctgtgccaacaaggcagagatggagttggtccagcatattggaatccctgccagtaagatcatctgcgccaacccctgtaagcaaattgcacagatcaaatatgctgccaagcatgggatccagctgctgagctttgacaatgagatggagctggcaaaggtggtaaagagccaccccagtgccaagatggttctgtgcattgctaccgatgactcccactccctgagctgcctgagcctaaagtttggagtgtcactgaaatcctgcagacacctgcttgaaaatgcgaagaagcaccatgtggaggtggtgggtgtgagttttcacattggcagtggctgtcctgaccctcaggcctatgctcagtccatcgcagacgcccggctcgtgtttgaaatgggcaccgagctgggtcacaagatgcacgttctggaccttggtggtggcttccctggcacagaaggggccaaagtgagatttgaagagattgcttccgtgatcaactcagccttggacctgtacttcccagagggctgtggcgtggacatctttgctgagctggggcgctactacgtgacctcggccttcactgtggcagtcagcatcattgccaagaaggaggttctgctagaccagcctggcagggaggaggaaaatggttccacctccaagaccatcgtgtaccaccttgatgagggcgtgtatgggatcttcaactcagtcctgtttgacaacatctgccctacccccatcctgcagaagaaaccatycacggagcagcccctgtacagcagcagcctgtggggcccggcggttgatggctgtgattgcgtggctgagggcctgtggctgccgcaactacacgtaggggactggctggtctttgacaacatgggcgcctacactgtgggcatgggttcccccttttgggggacccaggcctgccacatcacctatgccatgtcccgggtggcctgggaagcgctgcgaaggcagctgatggctgcagaacaggaggatgacgtggagggtgtgtgcaagcctctgtcctgcggctgggagatcacagacaccctgtgcgtgggccctgtcttcaccccagcgagcatcatgtgagtgggcctcgttccccccggagaatcccagcggggcctcagagatgcatctgggagaggtggggaagatggcaggcaagggtacccttggccaggactctggtgcccaccctgccacccccgcgctccacctgcagtgtttctgccctgtaaataggaccagtcttacactcgctgtagttcaagtatgcaacataaatcctgttccttccaaaaaaaaaaaaaaaaaaaaaaaaaaaaaaaaaaaaaaaaaaaaaaaaaaaaaaaaaaaaactcgag

SEQ ID NO: 348 - DNA, 1006 bp, Homo sapiens
ggcacgaggcgatctgtccacctcggcctccaaaatgctggggttacaggcatgagccactgtgcctggcctttgtatttttgtcatacattttatttcccagtattatagactccagaatatgttgttgttattgttttaaaagtcagttatcttcttagttttctttcagaaaaattaaatggtgagtttttttgtttgtttgtttgtttgttttgcatggcccatgtatttaccattcctggtgctcttccttcttttgtgtggattcagttttccatctagtatcattttcgttctggtaaaagcatgtttgacatttcctgtagtatgcttgctggtgacacattcttcctcagcttttgtctgaaatgcctttatttcaccatcatttttgaaggatgtttttgctgggtatagaattctaggttggtagtttttgttatttttcagcatttttaaggtgacatttggcttgtacatgttgttcttgagaattctgcagttattctttgttccactgtatgtaataatatatgtttttctcctttctctgattttaaggtttttctctttgttgctgatattctgaaactgactatgatgtgtctttgtgtggttttctttgtggtttttttcctgtggaatttattcaacttctgggatctgtaggttatagttttcacaaattggaaatttttgacattacttcttcagacactttttctgtcttcccctccatcattctgggatttgaattacatgtatacagtaactgttgttgtttcataggtgactaactgggtaggggaatgtctggttcccttactatccggtgaagtagcagaaccaccttttgtaggaatcagttatcaggccctttactttcccttgaactctaggctagttccagaacctttggtggactggaaagaggaaatagttatgccacaatttttagtacatgcaaatgtacatgtaatgtttaaaaaaaaaaaaaaaaaaa

SEQ ID NO: 349 - DNA, 1160 bp, Homo sapiens
ggttgggtcaaggtaactctgggctacagagtccttgctgggggttcggggagcgcttggaccccggcttctgggacgcgtcaggagaagggagcactggctttgctttcatcaggccaaagatgcctttytttgggaatacgttcagtccgaagaagacacctcctcggaagtcggcatctctctccaacctgcattctttggatcgatcaacccgggaggtggagctgggcttggaatacggatccccgactatgaacctggcagggcaaagcctgaagtttgaaaatggccagtggatagcagagacaggggttagtggcggtgtggaccggagggaggttcagcgccttcgcaggcggaaccagcagttggaggaagagaacaatctcttgcggctgaaagtggacatcttattagacatgctttcagagtccactgctgaatcccacttaatggagaaggaactggatgaactgaggatcagccggaagagaaaatgaagaccccagagacatttattggggagtaggatgtggctgagtgctttttttttggccagactagcggattcagtcctggaagagagtatcatataatgagacccacaggcactggcacccttgggttggcaatagaaggtgacatggaatggagaaaaccaagattccagatggggatagtaactagaaggtgcttcagatgcactgcctgcgggtgccagtctgaaaaccagaccgcacagaggcctggggctgctgatgagctttttggtgctctccacacacaagctcgcaaacacacatgtcccagaatagctctgttgggttgtgttgggagaagcggctggagttcattctctcacccccttatgttggtgtttggcgtgtgacagcagttctacagagctctgtgttggggtcatggatgagcggctctcttggctcttaaaggcaggcctctctcttcttgcctttaaagaatcctccttcctcacacctggcctcctctggcttcagcttctcagcagcaagcaccagccttccacaacaacactatatttttatgctactttcctgtttgcactactacttttttattaaacgatgttaaataaaaaaaaaaaaaaaaaaaaaaaaaaaaaaaaaaaaaaaaaaaaa

SEQ ID NO: 350 - DNA, 1258 bp, Homo sapiens
  misc_feature (161)..(161): n equals a,t,g, or c
  misc_feature (245)..(245): n equals a,t,g, or c
  misc_feature (364)..(364): n equals a,t,g, or c
  misc_feature (408)..(408): n equals a,t,g, or c
  misc_feature (440)..(440): n equals a,t,g, or c
  misc_feature (1210)..(1210): n equals a,t,g, or c
gttctgggaaggggtgtgatgcattaaggagatggtgtctgcatggtgccaccgcaggscatggccagctggatctgtgtcttctgcaccagcccatctggatgcagtgcaacctgtctggtctgctatcctgcgttcccctaactggcaccctcctgggnccagccagcagcaggacatagaccaaggccaacctcctccacacccagggcctctgccttctaccctctgtggagtctccattnaacttgggcattgacagggctgcttgactcaaaacaaccccagccctgccctgaagccatctcgccagtcagtcagagctcaagaytytctctttctctggagaagagcaggaaagtantcccagctaaccctcatgcagccaccactctgtgtcagaatctnttctaggccattgcattgaataagtcatttantccatataaacctgcaaggagtaggtgatattgttaaccccattttataggcgagaaactgaggcatggtgagttaagtgaccagcaagtggaaatctgaggtttgacccatctcctggtgtggagtccagttctctcagcttcactgatccttcctgatttgtgctgagttaggaccccttgggaacccccatgggcagggggtgctggtgctagcatttcctgtggattatgggagggggatgtgtggaggacctgtgtctactgttcctctagcctctgggggatttggagaacccactctgcccagagatgtaagtcatcttkggawatagatgagacttkttccccctccccctkaatcccrgggcacagctctatggaataagctctagctggaacttgtaaagtttggcccasccctccctgggaggctaggagktgggraagagccaggagactcraagtggtggtggtagttaatgtctatgtggttagacgttaaccagttactctgtggtgccaggcactgtcctaggcacgctatagttatcattgtctcctttggtgcccccagacagcccagggtcaagacaggtagcctcagtttacagatgcagcagtggaggcttgcacaatgagtaggtggctttgttcaaatcacagacctaggccaggtataaaagcctaagtgtggtgtaattccagcactttgggaggccaaggcggggagattgcttgagtccaggagtttgacaccagcctgggcnacatagtgagaccctgtctctacaaaaaaaaaaaaaaaaaaactcgag

SEQ ID NO: 351 - DNA, 1200 bp, Homo sapiens
ggcacgagaaaaaatgtaagctgaaatgatgacgtgttcttttagaaggtttatcatagcaactactataggcagtgattctaagaagatgctattctttttttccattgctttgtctagttttttttttttaaatctgtttttgtgcctttgtaattctagggttattggtatagttctcaccatatcttgaatacagatgctttttcctttggaaataatttctcataaagcacattgcttatagctgcttcccttttcccagagtagtaaaagttgtgatacaagacagtgatatcagctgggcgtggtggcacacgcctgtaatcccagcacgttgggaggccaaggcaggcagatcacttgaggccaggagttcgagaccagcctggccaacatggtgaatccccgtctctactaaaaatacacacaaaaaattagctgggtgtggtggtttgtgcctgtagtcccagctactcgggaggctgaggcacgagaattgcttgaaccagggaggtggaggttgcagtaagctgagattgcaccactacactccagcctgggtgacagaacgagactctgtctcagaaaaaaaaaaaaagagacaatgatatgaaaaggtcttacatgaatgagttttacgcatgattcaatctgtaagtcctataaattatttttgatggatggtatctattttcttcctattagtagttttgggcaaaaataaatttaactgaatgtaaaaatattcagctctatggggagctgagaagaactaaatattttcagacacttgttatgtgcaggttgtttggcatatatttttaaaaatctttataataccattttgaattaaattctatccccatttaacaaatgaggaggtggtttctattcttaagtaactttcccaaaatcactcaattaagtggcaagggtgggatttaaatcgaagcctatactctttcacttgtttccaaagatgccaaactcaaaatgtggctaaacagtaaatcttgagcaaagaaatgatttactaggaagcagcacaatagaacatactggatgtaggaaatgttatatatcttgatctcattggtggtaacacaagtatatacatatgaaaaagttagttttatccttactgttagtactcagtgctcttattattcctcaaaaatgaaaaaaaaaaaaaaaaaa

SEQ ID NO: 352 - DNA, 1652 bp, Homo sapiens
aaaaaaagaaaatacagtaagtagccacataaaccgcttctagctgggtccactggtccccctgcttcttgtttattaacggaatctgttcaggggctctagggctcagagctttaggggagtctgagcccttctccagccctggggtgatgggtcttgattgatccaggtcaaattctccacagatttaattctggccaatgaatatgagaagaaatgagaaggtggaaaggtgtcttagtctactttttgctgctataataaaaataccaatacatggggtaaattataatgaagagaaatttatctcatggagttctggaggctggggagtcccaaaatcaaggtgttggcatctggtgaggagcttcttgctgtccaccccatggtggagggtggaagggcagaaagagagagagggctggaggccaataggtggctgaactcatttttttatgaggaacccactcccataataacagcattaatccactcatgagagcagagcccccatgacccaaccatttcccattaggtcctacctccccacacccactgcactggggatcaagtttccaacacatggaactttgggagacacattcacgacatagcagaggaccactggagaaaggaaggtttttaaagattttttttaggacactatggaagtgatagccattggacatggatggtgtttttgtttttggcatgggaaaaggcttatacaactctggtcaacttggcaacactaatcaaaagtcaaaatctcctttgaccctagggatcccctactattaacagtattatatcttatagaacctaggtatttaggaaagaaaaaaatgttcaaagatgtattgacatttaataaaagcaaataactggacataacccagctatccaaatacaggctatcaggaaacactgtgaaggactttgaaataggtcttgcccactgcccccacccctgcctccaattactgagtgttctgtctaatctagcccaccyttctgagttgattccctttcatttcactgcctttgagctactttacaattacgtaaattaagggaaactgataatgcagatgattctkgttcatagaaatgcaaattgtgaccaatggaatataactgattattgttctgcaggtatcagccaattttgccagttttgtaactacgaagcaaactcatttcagcattcctgctaggcttataattatttgttctttggattctcctttgagccaattaaagtgtcctactggttctctcaataattaacaagttaaatacaatcatctttaacatgttacttttatatttgtatgagtcataattttaacttctaaaaaaattatcctttaacaaggtagttaagtaaatttaatgttcatgtggtataatttacttagcagccctcttaaaacagttataaaaaccatatggcaacagggacaaatactcctgataaaaatggcaagtggggaaaaaagcagaaatgcaaaatttgtactacgttgtgattaaagctaaacgttgtaagtgcttagggcaagaaataggaaggagaaaaaaaattgaagttggatttgtttgttagggtggtaggatcctggattaaaaaaaaaaaaaaaaaactcgag

SEQ ID NO: 353 - DNA, 1981 bp, Homo sapiens
ggcacgagtcacccaacaatgtttttttcatgttgatcactttactaaagcgaacaattggggttttaccaaaattgtgaaggattttattcttccatacttatgtctgtgttcagggtcatacagattctactttttccttttagtttaaggtattctcttggagatttaatgtacttaaatttgaccacaatttattgagagcatattctgtgtcagacattgcactctgcactagatattcaggaatttctaaaaagaatgttaacattgctgttacatagtcagttactgatcacattcttttcctctcaacttttttcaaaataggaatctgcggtatgttttcacgtatggagttcaggtcaggcttaggggtccctgacaatgtgaatagttttaagctgggcctcaattcgtggtacccttatactaatttaacaagccgtggactctaggttccaccaaaaatattttgttccatcctctctggtttcagtccatggtggtacagaaagaaaactaaggaacttcagccccaaattgtcaaattttgctacttaagaaacagaagatttaaatctatcattttgtcttatattccagagttgactggttcctcctgtctttaacttcttgtccttgaagggtattctaattttcattcagaaatatgacttctcatagggtttgtgttagatattttcagggccagatggatatgatgttcccatttctgttttattgttaaactactattccttttgagctgtaatgaacaattcattctgagaggcaatatatgttttccagtaattgacttgaataaaagtaaatgttaaacatggagttactaaagttaatacagtgggtattagtactaatttgttcaaattaagatagaattcttaatttgataaatagaattcttatattacagcatcagtccaattggattgatagtttgtaaaaggtaatttcttacatgaagaaagacaggttttctttctcttagcaaggtattaatgcaaaaatgaactcttcatttcctaccagcttccgaaggaaatgctggttaggagtaaattcaatttactctaccaaccaacttcacatctgttatgctgaagtcagagtttatctttcttgttatgtggaacctagaaatataccatgaggaatactgaaaataaactagcagaaattttgcgtgatgctgaggatttttagatggctgcaaaatgggtgaaagtaatataaacttaacaaagaatgttgtcacaactctctggaacttagtactgtttttcaactacaaatggaagatttgtgagactaggtcgacttaatgtgatttcaatgcagtaattactgtgtggcatgggcatggtaagagataggccttttctagaaatattctcatctctgttttttttagttgctcttacttagatttatattaactcagcttcacattttcatttctttttattttattttaaacaatgagaaaaatactccacgatgtcactgatttagttatcagatttgctttatttctgtatataataggtaatgtgagtacaggaaatatatctgaaaaggttacttgtacctaaattttaagttagatcatttaaaaattacttataagtctcttgagtgttttatatagtagggcagatggaaaaacttatttgatattcatttttggtacctcttaggaaaataattgggaatgtattcagttggaaaaaatgttgagaagagtgttttatataatgattatttagtaaaacattaaaaataatttcttattctggaggtttatagacatcaaaattgacaaagattacatggattatacatttgcattcaaggtacctttaagcgattttttaaaaaaaattctgactctaacaatgcatgctcattgtagagcgttaaaaatacaaaaacatgcaaaaaaaaaaaaaaaaaa

SEQ ID NO: 354 - DNA, 1640 bp, Homo sapiens
  misc_feature (1639)..(1639): n equals a,t,g, or c
ggcacgagctgacttacagctcttataaactagtggcaatttctgaacccagccggctccatctcagcttctggtttctaagtccatgtgccaaaggctgccaggaaggagacgccttcctgagtcctggatctttcttccttctggaaatctttgactgtgggtagttatttatttctgaataagagcgtccacgcatcatggacctcgcgggactgctgaagtctcagttcctgtgccacctggtcttctgctacgtctttattgcctcagggctaatcatcaacaccattcagctcttcactctcctcctctggcccattaacaagcagctcttccggaagatcaactgcagactgtcctattgcatctcaagccggctccaaggtcctggccaagaaagagctggcctatgtcccaattatcggctggatgtggtacttcaccgagatggtcttctgttcgcgcaagtgggagcaggatcgcaagacggttgccaccagtttgcagcacctccgggactaccccgagaagtattttttcctgattcactgtgagggcacacggttcacggagaagaagcatgagatcagcatgcaggtggcccgggccaaggggctgcctcgcctcaagcatcacctgttgccacgaaccaagggcttcgccatcaccgtgaggagcttgagaaatgtagtttcagctgtatatgactgtacactcaatttcagaaataatgaaaatccaacactgctgggagtcctaaacggaaagaaataccatgcagatttgtatgttaggaggatcccactggaagacatccctgaagacgatgacgagtgctcggcctggctgcacaagctctaccaggagaaggatgcctttcaggaggagtactacaggacgggcaccttcccagagacgcccatggtgcccccccggcggccctggaccctcgtgaactggctgttttgggcctcgctggtgctctaccctttcttccagttcctggtcagcatgatcaggagcgggtcttccctgacgctggccagcttcatcctcgtcttctttgtggcctccgtgggagttcgatggatgattggtgtgacggaaattgacaagggctcttcctacggcaactctgacagcaagcagaaactgaatgactgactcagggaggtgtcaccatccgaagggaaccttggggaactggtggcctctgcatatcctccttagtgggacacggtgacaaaggctgggtgagcccctgctgggcacggcggaagtcacgacctctccagccagggagtctggtctcaaggccggatggggaggaagatgttttgtaatctttttttccccatgtgctttagtgggctttggttttctttttgtgcgagtgtgtgtgagaatggctgtgtggtgagtgtgaactttgttctgtgatcatagaaagggtattttaggctgcaggggagggcagggctggggaccgaaggggacaagttcccctttcatcctttggtgctgagttttctgtaacccttggttgccagagataaagtgaaaagtgctttaggtgagatgactaaattatgcctccaagaaaaaaaaattaaagtgctaaaaaaaaaaaaaaaana

SEQ ID NO: 355 - DNA, 776 bp, Homo sapiens
  misc_feature (501)..(501): n equals a,t,g, or c
  misc_feature (763)..(763): n equals a,t,g, or c
  misc_feature (767)..(767): n equals a,t,g, or c
  misc_feature (772)..(772): n equals a,t,g, or c
gtcatgtttaagtggggataatgacattggcatacctgcttgctagagttaatgtgtgggtcatgagataacgaatataacaaatatttggaaaagtactatgtygaaatattttaaaataaamtttaaatccctcttmattyagaaaggatttgaggcagctaaatgcagaggtgtaagatggttttttggttaggattgtttctgagctgtgactctgtagtcactttcttactcagccctgccactcagctgtattcctctgtagctctgggcagacgactctgaacayggcttcatattggccttccatgagtgggtgaagggcatagtcatctggcagttttacctgctgttctatgcatgtctctccagcgcttgcttattttccccttctgcaaacattccattcatgccatgggcattcagtacagtcctgtaagcaagggtaggggcggcacaccaggtggatttaagcgcaaagacaggacgactgctttnccacaggcgcctttacagccagcagtgaacagttagacatattcaccttcctctaggtggaaaacagtcctcttctcagtagccctctcatgttcttgagacccatttgatataaataacartgttgcaggaaatttcctgaaggaactgaaatgaaccatagaaacgagatcgttcttttcctaccacacagctgggattagactgcttagtttgtacttgcagcacttttgcagtatgggccgtattaaaaaaaaaaaanaaanactcngaag

SEQ ID NO: 356 - DNA, 727 bp, Homo sapiens
  misc_feature (713)..(713): n equals a,t,g, or c
ttttcacgtgtcctattttcttgataataggtaccccggattccatcagtcttaaattatgacttccaaagaggtcttcactggattcagcacctgtcgtaactgactgtatacccagttctcagaaatgacttgtgtytagtctagtttttagtgtaggtaaggaaaaaaactgagatatctctttctaggactgctgtataaataagtactcacatataagtacaatgttcagtagaactgaaaacagaagagtggggcaaaaaggagataggataccaacaggaccacgtctctgtaccttaaagtttttaaaggaaatcttttcaagaagccacatactaaaaaactgatttttcatagtccaacaaattactgcttaaaaatgctggacaatggaaatcaaatataatcagagcaaaatgaagactctcaccatatattacttcttgccgtttgaccacatctttcttttgctgttttagaaacttgctgtctattatccgactccaagactctgcttccagctgtttggactcaatctcaaagtctcccagtagttgtccttcaktcatgtctgtacmtactcctcartatatcaaaaaatcaatatcagaatcaggtttgtgacctgtaaaataagcctatgttggactttcctcaagatgatagttgatttcataagaccatgaatacagggggatatcccaganatcatattctagta

SEQ ID NO: 357 - DNA, 2078 bp, Homo sapiens
aattcggcacgagcccacacctgctgcccaccaccccggcagcacctttccctgcccaggcttcagagtgccctgttgctgctgccactgccccccacactccagggccatgtcagagctcccatctaccctccaccagcatgccgctcctgaagatgcccccaccattctcggggtgcagccacccctgcagcgggcactgtggtgggcactgcagtgggcctctcctcccacccccgagctctcagccactccctagcactcacagggatcccgggtgcaaggggcacaagtttgcacacagtggcctggcttgccagctgccccagccctgcgaggcagatgaggggctgggtgaggaagaggatagcagctctgagcgaagtcctgcacctcatcctccacccaccagagagatgggaagttctgtgactgctgctactgtgagttcttcggccacaatgcggaaaaggagaaggcccagttggcagcagaagctctaaagcaggcaaatcgtgtttctggaagccgggagccaaggcctgccagggagaggctcttggaagtggcccgaaccgggaactggatcgggtcaacagcttcctgagcagccgtctgcaggagatcaaaaacactgtcaaagactccatccgtgccagcttcagtgtgtgtgagctcagcatggacagcaatggcttctctaaggagggggctgctgagcctgagcctcagagtctacccccctcaaacctcagtggctcctcagagcagcagcctgacatcaaccttgacctgtcccctttgactttgggctcccctcagaaccacacgttacaagctccaggcgagccagccccaccatgggcagaaatgagaggcccccacccaccatggacagaggtgagggggccccctcccggtatcgtccccgagaacgggctcgtgaggagactcaacaccgtgcccaacctatcccgggtgatctgggtcaagacacccaagccgggctaccccagctccgaggagccaagctcaaaggaagttcccagttgcaagcaggagctgcctgagcctgtgtcctcaggtgggaagccacagaagggcaagaggcagggcagtcaggccaagaagagcgaggcaagcccagccccccggcccccagccagcctagaggttcccagtgccaagggccaggtcgctggccccaagcagccaggcagggtcctagagcttcccaaagtaggcagctgtgctgaggcttggaagaggggaagccgggggaagccggccaggaccaggttgggctggcagtcccaaaactgagaaggagaagggcagctcctggcgaaactggccaggcgaggccaaggcacgggcctcaggagcaggagtctgtgcagcccccaggcccagcaaggccacagagcttgccccagggcaagggccgcagccgccggagccgcaacaagcaggagaagccagcctcctccttggacgatgtgttcctgcccaaggacatggacggggtggagatggatgagactgaccgagaggtggagtactttaagaggttctgtttggattctgcaaagcagactcgtcagaaagttgctgtgaactggaccaacttcagcctcaagaaaaccactcctagcacagctcagtgaggccctgcccaggctgagctgcttcagggcatcctgaggccctgactgccagctgaaggcgtataatttttccctccgtgtgccccacctacccgtccaagaccctctgtgctccccaccatcctggaccaaccaaaagctgaacggatgccacactgtgctggggccccttgacctcagcagagccgcttcctggtgctacgcagcctccacactcagagcccgtggactgggctggcctaagggccagggctgatggtactgctggcccaacactgctctctttgtgtttggtttttttgtttttgtttttattttgtttttttccaattctttacttttgatactgtgaagatctttcgtgccgaaagataaagcaacatttggacacagaaaaaaaaaaaaaaaaaa

SEQ ID NO: 358 - DNA, 1257 bp, Homo sapiens
ggcagagtgggggttggcgtataggtgtaggggcccatgttggtttgggagtratgacagttcacgcctgtgggtttgcggacaaagataccatgccccatccctgtctccctgtcagcacgcacttggaagggcgctgggggtgttaatcagctttgctagcctggggtgtgccagcctgggcaggtgtgctctggtgatggacagagcgcctgaggttccatagagggagggtgttgctatgacatctgagatgtcaccagcatgcccctgatgtgtgctccttgcatgtccccaggtgtgctaggcatgttctgtgtgtcctggcatgttaacctggcagtatcagggtgcatgttccatgtgtggcacggtgggcacatgtttgaggattgccctcactgaggtgggccttggcacacccccctgcctcgtgggcccttctcccaggtggtggacatcatgagggtgaacgtggacaagtycttggagcgagaccagaagctgtcggagctggacgaccgtgcacatgcactccaggcgggggcctcccagtttgaaacaagcgcagccaagctcaagcgcaaatactggtggaaaaacctcaaggtaagggtggggacaggaaggaggacaggtgggtgaatggggtatcatagtttgtcttactgatcctcgcctctcacccccagatgatgatcatcttgggagtgatttgcgccatcatcctcatcatcatcataggtgagtagggtgagaatggccggggccctttccctggagaggtttccccagtggattctaggttttgaaggtcattaatctagtttttactcttcagccaaaaacacatatagctgctaatggcaattctgattcatctararccaaaaactttgatgttatttagcctgcattttgcctarttcttggcagtcttgttaacatttggaaataaggaaagctggtgtwtccattgargaccctttaggcctaagagcccagtctgagaaccctggaattgaggagtgggagaaaggaaaggaccaggggcttgagacatgactagccccaagtcccttcatttgcatctgctatgcaatagtccctctcctttccttcttcttccctcagatttagctgatccttcctcccaccctggccttcctttcctctttcctcctcactctccccgtcatgctccctctgccccgccctcaaaaaaaaaaaaaaaaaaaaaaaaaaaaaaaaaaaaaa

SEQ ID NO: 359 - DNA, 1880 bp, Homo sapiens
  misc_feature (642)..(642): n equals a,t,g, or c
  misc_feature (655)..(655): n equals a,t,g, or c
ggcacgagcagaaactcattctgaaatacaaggaggcaatgagcaacaaggcgtgcaggtattttgatgaaggacgtgggagctgcccatttggagggaactgtttttacaagcatgcgtaccctgatggccgtagagaggagccacagagacagaaagtgggaacatcaagcagataccgggcccaacgaaggaaccacttctgggaactcattgaggaaagagagaacagcaacccctttgacaacgatgaagaagaggttgtcacctttgagctgggcgagatgttgcttatgcttttggctgcagtggggacgacgaactaacagactctgaagatgagtgggacttgtttcatgatgagctggaagatttttatgacttggatctatagcaaccttgcgtggcgtgtgaactggtctgctgacctcagacagcagctgtcccctgtggtggtgtggcatgcctgtgttctctcctaggcagctctcaactccaggtgctgtcctaagaatttttacccagggcctgtcttctcaacccctcacctttccctagaggagtgtgttgttttccctgtggaaaaaagttacaaaaataaatcttaaagttagtttttggtaacacaaatttaactgtcanacagttagtgtangtgtgttgcgtcacctgtttccaaccaaatggcatttatggactttccacacactcattttgaggaccccaggttcaaaagtaaaagcagtggccctgctttggggtccaagaataggagtgatgggtgaagggacctaagctggccaatagccctctgccccagacatgggatgtggatccttgaggtttctggtgaaatctgcacatctgtgtttttatatctgttccctaccctgtaatccctaccacgtgcacttgttctgtggttttggtctcttgtttaattgcacacaagtaatactactgggtaaccagaatcaggtgtgaatgtgttgagattttttactgttttgcatgataggaaaattgagaaagaatacgtataaaagatagagaggcataacatcaatgcagagttggaagttggctcccaagggctgacatggtgtgagtgtgtgggtgtgtgataagcttctcatccctgcatagatgcagtattcttagccttagtagaaaaacctggtttagtggtttaagccttgtgtggcagatagatcttaaagggcaaagcagtatattggtagttgtcaatatagcagtgctagctctgtctatataaatagagaaatggggttagccatagaggttaaaactacctggttatcccatataataacacaaactgggtcttggatacacagttgtatttaatgttttacgatctagcctttccagtacaggcactttctgagaaacctttgtcctcacttgaggcattttgttgtcgggtttttgtgtttgtttttgtgggtatttgcctcattccacccctgagctttcaggtagacagacgtgattcaaaactctgttctaaggtgtttattgtagtggagtaatgggtttgcagtgataagtcatacttttccaccgaaagggagggcttgggaatccctgagattagctaaagttaagttgttggaagaattccttgattggaaattgtacctttgtgttttgttgctctgtttcctgaaaataactcggggatgctcctggtttgtccatctactgctttgattccttggatcccacccattctttcactttaagaaaaaacaaataattgttgcagaggtctctgtattttgcagctgcccttttgtaagaagcacttttcccaaataaaacaattaaaaaaaaaaaaaaaaaaaaaaaaaaaaaaa

SEQ ID NO: 360 - DNA, 1921 bp, Homo sapiens
  misc_feature (1876)..(1877): n equals a,t,g, or c
  misc_feature (1897)..(1897): n equals a,t,g, or c
  misc_feature (1916)..(1916): n equals a,t,g, or c
  misc_feature (1919)..(1919): n equals a,t,g, or c
  misc_feature (1921)..(1921): n equals a,t,g, or c
ggcacgagagaggagtgggcaccattttcatccagaggcccgtcctgagaggcaagtgaggctgtgctctgtgcctgggctcccccaggtggcacctgtcggtctgtggacctggttgaggcaaggatgcccatctggacatggagccgacacaggtagtcagggggccagcgggacgcttaccaacagctgtcttttccccacctcagaatagcattcctttcgaacaccacggcaagtagctgctcgtctcccatcggaaggcagcactgggtgagtgtgcgcgtggcgggcgccaggcagcagcgccaggtgggtgggagccaccatgccccacccatgggagcttgcaggtgggctgggcttgcatgccaggtgctggaggtagartgaggcttcttctgctctgttcttcttgtggggtgcagagcggcggcagtccgctgcccagtcttggggggargctgtccacagagagctttggaacagagtgaccccaggagaccatcctgttggcctgtsgcctcccsgtgactgcgttccgtgtgccgttgctctcctcctgtcctgggtgcccacccgtgaggcaggagtggcaaggcgggtgccccgagcacttgagttgccttgtctgcggtcggccgtgcctggaggggcgtctgtgtcctgctcagctgggtggctccacgcttggtgttgggggctcctaagctcttgctgcgccacactctgggcagtctctgccatgccagcttttctagtcgcctctctcttcctgtctcatttatctctgtccttgttttgtgtttcttttcacacttggtctctgcccagccgtcttgtccacgcagcttcgtctgtattaactcctccagccgcagcccactcactccccgccgtcggtgcatggccggcgtccacgctgtgctccctcctcggcggccacgcgcgctcggcggctccttccagcaggggcttgcgcttctgtcgggtctgtgccgctgggagacccgctgcagttttcacactgtgcacactctggaaatgtgttgacaggaactgcttttcatgtcttccctgagaggggtacccattttcaaacaccaggttcctttccaggaagggaggcaggagcacccgtctycgctccactcggatccttcgaccctgccgagcccggctccgcgggcaccttgcttgcatgcctcttcctccttcccgtcttcctgtcactcgttctgctgagcacgtgtcccagccacagaggcccctgtgcgtggcgggggacgcaggcgtctagactggggctaggcggtggcggtgcgtcccctccctgcccagcaccgtcactgtggtatctgcctggccggctcccccagccccatgctgaccttctcctgtgctttggctccgacagattcctggtcgggtggcttccagtggtcttcagtctgtcgtgcaccgatgagaactctccttattgctgtgaagggcagacaatgcatggctgatctactctgttaccaatggctttactagtgacacgtcccccggtctaggatcgaaatgttaacaccgggagctctccaggccactcacccagcgacgctcgtgggggaaacatactaaacggacagactccaagagctgccaccgctggggctgcactgcggccccccacgtgaactcggttgtaacggggctgggaagaaaagcagagagagaattgcagagaatcagactccttttccagggcctcagctccctccagtggtggccgccctgtactccctgacgattccactgtaactaccaatcttctacttggttaagacagttttgtatcattttgctaaaaattattggcttaaatctnngaaaaraaaaaaaaaaaaanacgcgagggggggcccggnacnan

SEQ ID NO: 361 - DNA, 1211 bp, Homo sapiens
ggcacgagctcatgcacagaacactatgcattttgaaacttgttcatcctggatttttttaaatcatttttatctcagaacttaaacaaaaattagatgtcgtgcacggactgtgtgaaagaagatgctttgcatatttgctgcactgcatcagtatcttactaaaaatgtgaaatgaaaggactattgtacactgaaatgcttaaatgtatctgaaagcacaaggtgatactcatttttatggtcttcccatttgtgctggtttttgcctctttgacatctgtcatcagtatttagagggtgagaagtgaatgtaacaggtataaataacatttttaaaaacaataactttgctataatcacagttgttccagagcactgtcagatacattctaatgaccagaactggtttaaaaaaagaaaatacaaccatgggaaggaaatcttaaatgaaaaacgcatctcattgtaggcatttttgcctcatattttactgggccatgtttgtttcctggtactcatgtattttttttttccagatctctttccccaagttgctattgtaagagtattctgctgcgtgtggatgcagttatacacattaaagcagatctggagtctgaagtagctataaagcagctataaaacagaaatacatgcatagctgcagaaaccatgataggtagaggacttttcttttggttttgttttgttttgttttgttttgtttttggttttacagagaagagatttttattacaaagaaaaaaattccagtgaattgtgcagaaatgctggtttttacaccatcctaaagaaaaactttacaagggtgttttggagtagaaaaaaggttataaagttggaatcttaaattgtaaaattaaccattgagtgtcaaagttctaaaagcagaactcattttgtgcaatgaacataaggaaagactactgtataggtttttttttttttctccttttaaatgaagaaaagctttgcttaagggttgcatacttttattggagtaaatctgaatgatcctactcctttggagtaaaactagtgcttaccagtttccaattgtatttagcttctggttggaatttgaaaaaaaaagaaaaaaaaaaaaaaaaaacctaaataaaataggtgaaagttccctgactattcaggtgaatacacaaaaaaaaaaaaaaaaaaaaaaaaaaaaa

SEQ ID NO: 362 - DNA, 820 bp, Homo sapiens
ggtctgcgccggaagtgcatgagctgccgatgtggtgcttagtgattgcggtttcggtcgctctcccgtgtttcccgggctgggtatttgcctcgcaccatggcgcccaagggcaaagcgggcacgagagggaagaagcagatatttgaagagaacagagagactctgaagttctacctgcggatcatactgggggccaatgccatttactgccttgtgacgttggtcttcttttactcatctgcctcattttgggcctggttggccctgggctttagtctggcagtgtatggggccagctaccactctatgagctcgatggcacgagcagcgttctctgaggatggggccctgatggatggtggcatggacctcaacatggagcagggcatggcagagcaccttaaggatgtgatcctactgacagccatcgtgcaggtgctcagctgcttctctctctatgtctggtccttctggcttctggctccaggccgggccctttacctcctgtgggtgaatgtgctgggcccctggttcactgcagacagtggcaccccagcaccagagcacaatgagaaacggcagcgccgacaggagcggcggcagatgaagcggttatagccattgacattgtggccacaggccactggccctgggtggctctgtcagggtgcacagcccctcatgcctggagcaatgagggtctagtccaggggccaaaagcagtctgaggtattgggtatacttatactctatagggtcgttgaataaatggcttagaatgtgaaaaaaaaaaaaaaaaaaaaaaaaaaaaaaaaaa

SEQ ID NO: 363 - DNA, 1441 bp, Homo sapiens
  misc_feature (269)..(269): n equals a,t,g, or c
  misc_feature (420)..(421): n equals a,t,g, or c
  misc_feature (1439)..(1439): n equals a,t,g, or c
ccggggtcccagttctaaagtccccaskcacccacccggactcagawtctccycagacgccgagatgcgggtcayggcgccccgaaccstcctcctgctgctctsgggrgcmstggccctgaccgagacctgggccggctcccactccatgaggtatttctacaccgccrtgtcccggcccggccgcggggagccccgcttcatcgcagtgggctacgtggacgacacscagttcgtgmggttcgacagcgacgcgcgagtccgagganggagccscgggcgcctacgacggcaaggattacatcgccctgaacgaggacctgmgctcctggaccgcsgcggacacsgcggctcagatcacccagcgcaagtgggaggcggcccgtgwggcggagcagckgagagcctacctggagggcnngtgcgtggagtggctccgcagatacctggagaacgggaaggagacgctgcagcgcgcggaccccccaaagacacacgtgacccaccaccccrtctctgaccatgaggccaccctgaggtgctgggccctgggcttctaccctgcggagatcacactgacctggcagcgggatggcgaggaccaaactcaggacacygagcttgtggagaccagaccagcaggagatagaaccttccagaagtgggcagctgtggtggtgccttctggagaagagcagagatacacatgccatgtacagcatgaggggctgccgaagcccctcaccctgagatgggagccrtcttcccagtccaccrtccccatcgtgggcattgttgctggcctggctgtcctagcagttgtggtcatcggagctgtggtcgctrctgtgatgtgtaggaggaagagctcaggtggaaaaggagggagctactctcaggctgcgtscagcgacagtgcccagggctctgatgtgtctctcacagcttgaaaagcctgagacagctgtcttgtgagggactgagatgcaggatttcttcacgcctcccctttgtgacttcaagagcctctggcatctctttctgcaaaggcacctgaatgtgtctgcgtycctgttagcataatgtgaggaggtggagagacagcccacccyygtgtccacygtgacccctgtycccayrctgacctgtgttycctccccrrtcatctttcytgttccagagaggtggggctggatgtctccatctctgtctcaactttaygtgcactgagctgcaacttcttacttccctactgaaaataagaatctgaatataaatttgttttctcaaatatttgctatgagaggttgatggattaattaaataagtcaattcctggaakttgagagagcaaataaagacctgagaaccttccagaaaaaaaaaaaaaaaaaactcgggggtwyttttgggggggccgggggccctggtttttcccncc

SEQ ID NO: 364 - DNA, 1162 bp, Homo sapiens
  misc_feature (1144)..(1144): n equals a,t,g, or c
ggcacgagcctgcattcctctcctctcttctttcctctctgtcccttctctttcccctctcaaccaggagaccatcatgtctctctgccttcctcctctcccctccaggggagtcaggctgactgtgaaagccatgagcttctctccctctcccactcctcctctcctactttcagatggatttattccttttttaaacaatgaacatcggaaatgagactgtggggtgtggtttctctctctcttttttttttaattttctttgttgggtttttgagcaacctcatgtccccttcccagggagccttttaatttacctcttagaactcaagtggatgggaagtagagcactatgtgtcagtatgctttgttttctgacacgattacacagcgaggctttaatgccatttgggtaggtgagcttctgcacttctgttgtgctgaactgtattttcttctctcatctcctctttgtctttttctcttttcctctccttcctgccttcttctgctggcctccttttctctttctttaccttccttggattatccttccaggttttcataataaatttatattttgtaaaaggattttgttgtaccaggttttgcatcctcactgaatctgactggctttattttcctctccaaaatcaggttttgttctcaacactttcccatcatgtctagtcactgttttggttttggcaccatcagtatcaaatgtacaaacggttcttgctaaccaacaccaggtatatctgatgttcagatgagttccaataaaaataatttttttttttttcaaaaggtgtctttttcttgagtgctggagggcttccaagcaagtccagacagctctgtgtggccccacactagtctagctctcatctggccaaagctgttatctcatttgtgtaatgggagtccttaaggtaaatttggggtccaaacttggagggctttgggggcaagaaagttggtgtgtgagttctgaggttggaaatgagttcaggtgtcttcttccaggggcagcatggtccagtgagcacatgtaagtttgggcagtagatcctctgagcctactttctcttctactcagtgaggatgctgctttctgggcaggtgattgtgatgtgaaggntagtaagtcatagacgtt

SEQ ID NO: 365 - DNA, 989 bp, Homo sapiens
gacctctctgcccccatttccactcctgctcttgggacacaggagactggttagatgagagtagaaagtttatttttgaacacccaggtgtggggtggctgggcgagaccatctgatggctttgggagccaggccgcagggtttagcttggatctgttgagtaggagacccttaaacatggccaccctgagcttaagagctggtcttggattttgctttcttttgggattaaccgagtattttgtgggattccatttgatcccttaactggctgaccagctataactcctggttatgttgttttagtgttgctccaggtgtcgttggaggagaagttgaaggtacaaggagtttgcaggagggaaggtggcagttaatgagccttcctggtgggaccggatggtgagggcaggggcatctggcccagcgtggactcgggccatagatgggaagtggtcatttggaggtcaccatctctctgacaccctgaccatagcacctgcacccctgtgctgagctgccaggtccccggcaccagcgtctgtgcagctcaggtgttgctgagccgtggcctccgcagctctccatcaggatttctcaagcttcattatgaattatctctgtgtgagctcacaacggtgactgcagagtcccaggtcatctctcagatcttctgaatcaaacatatggtctgcagttgccgcgcatgtctttggccgattttctgacaatcaaagtgaagaagttctgagctacgggaagttgggttgaaggcatgatggggaaaacatgattagttgacagcttttcccagagagtttttagacaaactcaaccttggtaaccttctcagtgggcttatgataagaaccttcaatgtgccaaaaaataaaaaaagcagcactccaggtagttaatctttgtttaaaaaacccttccccccacccagtcctgcaaacaaacaaacaaacaaaaaaaaaaaaaaaaaa

SEQ ID NO: 366 - DNA, 1187 bp, Homo sapiens
gagatgggtctcctggtattagaaaggagagcagacgcctagagttctgacctcttgggcctcccctaaacaaaaagcatagccccttcactaccctagtaacaagtatgacctgttgcctgttgaggtcaggtgtacctgtgtgtctctctctgtgatgtatgtgggcttggtgtccacatcaatgtgcgtgaatactcctacccacagactgctactgtgccaatatagaggytcataagaaagataaaagagaaccagcagaaccccaggttctgcctctccttcctccctttgcccagataaaggtgtacagtgtttgtggtgaggctgctggacactgctgttttgggctttctagagagaatgcaaacatgcaaaaacagtgtggtagtgtaggcagaacaagatctagaatcagaagacctggagtcgaatctcagctccaacacccactggatgaacgtggacaagctgcttgatctctcagatcctcgatttcttcatctgtaagatggaaacaatatgtgtcttttctaaggggaaagatcaaatgacatcatgtatgtgaaaatgcttagaaatgggtgatgatgatgatgatgatactgattattagggtatctaataaagttggggaaagaacaaaatccccccctcacaccctattgcaccaccagccttctccctccctgctcaattatacccatgttatagggaaggaaatagggaagaaacttgtctaaggtcacatggatgttcgcaacaattgggatgcagaacttgatctgactcccaggccaggtttgattttgatttgcagtggcagagaggactaattttttactaggttctgagccctgtactgaactctggattgccctgtacttggtggtggtatacagttcagcagtttttagcatatacacgaatttgtgcagccayaaccactatctaattctagaacatttttatcacccccaaaagaaatcatgtacccatttgcagtcacttgccattccctcttctccccagccctgggaaaccactgacctaccttatatctctatgaatttgcctaatctggacatttcatataaatgcaattgtacatgtgaaaaaaaaaaaaaaaaaaactcgagggggggcccgagtacccaattggccctacgaagaggcgaacagag

SEQ ID NO: 367 - DNA, 884 bp, Homo sapiens
  misc_feature (873)..(873): n equals a,t,g, or c
ggccgacgcctggggtgtggagctgccccaccgccaccccgtgggcgagtggatcaagaagaaaaaacctggcccgagagtcgaagggccgccccaggccaacagaaatcacccggccttacctctgtccccacccttaccttcccccacataccgccccctgcttgggttcccaccccagcgcttgccgctgctcccgctcctgtccccacagcctcctcctcccattctccatcaccagggaatgccccggttcccacagggtcccccagatgcctgtttttcctcagaccatactttccagtcggatcaattctattgccattcagatgtcccctcatcagcccatgcaggtttcttcgtcgaagacaattttatggttggtcctcagctgcctatgcccttcttccccacaccccgttatcagcggcctgccccagtggtacataggggttttggcaggtatcgtccccgtggcccctatacgccctggggacagcggcctcgaccttcaaagagaagggccccagccaatcctgagccaaggcctcaatagacggacctaggccttatttcctctttatgaacatggattggacagatctgacacttcctttccattgcttggcctgaacagactgaccttgttaacttaagcctggagtccatgcctcgtcttccttttgttcattgctgttaccaagaaagccaaggaagagcagcctgactcattcttcttggctgcagcctcttccccacttcctgggagtgacccagcgttattcctgcctcctcactcctattctctttgcctttgtgtaaaaataaaatggaaataaacaagttgcacagaaaaaaaaaaaaaaaaaaaancccaagggggg

SEQ ID NO: 368 - DNA, 1040 bp, Homo sapiens
gtgattgtctctttctgttttgagttttgtttgcgtgtatcatttttgttctacattttgggaggggaaacattttccgttaaggaaggttgttgccagtggatttgactccaagggactagagtgtcgtggtgggggtggggaggggctgcagggtgatcattggctactgagcctccacaragagcatgtggtgccctgcctttgggagggtattttgctctcgttagttttgtgggcagcctcagattccctgttgagttgctgttaagaaatggagatttctggctctcattgggtaaggttttctgagttttatatcttattagatcacatccctttacccagaacaaatgcttcactgtcttctgattggcagtactcctgtggctttgtgccttgactcattttgttgtcttcagccttgaaggccccttcccacatggactgacatccactcatgtgcctgatccctgaagcctcccagcacccattcagttgcatccccagggcacaggactttgatctcttctgttgccctcgctaggttctccctggtgggttagtgctttgtatctgtctctctgcccctcactaattctacacccatgagaattagacattattctccttaaatatataaggaccatataatctgtatctttttggtgtgtgtatatggtatctggcacatggatctctgattaccagcctgacaycaacaaatcccctcagttacaacgtataggttaaacaaagcttttaaaagctcatgtggtatgacctcaaggttgctaacctggtcactcatggtaattagaaactctgattggcagctttgtatttcttgactaaaaacctaaataaactgattaggttttaggcgttctttcaaagaggttcttgagaagattgagaactatcctatttggtgcttagtgaaaagattttgaattactgtacgtaccagttgttgccatttctttattaaattcagaagtttttttgccaaaaaaaaaaaaaaaaaaaaaactcgagcc

SEQ ID NO: 369 - DNA, 1652 bp, Homo sapiens
gggcagcttctggggacagccacaaggagggtaccaggggtcccccgccgctgcctacagacatgcgccagatcagccaggactttagcgagctaagcacccagctgacgggtgtggcccgggacctgcaggaggagatgctgccaggaagctctgaggattggctggaacccccaggggcagttgggcgaccagccacagagccccccagggagggcacaaccgagggggatgaggaggatgccacggaggcatggcgcctgcaccagaagcatgtctttgtgctgagtgaggcagggaagcctgtgtactcccgctatgggtctgaggaggcactttccagcactatgggtgttatggtggccctggtgtccttcctggaggcagacaagaacgccatccgctccatccatgcagatggctacaaggtagtattcgtgcgccggagcccgctggtgctagtggcggtggctcgtacgcggcagtcggcacaagagctggcgcaggagctgctctacatctactaccagatcctaagccttcttaccggtgcgcagctgagccacatcttccagcagaagcagaactatgatttgcggcgcctactctcgggctcagagcgcatcaccgacaacctgctgcagctcatggcacgagaccccagcttcctgatgggggcggcacggtgcctgcccctggcggcggccgtgcgcgacactgtgagcgccagcctgcagcaggcgcgtgcgcgcagcctggtcttctccatcctgctggcccgcaaccagctcgtggcactcgtgcgccgaaaggaccaatttctgcaccccatcgacctgcacctgctcttcaacctcattagttcctcctcgtcctttcgcgagggcgaggcctggacgcccgtgtgcctgcccaaattcaacgcagccggcttcttccacgcacacatctcttacctagagcctgacactgacctctgcctgctgcttgtctccactgaccgtgaggacttctttgcagtctctgactgccgccgccgcttccaggagcgccttcgcaagcgcggagcccacctggccctgcgagaggcactgcgcacaccctactacagcgttgcccaagtgggcatccctgacctgcgtcacttcctctataagtcaaagagctcgggactcttcaccagccctgagattgaggccccatacaccagtgaagaggagcaggagcggctgctgggcctctaccagtacttgcacagtcgtgcccacaatgcctctcgcccactcaagaccatttactacacgggccccaacgagaacctcctggcctgggtgacaggcgcctttgagctctacatgtgttacagccccctggggaccaaggcgtcagccgtcagtgccatccataagctgatgcgctggatccgcaaagaggaagaccgcctcttcattctcacgcccctcacctattgatgggaatgtgtgcgggctcagccttcctggacacactaggtgtgggaagccataggagcctccagatgggggctggcctctcttgcccagccagcgggcagggactgtgggttggtgaatgcattaaagtgctttggggaagacaaaaaaaaaaaaaaaaaaaaaaaaaaaaaaaaaaaa

SEQ ID NO: 370 - DNA, 1460 bp, Homo sapiens
acgcgtccgcgcagaaccaggaaagtaacggctacagacagtgagaaatagtttcgctcgccggctagaaaaactctgtcggtaccaaccccagagcgttgagagcagcccacctccacgcttccttaacggagaggtgcaggactcagacttcaccagcccactcggtcccagccttgtacgcaaagagacgtcaaggacgcgctctcccgcgtccaggcagccccagcttgctggcttgcctgcccgcctgcgtgcagcactcggccggcgtgcagcatgaccctgtggaacggcgtactgcctttttacccccagccccggcatgccgcaggcttcagcgttccactgctcatcgttattctagtgtttttggctctagcagcaagcttcctgctcatcttgccggggatccgtggccactcgcgctggttttggttggtgagagttcttctcagtctgttcataggcgcagaaattgtggctgtgcacttcagtgcagaatggttcgtgggtacagtgaacaccaacacatcctacaaagccttcagcgcagcgcgcgttacagcccgtgtcggtctgctcgtgggcctggagggcattaatattacactcacagggaccccagtgcatcagctgaacgagaccattgactacaacgagcagttcacctggcgtctgaaagagaattacgccgcggagtacgcgaacgcactggagaaggggctgccggacccagtgctctacctggcggagaagttcacaccgagtagcccttgcggcctgtaccaccagtaccacctggcgggacactacgcctcggccacgctatgggtggcgttctgcttctggctcctctccaacgtgctgctctccacgccggccccgctctacggaggcctggcactgctgaccaccggagccttcgcgctcttcggggtcttcgccttggcctccatctctagcgtgccgctctgcccgctccgcctaggctcctccgcgctcaccactcagtacggcgccgccttctgggtcacgctggcaaccggcgtcctgtgcctcttcctcccaggggccgtggtgagtctccagtatgttcggcccagcgctcttcgcacccttctggaccaaagcgccaaggactgcaagccagaagagggggggctcacctcttatcctggggacccactgcacaagcaggccgctttcccagactttaaaatgtatcaccactaacctgtgagggggacccaatctggactccttccccgccttgggacatcgcaggccgggaagcagtgcccgccaggcctgggccaggagagctccaggaagggcactgagcgctgctggcgcgaggcctcggacatccgcaggcaccagggaaagtctcctggggcgatctgtaaataaacctttttttcttttgttttttaaaaaaaaaaaaaaaaaaaaaaaaa

SEQ ID NO: 371 - DNA, 2069 bp, Homo sapiens
ggcacgagaggaggccaacttactgcttcctgaactgggcagtgccttctatgacatggccaggtgagttcaaccagcaaggccaggagggaggtgggaggaggtcagagggaaagggcatctgtgtggacagtcaccaggccctgctcccaacccctgcccttcttggcctcagccaagaaaaggagatacaggtatggttaacaaggaaaatgactcactgctccaaatcccagatgccttcaggtaatccctacccctatcttatcaatgcactcagaggtcctgcctttaactggcttctatgttgttctagcaccatcttctgcagagcccaaattgccctgcttcccctctctcctgcctctaccccttccccaaccaccaggtaggtacctagggtcctccggggaggaagggaggtgaccatggcccccagggataggagcagagagaagactgggatccagcatccatctggctacaactgaaatgctttccctcttccctgacttccctgggtaacccttagggaagggaacctatagaggtgggggtttcaggtatcagattgtccccttctgccttcccttttattcccaggttcaagggggcaggcacagggaagagagatttgatcatctagtcccggttttgcctggatgtgagatgggctcagggcagggagggggtgatgctgtcatccttctcggctggagcaggaagatgaaggacgatgtcagactcattttcagcctcattaggcagcagacggagatggagggaggagagcaggaggctgggggatgggctctgcactgcagagaccagcagggactaaagaagagaggacatggggaactggaaaaataagccttccaggattgtggggagaaagacgctgtgggagaggccaggatgctgcattaggcacaggataacctgggaacccaggcacatgggtcctgctctccgaagtctgcaagtcaagaagggaacagagcacgccgaccctctccctttcccctctgtctctcttagtggctttacagtgggtaccctgtcagaaaccagcactgggggccctgccacccccacatggaaggagtgtcctatctgtaaggagcgctttcctgctgagagtgacaaggatgccctggaggaccacatggatggacacttctttttcagcacccaggaccccttcacctttgagtgatcttactccctcgtacatgcacaaatacacactcatgcacacacacactcacacacatgcatacacttaggtttcatgcccattttctatcacactgggctccatgatattctgttccctaagaactgcttctgtgtgccctgttttcatcccaagatttctcacttcatcctctcctacctggctcttttgtcccagggaggggtcctgttcggaagcagtggctgaatttatcccctgaaagtggttttggaggaaccgggatggaggaggccttcccctgtgggaatagaatcgtccactcctagccctggttgcttctgatacacagccactgcacacacacactcacactcacactcccttgtctgatgccccaaagccaattcctggggcaccctaccctctcttatttggagtttccgttggtttacctgagttttctctggggtctgcacagaggcagcagcatggacatcatggcctctcaggtcccttttggttctcagtttcattggttcctctttctgttcccccattgacttctgtgccccaccctagccttttccataaccttaggtattcagtttggaggggttttttgtatttttgaggattcctgtattctgtatcctctcctcgcatctcctcacatggaaagaaataatgtatttgtgccttctgtgaggaatggggggaacaagtggtcccaggtatccccatttccaaggcccccctccctctccaggtccccccacagcaataaaagcttccccctgatatccatccctttgtagtttgaacaaatatatttatatgatatgtaaaaaaaaaaaaaaaaaaaaaaaaa

SEQ ID NO: 372 - DNA, 1105 bp, Homo sapiens
ggcacgagcaaaggttctttgtaatttgaagaaaaattttgttttagttatctgctaagagggcatgggtttctttgtacttctcttccctacgtccagattagcttaagcaatagaaggaactgaaaagagcagaaacagttaagtgttaattaagaagcacttacagtcttaagaagttactcggggacttaacgtaaagttctatgatacatgctattaggaacttattttaaggtgtaccttatattcaagtgtttttacattttcttatataaaagtaggaagatgcatttccatttacaaaaaagctgaccaaaagacataataaaaatcatctcatatgaccataaaccttttaaaattagaatttaaaagagtaactgtttttcagaggtattttggatactttggatagaatttcatgggtaaattctgtgcggagtatccaatggttttaaaaatctagaagagaaggattttccaaaagggtaccagccctgccctccaggatatggtggccaggatatggtgggttggccaaattatccattaggctccaaattccttaaaacctggaattagttttttgggtttgttgccaaaagatttgaccagaggcagaactttcctttggaagaacaaagaacaggttttctgtagctgagtagggaagaggaaatagcaacattgactttactgagacactggaacttgaatagagtgtaagtgtaaaatattaagatgtatttaagaaaataattctcaaggctcgttgcatagagaagagggtaagggcttgggaatcttaaattaatggtcttttaccatcatacttaccgatgtgttccttgatacacacaattgtggacttatttttaaagtttacacactgttagcatttaatcttaggtcctatatctacagataggtatgaggctacatatctgccattgttagtcccaagaatgctctaaagcagggctgtcccaatgttttggcttccctgggccactttggaggaagaataattgtcttgggccacacaaaaattcgctaacacaaacaatatagctaatgaactttaaaaaaaaaaaaaaaaaaa

SEQ ID NO: 373 - DNA, 1435 bp, Homo sapiens
gcaatttatttaacaaatacttatctagtactatgtgcccggcgctgtagacactgccatgttttatctcattcaatattcacagtgactgcccagtgaatggtattgcctccatcctctgagaaggtaaagagcctatcccagaccccacgagtggaggcgtcagggaggggttcttggcaggagatgggtcttgtagaaaggcttctgytttgctttactcacggcctgtggcagtttgctcagacagctcccatcaggacaccattggcagcttttgcatgaccctgcctcccagggtcttcctgcgtttttccttaagttgccttattctttggttgtttccctacttgtttttgttagactgtgggaggaagaaatccatttcaaatctgctgaaacctgttaccaagcaacagcagtgattaaaagcaacctgatgagtgagtaaagaattagggtttcagacctgtagttaatgatggtctctgtctccctgctgccctgcattcccttcccttccgttcactgctgggtgaaggagggcttgctgcattttggaagttaagggaaccaataaggtgactcttttgcagattggaatatggtgctcagccagccatatggaagcactgtcctggcgtgatctgccctgggctgttggctctctgagtgctgtcttgggaggagcactgcccttcagaacagaagagatggcttccagtcccctctcccccttctcccagtctctctgaggctgcttgttgggtattgggcgtgctgtgtactaactcactcccgtctcttgtctcattatctgaaatgcatccccttttgcagaaagggctcaaacggagccttcagttctgctcctctgcatagccgtagctcagatcctagctcargatgtcttgtctgggaagggcaaaacatggtccccagtgtagcattttcactgggttgattatctcagtggtggatcatctatcacccttgtgtggtgactttgtgaattatctgcctgagtgccacttcccttccaccctaatcactgcaggctcagggagcaagaaataaaatcatgaaatgcattccaaataaaattaccttttggctgggtgcagtggctcacacctgtaatctgagcactttgggaggctgaggtgggtggatcgcttgaggtcaggagttcaagaccagcctggccaacatggcaaaaccccatctctacaaaaaatacaacagcaaaaaaatcagccaggctagctggtgtgcgcctataatcccagctacttgggagggaggctgaggcacaagaattgcttgaacccaggaggtggaagttcagtgagccgagatcgcacccctgcactccagcctgagcaacagagtgagactctgtctcaaaaataaaaaaaaaaaaaaaaaactcgag

SEQ ID NO: 374 - DNA, 3342 bp, Homo sapiens
  misc_feature (2005)..(2005): n equals a,t,g, or c
gcggctgtgtgtcgccggagccgaagcgcgcaggcccgtcccggtggccggggagcgggcgggtgggggcgccatgtggttcatgtacctgctgagctggctgtcgctcttcatccaggtggccttcatcacgctggctgtcgcggctggactctattacctggcagaactgatagaagaatacacagtggccaccagcaggatcataaaatacatgatctggttctccaccgctgtactgattggcctctacgtctttgagcgcttccccaccagcatgattggagtgggcctattcaccaacctcgtctactttggcctcctccagaccttccccttcatcatgctgacctcgcctaacttcatcctgtcgtgtggactagtggtggtgaatcattacctagcatttcagttttttgcagaagaatattatcccttctcagaggtcctggcctatttcactttctgcctgtggataattccgtttgcgttttttgtgtcactttcggccggggagaacgtcctgccctctaccatgcagccaggagatgatgtcgtctccaattatttcaccaaaggcaagcggggcaaacgcttagggatcctggttgtcttctccttcatcaaagaggccattctacccagtcgtcagaagatatactgacccccatgcaggcaggatgtggggggcaagatcaggagagtcaggcccctgggcctctatgccaggtggggaccagaagtcgggaaggcacctaccacctgccctggctttcttcccctcaactctggagccccatccccaccctccttggggggctcagcttggctcagatctgatgcttcaagaggctgtaacctcagagggcaccaaggagggtggcagagcctgcttagccaggaggccgaggtccctcagtcctcccctgtcccttccaaggtgggtcaggaggttctggccccgctggggcaggcagggcagggtctgtgaagcttaagagcagatggtgacaagttctctgggcaggtggccatggggaggggccatggcttggcatgtccaacagaaatagtttttgctgttgaacggtgatttctgtccaagtgcagatttccgtttgaataaagcttcgcttctaggtggcactgtttgccttaataccctgacagttcatcttcctttcttcctgctaaccttctgctctggactggactcacttttctgctccagggactccttttctgggtttgggtcttgcccttcccaagggactgttcttgtggcccttaatgggaagggggcaggggtgaggagctgagcctgctcaaggagtgggaagtggggctataggcagcctctctgatgcactctcttccatctctttccccaaggctccgtgactgacaaactgggagtaggagaggggacaatttaggactgggctagattttcagaagaacatctacaatatcctatttataaatcttcctctgggaaaaggagtggtttctggctgaatactatcttaggctcaaggagaaacaaaataaaaattagcttccaggcagcctgtttttaaagaaatgggactaatgggagaagctgtttgtcactctaagagcatccaagccctggcccgtctgtgcactcttggctcctggggagatatatctgccttctaagaaggcaggccaggtcttgggcacagacctgcatttgttgaccttgcactccaactatagtgccttgcaagtgctcaacagtacatatttggaatgaagtccctatgagagccatttctggccatgttctatacctcaaagtgaggctggcaggtacagagatgaactgtacacatgtgatacatttaagccactggaaaaacccctgtgcttgamaatatttcctctatatcatgcctggagttccatcatagcccttcatttccttggctttagcatttaccttctcttaagaataccagctttcccctttccctgaganggaagagcacatgttggtctcctcttagtgtgaacgagattgccaggcccttttctcctatgcacaccaggatagacaaggcaggggatactggcagcctgcatcatcctcccattgggctgacagctggccctactttcctccctctgctgcttggtccctcaccttgatgatgtggcttcgccccctccactctactgccagtgttctcccaggggttgctaaatccagcagacccctttcctgtcttactagatctgggcagcatttgacatggctgatcaccccttgcttcttggatggcacttccctggcacctctgtggctagttgtcctacctccctggctgttcctttcaggcttccgtgcaggcttctccacttgcccatgcacagtagggtctttcagggttctgctgtgggctccctagggaagcccatccatctggatggtttcaaggatggtgaggaatttagagttgacctccagccccaacatccttcctgatcacctgaaccacagttttgctgccctctaggtgcacagacaattcaggtccatggcccagatggtacttgctgtcttctgcaaacctgccccttctgggtacttcccttgaccccgagatcactcaggagccagacaggaaacttattctattcctgttttctctttctgcccaccacatccaatctctcaaaacggtcaggtctaccttaacatctcttgatttgagccactcccactgtcatcagctttcacctggattatcgtgacagcctcctactgcttctctatcatgtggccagagctatcttcctaaaatgcattgcatagttgatcaagtcactctctggcctaaaaccttccttggctccctgctgccctcaggataaagtctggacccctcagcatggcttgtgagactcatggtgtccttgtccctgctcacctctctggtctcatcacttgccttcttgcattctgggtcccagcctcctgtatccagagatgcagtggctctccattgccactctgattcctcctttcttttggtcacagagaaagggtactttctctgtcaaatctcaacttagacttgacttcctccaaggagctttggctatactctctcctcccgacccccaccctggcatactacacagatcactctgggctcacttgcctgcctaatggtcatctccccagtagactgtaagctccttgagggcaaggattgtgttggaatttttgtattaacagtgcctggcttggtgcctggcacctagaaagcactcaataaatgtttgtttaatgaaaaaaaaaaaaaaaaaaaa

SEQ ID NO: 375 - DNA, 1008 bp, Homo sapiens
  misc_feature (21)..(21): n equals a,t,g, or c
  misc_feature (895)..(895): n equals a,t,g, or c
  misc_feature (928)..(928): n equals a,t,g, or c
  misc_feature (960)..(960): n equals a,t,g, or c
gaaaccgacctaaggggattntcccatttggcccgtcctaccctaaagtcaccacctgctgcttttttggagcgcttaccagtgaccaagaggaacagaacacagagcagcctggcagtgtccaagcaacaagcctccgctcctccttcctgcaccctggggctcctgaaactcacatgggtaaaaaagatacagtaaagacataaataccacatttgacaaatggaaaaaaaggagtgtccagaaaagagtagcagcagtgaggaagagctgccgagacgggtatacagggagctaccctgtgtttctgagaccctctgtgacatctcacattttttccaagaagatgatgagacagaggcagagccattattgttccgtgctgttcctgagtgtcaactatctrggggggacattcccagtgtatcagaagagcaggaatcttcagagggacaagattcaggagacatttgctcagaagagaatcaaatagtttcctcttatgcttctaaagtctgttttgagatcgargaagattataaaaatcgtcagtttctggggcctgaaggaaatgtggatgtygagttgattgataagagcacaaacagatacagcgtttggttccccactgctggctggtatctgtggtcagccacaggcctcggcttcctggtaagggatgaggtcacagtgacgattgcgtttggttcctggagtcagcacctggccctggacctgcagcaccatgaacagtggctggtgggcggcccyttgtttgatgtcactgcagagccagaggaggctgtcgccgaaatccacctcccccacttcatctccctccaagcaggtgaggtggacgtctcctggtttctcgttgcccattttaagaatgaanggatggtcctggagcatccagcccgggtggagnctttctatgctgtcctggaaaagccccagctnctctctgatgggcatcctggctgcggatcgccatgggactcggctctc

SEQ ID NO: 376 - DNA, 1054 bp, Homo sapiens
  misc_feature (89)..(89): n equals a,t,g, or c
  misc_feature (149)..(149): n equals a,t,g, or c
cgcaattaatgtgagttagcttcactcattaggcaccccaggcctttacactttatgcttccggctcgtatgttgtgtggaattgtgancggataacaatttcacacaggaaacagctatgaccatgattacgccaagctctaatacgnctcactatagggaaagctggtacgcctgcaggtaccggtccggaattcccgggtcgacccacgcgtccgagtgacactactgacttggctctaccacctgaaatgccgattttgattgatttccatgctctgaaagacatccttgggcccccgatgtatgaaatggaggtgattcattctttttatttctttttgctccagtcaatgaaaggaacactttattgaggccccagggccgtagggcctgggcaggaggctgccctttggggaaggaatagccttattcgaccttctttttgggacgcaggttgttggtgtggccgcacttcttgcagcagttgactgcatgggggcgcaggcgagcacagctcttgtggcacatcatcttcttgcagttgtatttctgggcaaggtggcagagggaaggctccgtaatgccacctcacaggcacagcatcaggcgcagggtggactctttctggatgttgtagtctaagagtgtgtggccatccttcagctgtttgccctcaaatatcagacactgctggtcaggtaagatgccctacctgtcttgaattttggctttgacattctcagtggcatcactgggctcgacctcaagggtgatggtctggcctgtgagggtcttcacaaagatccacatctcagcgtctgcagcttggccagtctcactccattctcatttttttgttggtactcactggtgtactcaggtggttgcttaacagagaagtaaaattggatgtttccagaggctgaattttgccttaagatggaamctttatttctaaaaaaaaaaaaaaaaaaaaaaaaagggcggccgctctagaggatccaagcttacgtacgcgtgcatgcgaagtcataactcgtctataggaatg

SEQ ID NO: 377 - DNA, 876 bp, Homo sapiens
cccgggtcgacccacgcgtccgcccacgcgtccgcggacgcgtgggcttctgttacatggagctcaatggacgtgcccaggaatgcttttggctgttattttgcagttaatacctcctgtaactaaagcatttgtttatgagttgacttgagagaagggctgatctcagagccgctttgagctaagttggattagtcacactaggaagttaattccacacctttcgtctaagtctcagtattgaggcctctccagttctcatgcaccctgatcttagggttagaatacttgaccctgatacctgcaccatgcttcatggttcctgagctctttctcctgtttcatttgagcctccaaactacatatttggtcatattgcctgcctaccccatgcctgctgcagaaatattcatccaggttaaccttgatatacacagagatggtcttggagaattgtgaatgtatgtactgtattgtcatcaaggatactgtcccttatttgaaggcatctaaagagaaactgttttcagatccaagtgctcagatctaaagcctctgcaacaagtcaggtggtggtcatgtttcccttctagttttggctgacaggaagctcagttcagtaccataactacagaacctgtcatctgtattttttgttctcaccccgtttttgttattttgtttctggttttttatattgaggtatgttttagatatagtttacaaaaataaaacgcacagattttaaaaaaaaaaaaaaaaaaaaaaaaaaaaaaaattaaaaaaaaaaaaaaaaaaaaaaaaaaaaaaaaaaaaaaaaaaaaaccaaaaaaaaaaaaaaaaaaaaaaaaaaaaaaaaaaaaaagggcggccgct

SEQ ID NO: 378 - DNA, 1827 bp, Homo sapiens
  misc_feature (601)..(601): n equals a,t,g, or c
  misc_feature (918)..(918): n equals a,t,g, or c
  misc_feature (1825)..(1825): n equals a,t,g, or c
gaattcggcacgagatttattattatttaactcctgcagtgagcaaatgtgagtaacatttgaatgaaaataaattttcagcttatttacatgaggtaataaacttgactttatcaagtaattgtgggagtggggaataaacctcatctggggatgggaaataaacaccactataaagaaaccactaagatttgaatgccttgcttgttttaagtttgttgatgcaggtattgcattgattatgcatcagggaactggaaaccaaggcattcgttcttttaagaaaatagattcttaagcataggagtctcatgttttaagaactatttctaagttcaactaagatcgagtttttctgtctctattggcaaktwtyaagaggcataaactttaaagaaaaagggaaaatgtgataaattaatggaatagactccataggcttttattccaacttttatatgatgcaagtctatgtgcttctgtctgactcacttatttctgtwatcaagatgaactagtgaagggaatttctctctcaatgctaaattaattacatgcattggggatagtcatccagagagagggaaggtgaccttctgangttgtcacycagwaaataattgcctgagctgagaatggcatgtgggtcacagaattggtgtttctggatttaggaaatacttcctattttttttccactcctgctggctaagccaagaatggcaaatatgtgttcatgctgctgcattcccttccaggcccataaggacgttggcaatccttcatagccttctcacaggcggaacctggattaatttaagaacccttttgtgcctggcttttcaggaagccagtaccaatcaattggtgctggcatgaagcatgaaactatttgccatctctgagttatgccagtanaattggcatgcttctggtttccatgcataccactacctttcatgggttttattgtgcacaaactttgcatgcctttagaatgatatacctacgcaggtatataatttgtcaccctgatccaaaaagggkaagawgccmagaccatagtgagcctcttattagaaagctcttggcttcagtttttgacacttccctgactctttatattcacgttatcataagctgccaaattcttgactctataaattgccctttaacagcttattaggaattccaactactgtattctagcaccaactacagcatattcagagcctctgcaattcctaaaagtacacttaaaccaaatacatgggccagcctgcatcttttaaaatacattttatgcctttacacttcgtattaagttgggtgagaattatgttttaatctacactctatcttgaattgtcttacattttattctgcttaccagggttcaggttcttatccaaaatgaagttaaatttttttctcttagatagttgcattcctgaagcaattagaacagcatgatcccttggtgtttattgacattctcatcattgtctcattggctttaggtttaacatgcctcatgatgacaacaacaaatgtaaagaagaaggagttaagagtccccagcatgtcatggctccaacactgaacttctacaccaacccctggatgtggtcaaagtgtagtcgaaaatatatcactgagtttttagagtaagacttgaacattcttttagcacaaacttctagtgcctggcctacatgtagtgaactaattgtgggaaagacaatatgaagtcaaacattccttttgagttatttttgttgacattccttggagaaggcaaaaaaaaaaaaaaaaaaaaactcgnag

SEQ ID NO: 379 - DNA, 3303 bp, Homo sapiens
  misc_feature (2355)..(2355): n equals a,t,g, or c
gggcctggcctctggagctccttttactctggaaagaacatgacagacatcctctgcccttcagcctgtgccccagaatgagagacccatgggacagactcaagctgtaccctgaagcagagctgcccagttgactgcagacctgttagctttatacgtctacgaatatttactgcacgtaggagcacagaaatctgcacagaccttcttatcggagattcgatgggaaaaaaacatcacgttgggagaaccgcctgggtttttgcactcgtggtggtgtgtattttgggacctttactgtgcagctcctgaaaggagagacacttgtgaacattcaagtgaagcaaaagcctttcatgattatagtgcagcagctgccccgagccccgtgcttggcaacattccccccaacgatgggatgccgggaggccccatcccgccaggtttctttcagggtcctccggggtcacagccctcgccgcacgcacagcctccacctcacaatcctagcagcatgatgggaccccacagtcagccttttatgtcaccgcgatacgcaggcggccccaggcccccgatcagaatgggaaaccagcctccgggaggagttcctgggacacagccattgctgcccaattctatggatcccacacgacaacaaggccaccccaacatgggaggatcaatgcagagaatgaaccctccccgaggcatggggcccatgggtcccggcccacagaattacggcagcggcatgagaccaccacccaactccctcggccccgccatgcccgggattaacatgggcccgggagctggcagaccctggcccaatcctaacagtgctaactcaattccatactcctcctcatcacctggtacctatgtgggaccccctggtggtggcggtcctccaggaacacccattatgcccagtcccgcagattcaacaaattccagtgacaacatctacacaatgattaatccagtgccgcctggaggcagccggtccaacttcccgatgggtcccggctcggacggtccgatgggcggcatgggtggcatggagccacaccacatgaatggatcattagggtcaggcgacatagacggacttccaaaaaattctcctaacaacataagtggcattagcaatcctccaggcacccctcgagatgacggcgagctaggagggaacttcctccactcctttcagaacgacaattattctccaagcatgacgatgagtgtgtgatccccccttctccgagacgctgagagagcaggcattgcaggcgggaagatgccagaaattatgcaagaagtgaggtgtcattatccaggagctggtggggagggcatctccctgctcccctcaaccccctcccaccccatccacgccccctacctttcccaattttagtttcatgcaataaaaaggccaaactttttattccataaaacaagaaggacaaaactctcaaaaatgtatttcaagtcagtgaccagaaaaatcccaccccttgccctttccccaaaggaccttttctgtacatgacacttttttgttgttttttgtttggggttttaccattgttgggatttttttatttgttttcaggggggttttttgggggaaaatttttttaaatggaagcttctagcaagccccccaccccaatcaacctctatgctttcttcttaaaaaaaaaaaaaaaggaaaaaggaaaaaaaaaaaaggaaaaccagaagccctgctgtctgtctgtgcccaagcccttccaccagaaaagctagtctaggtgtgagagcccacattgtctgtagccatcaaaaataataataataaactggacagtttacaatcgttggtttctttcaaaaggccttttttggaaagaagaaaaggcagtcaccgttttccacttggggttttggtttgtgcaacaggcaggggaggagtggggacgcgtttgttctagcttgatttccatggcaacagcagcggcacgtttgggaccccagaacccagcaccctcatcctgtggccagaggggccggaccactgacccctttcaggattccaccacagcccagaccgtcaccgtgacccggtggcatgcactgttcccaggacaccytcctcctcctctcctggacctcccttccgtcctggcctccctgcctctccagcccctcctctgcccccaccccagtcttcccagtgagaatcctgccagctgggtggtggcctggcgcagagtgggagaggctgccactgacaggatggctatgacctgggacatggaaacagtgacctccgcgttctggtcccgagatcctcgcatcagcgtncatcgtgtgcaccggcttggggggctggagttccggttttctttgtttttttctttattcgtcctttctcaaagatgggatactgatcagaattgctctgtatatgcttgggactggatggaaagactttggagcagctgtggggggtggggggacaccgacaaccaaacagacgtgctggctccagtcctgtttttactttcaaaaaccaacaagcccgacagtggagcctgtcccctcccgggagggtgctcatggccccactcacctcatcaccccacggaaacctttgtgtcttgccctggaagacacccgaattctttgtacattgacatgcccttctccttcctccctcccctgtagctggtctttgttttactccctccctttctgatccatgtatatcatattatgtgagatatcatctgcctgaaaaaagactttgtgcggattattgggaacattgtagctgtttctgtgttttttcttaccttgtagtctggttctgaattaagagaggaaaaaaaagtaattatgatacattgtagtttgtgtacgatatatgttgataacgttttattaaagggacatcttttttccgcagcccttcctgacatgtttggggaatgtgggttggagtttattacactgattacaaaatgcaaggtgacttcttgggcacagtttttgttcctggtgcataacaagatgttttgtgtttgaggcgtctgcsttcttttcctgggcctgcaagttctgtgttcttgtggagtcgcgatggccttggcggaaggtgggttgggagggaaggtatccatctcactttaaatatttgggggccgtctaaaagccattttccatttcttgtcttgcaaacacattttggtccgctggaatgtcttttatttttctggaagtagaaaaaggttcctcctggtgccctctgtt

SEQ ID NO: 380 - DNA, 1948 bp, Homo sapiens
gatttgtaaccaggctgtcattccatgtttgtttggaagcttagagataacatttatgaactttgtgacacatagtagttgctcaataaatgttaactgtagaaacacattgattagtttcacttcagaaatagacacttagagttcaaaattcccatctgcctagctcctgaggcccactttcttaccagaatctttcctgataccctctcctgcataaaatggttcctcttttgagactttgtagctcttttgtacttctcttattctgttacgttactgcaaaaaaaaaaaaaaagaaagaaaagaaaagtgccaattgtgtacatgctttcctccctgctggaatgtaaactttgtaaaggcatgatccatagcagatacttcttattacaaactacctggcagaatttctttctaaagaacctactcagtaagcctgttggtgaactgagcaacatttggacaattatggcatctcttacaattttcagctattgsttttcacttgtttagaaatgtaaaactttgcaaggacttttataaaagcaaatttcagaatagttattcactaagcttttttatgctaatgatgtcatgctatcaaaaattagctagagtaaatggactgtaatgaggatggtttgtaatctagattatatgttccacatgtaacatcgaaatgaaatataaaattgagttgttggcatgtggttgtggtgagcagaagcagttattatacattacttggtaaaattcatattcatatcttgtcagtttacagtgagccagagattaaaaataacatttgtttctgttttagtaactgcttaaaaatatccaaaatcattttattttctttagcctgacttctagtagtgttttgaatatgtggcctttcaagcagtaatgaaatgcatcaatgcgacttggcagtgcctcacaggacatgcttctaggatcatttttaatgattaaaagtcaaattgagttctaaaaaactgacccaaaatatagatgagccaagtaaaaacggaaggaaatctgaataaaatcttggttcttggtcctctgcatgtatcctccacatctgttttctccagatctcttttttcttgcttgktgatagcacagaggaagatcgcagagagtaatgtactgtatatgkttcacatcccccttcctctttagtgatagtttggagagtatactgcagtcaccatggttttcagtttggagaktacaaggatcagatctgtattttctagasccagcttttgtggcattctggagaggtgattggagaaccatgagagcaggcagacatctgggtgagagggcacgaggggtgagtgacggcagagccagrcttgctggagaggcagaaagggaaggattcaagtagcataaccaggaaatagaattgataggatttggtccctgctgacctgtggaataagggggaaggcagaggagttgattctagtatttctaagttggsccacttagtgatattggggtaccaggaacaggcttagtggacccacagaagtgaccagacccaggagtctctctgagcgcccaccctggcttctctgtgttggcttaccctttcttggttgggggtcatggggtggtcagcttcagtggtgtggtctgaggtgacaggtgctcaggagtgaggacagggagtagacatcaccaatgtgaatgtggaggtaggcaacaagagttattctagaactgacaaatttaatatattttgctgactgctgagttccatttggacaaatacctaatgcatttggggcttaaaacctagatgacgggttgaagggtacaacaaaccaccgtgatacatgtatacttatgtaacaaacctgcacgttctgcacatttgtcccagaacttaaagtaaaaaaaaaaaaaaaaaaaaaagggcggccgc

SEQ ID NO: 381 - DNA, 2731 bp, Homo sapiens
  misc_feature (579)..(579): n equals a,t,g, or c
  misc_feature (1532)..(1532): n equals a,t,g, or c
  misc_feature (2362)..(2362): n equals a,t,g, or c
gctggggaaggtgcagggggcctgggagactgcctctccgaagcggtgaaaccctcacccttccgtccctcccagccaccctccctaaaacttcccctgacagagggtggcagccccaggctctttgcataatcctgtggcttcgctgtcttcacccagcaccagcggacagggaagggcagagaaggccaccatggcgacactcctctcccatccgcagcagcgccctcccttcttgcgccaggccatcaagataaggcgccgcagagtcagagatctacaggatcccccgccccaaatggccccggagatccagcctccatcccaccacttctcccccgagcagcgggccctgctctacgaggacgcactctacactgtcttgcaccgcctgggtcatcctgagcccaaccatgtgacggaggcctctgagctgctgcgatacctgcaggaggccttccacgtggagcccgaggagcaccagcagacactgcagcgggtcagggagcttgagaagccaatattttgtctgaaggcaacagtgaaacaggccaagggcattctgggcaaagatgtcantgggttcagcgacccctactgcctgctgggcattgagcagggggtargtgtgccagggggcagccccgggtcccggcatcggcagaaggctgtggtgaggcacaccatccccgaggaggagacccaccgcacgcaggtcatcacccagacactcaaccccgtctgggacgagaccttcatcctggagtttgaggacatcaccaatgcgagctttcatctggacatgtgggacctggacactgtggagtctgtccgacagaagcttggggagctcacggatctgcatgggcttcgcaggatctttaaagaggcccggaaggacaaaggccakgacgactttctggggaacgtggttctgaggctgcaggttctgacgctcacgggctgggcatccccgcctgtcaggacctgcgctgccgagaggaccagtggtaccccctggaaccccgcactgagacctacccagaccgaggccagtgccacctccagttccaactcatccataagcggagagccacttcggccagccgctcgcagccsagctacaccgtgcacctccacctcctgcagcagcttgtgtcccacgaggtcacccagcacgaggcgggaagcacctcctgggacgggtcgctgagtccccaggctgccaccgtcctctttctgcacgccacacagaaggacctatccgacttccaccagtccatggcgcagtggctggcctacagccgcctctaccagagcctggagttccccagcagctgcctcctgcaccccatcaccagcatcgagtaccagtggatccagggtcggctcaaggcagaacagcaggaggagctggccgcctcattcagctcctgctgacctacggcctctcctcatccggaggttccgctctgtcttccccctctctgtctcggactccccagcccggctgcagtctcttctcagggtcntggtacagatgtgcaagatgaaggcctttggagaactgtgccccaacaccgccccattgccccagctggtgactgaggccctgcagactggcaccactgaatggttccacctgaagcagcagcaccatcaacccatggtgcagggcatcccgraggcaggcaaggccttgctgggcctggtacaggatgtcattggcgacctgcaccagtgccagcgcacatgggacaagatcttccacaataccctcaagatccacctcttctccatggctttccgggagctgcagtggctggtggccaagcgggtgcaggaccacacgacggttgtgggtgatgtagtgtccccagagatgggcgagagtctgttccagctctacatcagcctcaaggagctctgccagctgcgcatgagctcctcagagagggatggagtcctggccctggataatttccaccgctggttccagccggccatcccctcctggctgcagaagacgtacaacgaggccctggcgcgggtgcagcgcgctgtgcagatggatgagctggtgcccctgggtgaactgaccaagcacagcacatcagcggtggatctatccacctgctttgcccagatcagccacactgcccggcagctggactggccagacccagaggaggccttcatgattaccgtcaagtttgtggaggacacctgtcgcctggccctggtgtactgcagccttataaagrmccgggcccgcgagctctcttcaggccagaaggaccaaggccaggcagccaacatgctgtgtgtggtggtgaatgacatggagcagctgcggctggtngatcggcaagttgcccgcccagctggcatgggaggccctggagcagcgggtaggggccgtgctggagcaggggcagctgcagaacacgctgcatgcccagctgcagagcgcgctggccgggctgggccatgagatccgcactggcgtccgcaccctggccgagcagttggaggtgggcatcgccaagcacatccagaaactggtgggcgtcagggagtctgtcctgcctgaggatgccattctgcccctgatgaagttcctggaggtggagctttgctacatgaacaccaacttggtgcaggagaacttcagcagcctcctgaccctgctctggacccacacactcacagtgctggtggaggcggccgc

SEQ ID NO: 382 - DNA, 1008 bp, Homo sapiens
ccacgcgtccgagctatcagagtcatatcaagactgatcagtattaattatctgcatttggaagaagaggaaggaatatagacagtaaaatattatatttctatttgtgcttaggacacgtttagaatagagtttttgtttatcagctttcctaatggtgagatttggatcaaaatgcctttgcttttcctaaggctgcccaaccgtaaagggagctgtccctaaggagacgtcaggccagaagtgaaatttggctgaaagtaatttgtttatggattttaaaagttgactgttgggcaatcatttggggttaaggtttaatcattctttctcgtaatggtaatgacagtacattggactcttagaagacttttaaaatgaatataaaatgctttgttatgtgtggtggcctttatctggccagcatccttgtgacgtggagagagcatggctctcctcactttctggatgaacacacaaatgtgctgagaaaatgcatgattggttcaaagttgcaaaatcacctcccatcaagaatcattcctataatatgtacagcctctccaggagccaatggcttcatccaaagaggatccactgagctctgggttatacgaaggcagtatcctagagtgagagtcttcccttaggatgaaaagacctttagaaggtgataagaaccagaatccactcaatccccttgatgtaagaaatgggaattgtgctcagttctctctgcaggccttgctggacccaggttcagtcatgttctgtctctcaggtcccagtctgaattcctgttctgtgtgtgctctgccaaaaactttgttcaaaagtttgggaaagggctgggtgcagtggctcaggacagtaagcccagcactttggaagacctagagggagaatcgcttgagcccaggagtttaaggctgcagcaagcggtaatcatgccactgcactcctgcctgggtgatagacggacaccctgtttctaaaaaaaaaaaaaaa

SEQ ID NO: 383 - DNA, 2085 bp, Homo sapiens
ccacgcgtccgggggacagagccatcctcctttgacacctggtcttcagttctgtgcccaacgtatatagttttgacaatgaccaggttggactgtttaatgtctttcaacttaccacgtaatcctcttgtagggatcacatctttctttatgatattgtatttctctacctctaacagtaaaaattccattcaacccttaaagctcacttcaaattcttctttgagaagtttttcctttctccgcaaccagatgtacatatttgaactctctttgtacttggagggcacttctttcgtggtagttcttttatttttattaatctctgtatccttagatagtcctccaacaaccaaaggttggggactctgtcttacatatctgggtgccctcatagtgcagtaataagtaagttgattatatacgagctatgtaacttatattttttaatggttggatatcactgagtttttttttttaagaatttttttattgaggtaaacttcacataacataaaattaactattttaaagtgagaagttcagtgccacttagtattgttaacaatgttgcataaccaccacctttatttaaagttccaaaaaaaatgttctcctctaaaaggaaaccccatcccattaagcagatactctccattccttccttcctccagcccccagcaaccaccaatctgctttctgtctctatggttttatctattcttgctattttatataaatcgaattgtatgagaccttttgtgtctggcttctttcacttagtacaagtttttgagatttatttacatagtagcatgtatcaacacttcatttttatggccaaataaaattgtattatgtgtttataacacaatttatttatccactcattcattgatggactttgggttgtttctgacttttggctattgggaatagtgctgctatgaatgtttgtgtacctgtatttgtttgaatgcctattttgcattctcttggatatatatctaggagtggaactgctgggtcatatgttaattctatgtttagctttttgaggaacagacaaactgttttccacagcagttgaaccattccacattcccaccagcaatgtatgagaattccaatttctgtccacttcctcaccaacacttattattttccttttcctttttttaaaaaaaataagttatggccatcttagtgggtgtgaagtggtatctcattgtgttttttatttgcatttcctatgtaatgagctagaaactaaagtacaaactagatgggacatccagtccctttgatagataatgctgagtaaaaaatgagatgaaagacatttgtttgtttttagaacatgagtgacagtttgttaaaaagctttagaggaggaatgaaaacaaagtgaagtacacttagaaaagggccaagtggacatcttggatgtcaagtgcctagttcagtatcttttttttttttttttttttttttgagacagtgcctcactctgtcacccaggctggagtgtagtggcatgatctgggctcactgcaacctcctcctcctggattcaagcaattctcttgcttcagcctcccaagtagctgagactacaagcacccaccaccacacccggctaattttgtatttttcagtagagacggggtttcgccacattggccgtgttggtcttgaactcctggcctcaagcaatccgcctacctcagcctcccaaagtgctaggattacaggcataagccactgagcccagccctagttcagtatcttttatgtaaattataaacatctgcaacattatgtatcatatgcagatacttattgcatttcttttattagtggtgaaagtgttctatgcatttattggctcttgaatttcctcatctatgaattgtcattcacacacctacttttctgcttcgtttttacatatgtctttgcctattaaagatattatccctctgttttatattttctctcattcttgtattgccttttaaattttgttatgatgtttcattaataaacagtgttttgttttcctctataaaaaaaaaaaaaaaa

SEQ ID NO: 384 - DNA, 1497 bp, Homo sapiens
ccacgcgtccggatcctgagaaagtgactttatctctcagagccatcgtttccttatgtgtaaaacagagatgaagaatgaccacctggaaggattgtcccatgtgaaagtgcctgcctcttccagcagctgacaggtagtaggaactcactgtgggtagtagctgatggcggtggcaccagcttatgtaagcccacaagactcaagcaggattctctttttacagaggaaactccaggctacgttcatttcttactgtccctcatgtagaaaggtaaacttgggtcatacctggatactgtctctcatctttttcttttgctctgagcaagtagctcccatgtatccaatatgaatcttggtccataaattcaagcatttgagaaataaaatttcaaatatatacttgaaatgcttcaagtgtatctgagaaattcttggtatgtccacacagtgaaatattactcagtcataaaaaggagtaagtactgtacatactacgacatggatgaacctagaaaacatgcactaagtgaaacaaaccagatgcaaaagaccacatatcataagacttcatttatatgaattgtccagaataagcaaacccataaagacaaaaagtagatgactggttgccagaggataaggggagggagaatggagagtgattgctaataggtatagggtttctttttggagcgatgaaaatattctgggatcagatagttgtgatggttacatacttagtgagtatagtaaaagccgctgaagggtattctttaaaatgttgagtttacgttacatgaattacagctcaagaaaaaaagtaaaaatcactgccaaacctatggacattgaaaagataataaaggaatattatgaacaactctatgcccaccaatttgctaacttagatgaaatggaataatttcttatttctattaaaactcatacaaatagaagaccctatggagctttaatttattaatgcaaacagtacctaacaaacccacaggtcctaaactaccaaactgcattaaaaatttcggttggggcgacctcggagcagaacccaacctccgagcagtacatgctaagacttcaccagtcaaagcgaactactatactcaattgatccaataacttgaccaacggaacaagttaccctagggataacagcgcaatcctattctagagtccatatcaccaatagggtttacgacctcgatgttggatcaggacatcccgatggtgcagccgctattaaaggttcgtttgttcaacgattaaagtcctacgtgatctgagttcagaccggagtaatccaggtcggtttctatctacttcaaattcctccctgtacgaaaggacaagagaaataaggcctacttcacaaagcgccttcccccgtaaatgatatcatctcaacttagtattatacccacacccacccaagaacagggtttaacaaaaaaaaaaaaaaaaaaaaaaaaaaaa

SEQ ID NO: 385 - DNA, 1958 bp, Homo sapiens
  misc_feature (374)..(374): n equals a,t,g, or c
  misc_feature (377)..(377): n equals a,t,g, or c
  misc_feature (1244)..(1244): n equals a,t,g, or c
  misc_feature (1300)..(1300): n equals a,t,g, or c
  misc_feature (1311)..(1311): n equals a,t,g, or c
  misc_feature (1327)..(1327): n equals a,t,g, or c
aattcccgggtcgacccacgcgtccgcagctccctctctccctctggcccagtcccttccgcttgtgtccgggaagctgtgggcggtgatttaacatgactcacttgggggcataggcgctatgaagttcagtggctgggtgccaggtggcgccaatgacaccctttttctcagagcccgggctgaatggacacctccctcaaagccttccagacccagggttacggccgttcccagagacatgttcccgtgctgctgggcacacctgcagaggggagggaaggtcctgtgtttgctggtgctgctcgtcctctcacttcctaccgagcatcatgttgcaaacaaatgaccttggcaccaccgttttgcaaatngtnctttcttgggctttactttttggtctatgtgagcaaaatgaactgaagtcaaggtacgactcccaataacctgctgtgggatgagagggctttgtcattatgcatctgattagttatccacgcccagagctacactttctcgatgcttctcagctctgactctcacagggccagggagaaatttttgtgccccctaaatcatgtagttggatacaaaacattccctggaggcctaccattctcaaatccccgtgcagggctctgtggggtgcaacatgaaactcgctctaactccctacgtggaggacagacagacccatcctaactccaaagccagacacaagggacaaaggtaccaaaaaggtgcaaggtgcaagaatggacgacgctggtcttccaatttgctggaatatctgtgcggctagaatggtgtcttgtcagcatatatcaagcatcttgcccttgctctgtcctgcctggccacaaaggacactcagacaacaccggcctcataaatgctgcctggagaaaagcctagctaggtacggagggtcagggtatttcagaaaagagaaactgcttcagccaatgctcatgagatttaccagggaatagcaaacaagtctagtgcaagccagggttgggggagtgggagggtgattagcagagatcaatctagaaaggaggtcaaggttctgtaggtggggaaagagggtgcttgtgtattaaaacttgttttccagcagtttggagatttctcacagaactaaaaatagaactaccattcatcccagcaatcccattactaggtatatactcaaaggaaaacaaattgttctatcaaaaagacacctgtactcctatgtntatcgcagcactattcacaatagcaaagacatggagtaaacccaggtgcccatcancggtgaactgnataaagaaaatgtagncatatgcctaccatggaatactacgcagctgtaaagaggaaagaaatcatgtcctttgcaacaacatggatacagctggaggccattatgctaagtgaattaatgcagaaacagaaaactaaatatcacatgttcttatttgtaagcagaagctaaatattgggtgcacacaggcacaaagatgggagcaataaacactggggattccacaaagggagcaggcagagggaagggttgaaaaactacctatcaggtcctctgtgcactacttgtgagacagaatcattagaagcccaaacctcagcatcacacaatatacttatataacaaacctgcacattgacccctgaacctaaaaaaaaaaaaaaaaaaaaaaaaaaaaaaaaaaaaaaaaaaaaaaaggggggggggggggggaagaagtggggtgggacgacagtgaaatctagagtaaaatcaagctggcccaaggtgtcctgcaggctgtaatgcagtttaatcagagtgccatttttttttttgttcaaatgattttaattattggaatgcacaatttttttaatatgcaaataaaaagtttaaaaacttaaaaaaaaaaaaaaaaaaaaaaagggcggccgctctagaggat

SEQ ID NO: 386 - DNA, 1147 bp, Homo sapiens
  misc_feature (5)..(6): n equals a,t,g, or c
  misc_feature (11)..(12): n equals a,t,g, or c
  misc_feature (19)..(19): n equals a,t,g, or c
  misc_feature (1145)..(1145): n equals a,t,g, or c
cgcannccacnnggtggangccgctctagaatatggatcccccgggactgcagggagtccaaggtacagtcgccgcgtgcggagcttgttactggttacttggcctcatggcggtccgagcttcgttcgagaacaactgtgagatcggctgctttgccaagctcaccaacacctactgtctggtagcgatcggaggctcagagaacttctacagtgtgttcgagggcgagctctccgataccatccccgtggtgcacgcgtctatcgccggctgccgcatcatcgggcgcatgtgtgtggggaacaggcacggtctcctggtacccaacaataccaccgaccaggagctgcaacacattcgcaacagcctcccagacacagtgcagattaggcgggtggaggagcggctctcagccttgggcaatgtcaccacctgcaatgactacgtggccttggtccacccagacttggacagggagacagaagaaattctggcagatgtgctcaaggtggaagtcttcagacagacagtggccgaccaggtgctagtaggaagctactgtgtcttcagcaatcagggagggctggtgcatcccaagacttcaattgaagaccaggatgagctgtcctctcttcttcaagtcccccttgtggcggggactgtgaaccgaggcagtgaggtgattgctgctgggatggtggtgaatgactggtgtgccttctgtggcctggacacaaccagcacagagctgtcagtggtggagagtgtcttcaagctgaatgaagcccagcctagcaccattgccaccagcatgcgggattccctcattgacagcctcacctgagtcaccttccaagttgttccatgggctcctggctctggactgtggccaaccttctccacattccgcccaatctgtaccggatgctggcagggaggtggcagagagctcactgggactgaggggctgggcacccaacccttttccacctgtgcttatcgcctggatctatcattactgcaaaaacctgctctgttgtgctggctggcaggccctgtggctgctggctgagggttctgctgtcctgtgccaccccattaaagtgcagttccctccggaaaaaaaaaaaaaaaaagggcggcnac

SEQ ID NO: 387 - DNA, 781 bp, Homo sapiens
  misc_feature (34)..(34): n equals a,t,g, or c
  misc_feature (751)..(751): n equals a,t,g, or c
  misc_feature (762)..(762): n equals a,t,g, or c
  misc_feature (764)..(764): n equals a,t,g, or c
cccggaattcccgggtcgacccacgcgttcggcncagtgacagaggcacccagggctcagcaagctcatggcccagcttgttggactcagagggcagaagaatcacattctaaacatgataaggtatagccagcaggaggcagattcccagattgattctccagagccttgtaggtcccaagggtgcctatgacaccaatgggaatctgaaccaacacagacagcacagtcttcttaggagaccctagtgcagcagcgctggcctcctcctgagcgtgcacgcttatatggcttctgagctggccaggctacttcatgcatttggtttaatgggtcctcgtaaggcaggagaatcttcttgaacttggagttgggtctgtggtccattggtcagtactttgttcagaggcactgagggtgggaaggctcatggagctggattctgctgctgggaagctgggtgggccttgtttgtgggcctcaggttcaggactgaatgagagtcctcttgttgcgagttgagggtgtactctgggcatgccatgccctttttttgtactaagagggtagaaaagcaaagaccagactagttggcaaattggaacccaactacccagtttatttatttcttargcgtagaaggaataatttagggggaactgaagagccaacctaaaggaaaaaaaaaaaaaaagggcggccctatagaggatccctcgaggggcccaagcttacgcgtgcatgcgggcgngttacctcaantnaaatatagagagttccc

SEQ ID NO: 388 - DNA, 1346 bp, Homo sapiens
  misc_feature (291)..(291): n equals a,t,g, or c
  misc_feature (421)..(421): n equals a,t,g, or c
  misc_feature (423)..(423): n equals a,t,g, or c
  misc_feature (425)..(425): n equals a,t,g, or c
ccacgcgtccgctagaatgggcacgagctctgccctcatcacagtccaaaagtgagcacctgcctggagctgcccagaaacagccttgtggggtggggttggtgtctgacctccctccccgggggccttcgcaggcttctctgctggtgcttctgtgcctgtaggtctggattcctccagggcctgatcctgggtgcagatgcagctggaagccctgaacctgctgcacacactagtctgggcacggagtctctgccgtgccggagctgtgcagacacaggagcggctgtnaggcagtgccagccctgagcaagtgccagctggtgagtgctgtgctctgcaggagtatgaggccgccgttggagcagctcaagagcgagcagatccgggcgcaggctgaggagaggaggaagaccctgancnangagacccggcagcaccaggccagggcccagtatcaagacaagctggcccggcagcgctacgaggaccaactgaagcagcagcaacttctcaatgaggagaatttacggaagcaggaggagtccgtgcagaagcaggaaaccatgcggcgagccaccgtggaaccggagatggagctgcggcacaagaattgagattgctgccgatggagaccgatgcccgggcgcgcgccaaggccgagcgggagaatgcagacatcatccgcgagcagatccgcctgaaggcgtccgagcaccgtcagaccgtcttggagtccatcaggacggctggcaccttgtttggggaaggattccgtgcctttgtgacagaccgggacaaagtgacagccacggtaaacatattcataaaacagggctggcaggtggctgagaggcagcatgtgggggcctcctggagccccaggtcctgtccctgccggctctgcacagccctgtagctctcccagcacagagcaaacccacgttgtacctgctgggctcggctgctcctccctccttgagctgggagaaaaaaatgcagttgccagcctgggccacacggtgagaccccatctctacgaagaataaaacattagctgggtgtgatggtggcgcctgtggtcctgctactcgagaggctgaggtaggaggatcacttaagcccaggaggtttgggctgcagtgagccaacattgcaccactgcactccattcttggcgagagaataagaccttgtctcaagaaaaaaatggccaggcggtagtggctcaggcctgtaatcccagcattttcggaggcggaggtgggcggatcacgaggtccggagatcgagatcatcctggtaagagtgaaaccctgtctctaccaaaaaaaaaaaaaaaaaaa

SEQ ID NO: 389 - DNA, 1109 bp, Homo sapiens
ctaaactatttattcaaaagtaacccaactaattaaagtgaaaaaaaattgttgaatcacaatgaacaaacataaaacaatacttaaatgagaattctgtgtcttttttggttttatctgtgatttattttgtccagtattaaggaatggttatctttatcattcttctaacatgttttggtttctctaatggttcattttcctttagcttgtgaaaattagggcagtttgtccagagccttactcgcaggagacaccagacccaacccatgcttagatttctgttaataaaagggagaagggtatttgaataggtagtaaaggcaggtacaagtttaagggagcagggctatcatatgtactaggtgagatttctataaatgtctgaaaagttacatgcatagtcattggctcaggtaatttctctgaatttgaacttatttgatttatttaaccaagttattataatatgcagttctctttaatcaatcttctattattcaatcatctatccatttattaattcaacaaatatttattaaagtgcctaccatgattatgtgctgtagaaaagacaaggacatttactaggggggattgtgggcccaatcggcatcataagcatgtctgaagcaaaagacaataatcacatccaacggcaccagttcagctcaactttagaattcagcagtaacagtacagatggcctaaagtacatctgtgtgtatctgtacgtgtgcacacacccatgtatatatatttatctatctgtacaaacactacatatgtatacacactatctatgtaaaatataatatatgtataatgcatataaattctaacaagtgtatttgtgttatctttaaaatagaacaattgtatcttgaagtggtaaatgcagagaattggttttattgttgatctgtggatttaatgatttctaggtgaaaaggacgtttaagtgtacaatttcttttcttaatttaatatatttatgtaaatgcatgcctgaaatttggttagattggctgtgttttgtgtcttttaacatgatcaaatgattaaactttatcttatgacttgaaaaaaaaaaaaaaaaaaaactcgag

SEQ ID NO: 390 - DNA, 1982 bp, Homo sapiens
  misc_feature (35)..(35): n equals a,t,g, or c
cggacgcgtgggcgagcccgggcgccggcgggcgnccgtcgcgtctgacagaccactgcagaccacgggccgaggcccagcgcccgtccgcagcgcgsscggcatggcggcgacaaggagccccacgcgggcaagggagcgggagcggtctggcgctsccgccgcaggaagtgaccaagttcactcctggatgctagctacaagccaagccttagacactgtctggagaatggcaaaaggctttgtgatgttggcagtttcatttctggtggctgccatctgctacttccggaggctacatttatattcagggcacaagctgaaatggtggattggatatctgcagagaaaattcaaaaggaacctcagtgtggaggcagaggttgatttactcagttattgtgcaagagaatggaaaggagagacaccccgtaacaagctgatgaggaaggcttatgaggagctattttggcggcatcacattaaatgtgttcgacaagtaaggagagataactatgatgctctcagatcagtgttatttcagatattcagccagggcatctcttttccatcatggatgaaagaaaaggacattgttaagcttcctgaaaaactgctgttttcacaaggttgtaattggattcagcagtacagttttggtcctgagaagtatacaggctcgaatgtgtttggaaaactacggaaatatgtggaattattgaaaacacagtggactgaatttaatggcattagagattatcacaagagaggaagtatgtgcaacacccttttttcagatgccattctggaatataaactttatgaagctttaaagttcatcatgctgtatcaagtcactgaagtttatgaacaaatgaagactaaaaaggtcattcccagtctttttagactcctgttttccagggagacatcctctgatcctttgagcttcatgatgaatcacctgaattctgtaggcgacacatgtggactagagcagattgatatgtttatacttggatactcccttgaagtaaagataaaagtgttcagactgttcaagtttaactccagagactttgaagtctgctacccagaggagcctctcagggactggccggagatctccctgctgaccgagaacgaccgccactaccacattccagtcttttaagtccgctgggggccgaacagcagtgctcaccagtgacggtggtcacagttgcaataaagtctctctctgaaaccaaagctagcatttcagcatggaaggaattaggaccttttcttcaggattacaggtacactggatgcagccatgcatggatggtttttctttatttttcagtgatttcctctgaagcagctgcactgatacatttgggagttggtggcttgactttgtccataaggggcgtggccacttcacatgatggcgggcctttaagagcacaaagaagtttaatatggacaacaacaggaaaaagcaagaagaaaacaagtagggaaaaacagctaacctggagagaaagaatttctttaacctttatgttcttcattaaaaatcttatcttggactgatttgagggatttttagaaacatggccttattttatataagcattaccttcccaggaatctttgttgtatattaatttttgataaccatttgattaactttaaaattaagtatatgtgtgtatatatacatatgtatgtttatatacacacatgtatctgtatagttttatatatacatatatacacatagacatacagagaaccactactttgtaatagtgtacagtttgttttatatctctttactttttttgttactattttatctggccagcgtaatagttttatttagattttttaaaattctgtagattaaagcaaatgacagttattgaactatcacaaaactattaaactgtggtacatttaaaaaaaaaaaaaaaaaaaaaaaaaaactcgag

SEQ ID NO: 391 - DNA, 3034 bp, Homo sapiens
  misc_feature (5)..(5): n equals a,t,g, or c
aaggntaccgtccctcccctcccaagtgctgagccactgcgctcggccagcgtaaatttcttctaaagatacattttagctattaaaaaaatctattttagctatagctacagcttttagctatcagtagctatagataaaaataactatattctaatatggcttaaatggagatatgaccctctcattgatattttcctatgtgtaattatttttgaagcattgtgagttctgtgaaattttgctatttattgaactatgaaagcacttgattttcttaactcttgagtgccagaaatttgggaagaatattcctgaggattagacaaataatgataccttgtgtatatacatggtgttggaatgtctacatttcccttaagggcatcaattccataagttggtctacagataacttcacattagttgaccattgtttaacaatgctttaaagttacatttgcataagaatccaacttgatttttctaggaaaagttaaggaaaagaaccgaagaacctgatcgtgatgagcgtctaaaaaaggagaagcaagaaagagaagaaagagaaaaagaacgggagagagaaagggaagaaagagaaaggaaaagacgaagggaagaggaagaaagagaaaaagaaagggctcgtgacagagaaagaagaaagagaagtcgttcacgaagtagacactcaagccgaacatcagacagaagatgcagcaggtctcgggaccacaaaaggtcacgaagtagagaaagaaggcggagcagaagtagagatcgacgaagaagcagaagccatgatcgatcagaaagaaaacacagatctcgaagtcgggatcgaagaagatcaaaaagccgggatcgaaagtcatataagcacaggagcaaaagtcgggacagagaacaagatagaaaatccaaggagaaagaaaagaggggatctgatgataaaaaaagtagtgtgaagtccggtagtcgagaaaagcagagtgaagacacaaacactgaatcgaaggaaagtgrtactaagaatgaggtcaatgggaccagtgaagacattaaatctgaagtgcagctktaagtatgcacagatgaagatggaactaagccgagtaagaagacatacaaaagcctcttctgaaggaaaagacagtgtagtcctgcaaaacattttgaggtacattgttttgtctcagctattttgtagcagactcgtgcccccattagtgtgcctctttggaaattatcgcccacatttgtaatatagtcgccattgaaaagttaattatcctttttttagggattttgatgtcatttcttttttttttttaataaaaaggttgaactgtttttttttttctttttggtattaagtccatcttgtgttggtacattggcagagacatatgctttaaaaacttaaatatttcggaggcacatgttggactactttgttttaattaaactgctagtatttctttgtcaaggatgtttctagttttttgctttattgccttgcattctaatgcagtttgttctgtaactcgagagccagtagcattggattgatggaagtgtagggtttatgaattattgcagctgactaccatacctcacacagcgttggtgttgtgagcggcccatgaaaagccaaattaaaaatcaaggattcagtcaaactaagcaggtactcatgccaggtactcctttctctacccacatccatgtttgaatgctattgcctgtgatctttacgcttaactgttgtgtatcttttttgttctttacaagaagtgcagaggggttttttgtgtattgcgtgaaaacttataaaacaaatgttaacagaatggaattttttttcaactgtatgtagggctgcagtggtggccagaattagatatctttaaagaattttaaatacaataaacacttcatattattcgccttgttacactcaatgcaattctcaagtctataagaggtatgtgcttaatatttcctactgtgtaggagaatttgcagtcagccataggtatgtaggaatagtcactcactggctgatacatttaaagcagcagtgtgaatagcaaggacagacaccttcaatttgtgaaatcaaagaactgatgcactatatagaacgaatttgggtttttaaagaaatattaaaagttaggtactgtaagtgttcttaaaacctgtaaacttcattctgtgggctagtggtgtgggacaaaatattcctaatgaaaggaagtaccaattagttgatttgttggtggcattccccttttgggaaagcaatgtaaggttatgtctgtgtatgtcattcacacttaggcaagcatacacaggcacatggctttaagaaccacactgatgccttgataattaaaaagaatacaagcattccatgtacacatgttaattagcagttagtgactgggccaacactttctcataaaaattggccttttacatgttgtctaattatcatttttccccaaattttgcgttgtaggactactgttcgaagatttttggaagaatactgagaacggcataaagtgaagatcgacatttaaaaaatgaggtgaaagaaagctatagtggcatagaaaaagtataaagctcagttagtttttttattattattattattaaaagttaattcaggactgatgtgacctaccagatttcagaacatgtgttaatagtatatatgccactgaaaacttaggtcctgtatcatacttttttctttaagactttttaagaaatattacttaaacatgtggcttgctcagtgtttaattgcaagttttcaatcttggactttgaaaacaggattaaacgttagtattcgtgtgaatcagactaagtgggatttcatttttacaactctgctctacttagcctttggatttagaagtaaaaataaagtatctctgactttctgttaaaaaaaaaaaaaaaaaaaaaaaaaaaaaaaaaaaaaaaaaaaaaaaaaaaaaaaaaactcgag

SEQ ID NO: 392 - DNA, 947 bp, Homo sapiens
ccacgcgtccgcggacgcgtgggaaaaaaataaaaacagcccaaccgagtttcggaattaagtattcttctagtaagtgattcaaacttgtaatatttgccacaggactgacttatttatttactagctagaagctcttaagttcacttgtttatcagggcatatacagaagggtttgttaaaactcgatgttaactttacaactttctgacctggtgcatgaattctcaagtactgtatttcactgtgttggtgtgtctgatggaaatttcgaggtggtcccacaaaaatattttatgtagtgtgccttcaaagagaaccatttatttctcttcacttatcgtcccacaaagtcacatttggtggtggtcagccaagtcgcatctggtctagttttactcttgtcccaattttaaagagaaatgggaatgagtttgccctggtgagacccataccattgcaatgattatcttgagcacttaaagtccagtgttggctgttagtgtatttgatattctgcctgtctcctcatggttgaaatatgtctgaagaatagcagcataatctcttggctgtttatacttttttaaactttcctgtgttgtaaatattgtatacttttggtgattccagctatgtaacctctatgctctgtaaggtgattatttgtatatagcaacatggcccagtgatattatatagtttcccaatggagaggttattgagtaacctttgcattagtttaaacactaccagaagaatgctgagccaactataaacactcaattttgtatgttttccaaattgtacttattactgcttttgatactgtattacgtgccaatagtttcccaatcacatagcaggcaagagatattttgtactttttgatccactgtaatatttaataaaaaatgttactatctgttaaaaaaaaaaaaaaaaaa

SEQ ID NO: 393 - DNA, 5061 bp, Homo sapiens
  misc_feature (5057)..(5059): n equals a,t,g, or c
ggcacaagcagctcgccgcgcagcggctgtatttgcggcctgtgcgagtaggcgcttgggcactcagtctccctggcgagcgacgggcagaaatctcgaaccagtggagcgcactcgtaacctggatcccagaaggtcgcgaaggcagtaccgtttcctcagcggcggactgctgcagtaagaatgtcttttccacctcatttgaatcgccctcccatgggaatcccagcactcccaccagggatcccacccccgcagtttccaggatttcctccacctgtacctccagggaccccaatgattcctgtaccaatgagcattatggctcctgctccaactgtcttagtacccactgtgtctatggttggaaagcatttgggcgcaagaaaggatcatccaggcttaaaggctaaagaaaatgatgaaaattgtggtcctactaccactgtttttgttggcaacatttccgagaaagcttcagacatgcttataagacaactcttagctaaatgtggtttggttttgagctggaagagagtacaaggtgcttccggaaagcttcaagccttcggattctgtgagtacaaggagccagaatctaccctccgtgcactcagattattacatgacctgcaaattggagagaaaaagctactcgttaaagttgatgcaaagacaaaggcacagctggatgaatggaaagcaaagaagaaagcttctaatgggaatgcaaggccagaaactgtcactaatgacgatgaagaagccttggatgaagaaacaaagaggagagatcagatgattaaaggggctattgaagttttaattcgtgaatactccagtgagctaaatgccccctcacaggaatctgattctcaccccaggaagaagaagaaggaaaagaaggaggacattttccgcagatttccagtggccccactgatcccttatccactcatcactaaggaggatataaatgctatagaaatggaagaagacaaaagagacctgatatctcgagagatcagcaaattcagagacacacataagaaactggaagaagagaaaggcaaaaaggaaaaagaaagacaggaaattgagaaagaacggagagaaagagagagggagcgtgaaagggaacgagaaaggcgagaacgggaacgagaaagggaaagagaacgtgaacgagaaaaggagaaagaacgggagcgggaacgagaacgggatagggaccgtgaccggacaaaagagagagaccgagatcgggatcgagagagagatcgtgaccgggatagagaaaggagctcagatcgtaataaggatcgcagtcgatcaagagaaaaaagcagagatcgtgaaagggaacgagagcgggaaagagagagagagagagaacgagagcgagaacgagaacgggagcgagagagagagcgagagagggaacgggagcgagaaagagaaaaagacaaaaaacgggaccgagaagaagatgaagaagatgcatacgaacgaagaaaacttgaaagaaaactccgagagaaagaagctgcttatcaagagcgccttaagaattgggaaatcagagaacgaaagaaaacccgggaatatgagaaagaagctgaaagagaagaagaaagaagaagagaaatggccaaagaagctaaacgactaaaagaattcttagaagactatgatgatgatagagatgaccccaaatattacagaggaagtgctcttcagaaaaggttgcgtgatagagaaaaggaaatggaagcagatgaacgagataggaagagagagaaggaggagcttgaggaaatcaggcagcgccttctggcagaagggcatccagatccagatgcagagctccagaggatggaacaagaggctgagaggcgcaggcagccacaaataaagcaagagccagaatcagaagaggaggaagaagaaaagcaagaaaaagaagaaaaacgagaagaacccatggaagaggaagaggagccagagcaaaagccttgtctgaaacctactctgaggcccatcagctctgctccatctgtttcctctgccagtggcaatgcaacacctaacactcctggggatgagtctccctgtggtattattattcctcatgaaaactcaccagatcaacagcaacctgaggagcataggccaaaaataggactaagtcttaaactgggtgcttccaatagtcctggtcagcctaattctgtgaagagaaagaaactacctgtagatagtgtctttaacaaatttgaggatgaagacagtgatgacgtaccccgaaaaaggaaactggttcccttggattatggtgaagatgataaaaatgcaaccaaaggcactgtaaacactgaagaaaagcgtaaacacattaagagtctcattgagaaaatccctacagccaaacctgagctcttcgcttatcccctggattggtctattgtggattctatactgatggaacgtcgaattagaccatggattaataagaaaatcatagaatatataggtgaagaagaagctacattagttgattttgtttgttctaaggttatggctcatagttcaccccagagcattttagatgatgttgccatggtacttgatgaagaagcagaagtttttatagtcaaaatgtggagattattgatatatgaaacagaagccaagaaaattggtcttgtgaagtaaaactttttatatttagagttccatttcagatttcttctttgccacccttttaaggactttgaatttttctttgtctttgaagacattgtgagatctgtaattttttttttttgtagaaaatgtgaattttttggtcctctaatttgttgttgccctgtgtactcccttggttgtaaagtcatctgaatccttggttctctttatactcaccaggtacaaattactggtatgttttataagccgcagctactgtacacagcctatctgatataatcttgttctgctgatttgtttcttgtaaatattaaaacgactccccaattattttgcagaattgcacttaatattgaaatgtactgtataggaaccaacatgaacaattttaattgaaaacaccagtcataaactattaccacccccactctcttttgatcagaaatggcaagcccttgtgaaggcatggagtttaaaattggaatgcaaaaattagcagacaatccattcctactgtatttctgtatgaatgtgtttgtgaatgtatgtgtaaaagtctttcttttccctaatttgctttggtggggtccttaaaacatttcccaactaaagaatagaattgtaaaggaaaagtggtactgttccaacctgaaatgtctgttataattaggttattagtttcccagagcatggtgttctcgtgtcgtgagcaatgtggtttgctaactggatggggttttcttattaataagatggctgcttcagcttctcttttaaaggaatgtggatcatagtgatttttccttttaattttattgctcagaaatgaggcatatcctaaaaatcctggagagctgtatttaatgcatttttgcactaattggtccttagtttaattctattgtatctgtttatttaacaaaaaattcatcataccaaaaagtgtaagtgaaaaccccctttaaaacaaaacaaaaaaatgaaataaaattaggcaaattgacagacagtgagagttttacaaacatgataggtattctgctcggcaatttgtaagtttacatgttatttaaggataaaggtaaatcattcaaggcagttaccaaccactaactatttgttttcatttttgtcttgtagaaggtttatatcttgttttaccttggctcattagtgtttaaaaatgtactgatgatgtgcttagagaaattcctggggctttcttcgttgtagatcagaatttcaccagggagtaaaattacctgaaaacgtaagaagttttaaacagcttttcacacaaattagatgcaactgttcccatgtctgagtacttatttaaaagaaaggtaaagattggcctgttagaaaaagcataatgtgagctttggattactggattttttttttttttaaacacacctggagaggacatttgaaaacactgttcttaccctcgaaccctgatgtggttccattatgtaaatatttcaaatattaaaaatgtatatatttgatcctggggactcatattctttcagaatcatgtaaataaatggcatcatgttgtaattgtgtggtgcatactagaaaagttaaaaatatgggctgamctttttatggacttgatttttatgactattggtatctaaaggtcaaggaagccatttacattattttggatgaatctactatacatctatggaaatgtctcttttattttaaattctggtttctcaacggaaaatttcagaaaagatgccccttgccattttcgttaatttttcagtcttttcttagacacacccccagcctaagaccttgttcgaggagtttattgtgtctgtcttttcttaacatactgcactgttcttaagcatcatattgtgttgtttttatttagccactattaacatgaaggtttattcaggtagatttgatttcctttgcttcgtttcttctcctgctctgtcaactgtacttatcttaaagggccactctaaaaacaagggagatgtcgtaatctgaaacctttggggagatgtactctgtactgcataacatctccagtgaggtttgtgacaggacctcaactaaatatatgaatttgtgcaagttcatatattaaagtttctgcagcagagtgaaaattgttacagtaaatgtggtagaaactgttaatcgcttaatgccagtttaaatcatgttttgtaaccaagcttcagtaaaaggctttagattgtcagagttggttgatttttagaattgtatatataaagaattagacattaaacaggcatattctagtgtctgaaaatacacmtaagaaatttctawwaaaaaaaaaaaannnaa

SEQ ID NO: 394 - DNA, 1158 bp, Homo sapiens
  misc_feature (826)..(826): n equals a,t,g, or c
  misc_feature (842)..(842): n equals a,t,g, or c
caaggtcgccggtatcgataagctttgatatcgaattcaaccaatcactgttatcagggcagtcatccctttgtccagccatgctcctgtatcagagaagcactgccatgacagatattgggcaaactgatatatgacccccaatactgggtttggtgctcattctcgttaatgcatgtgttaagggtttcattctaatcatctgcaaaaaagtgattgttgtctttaaaatgttaccaaaactagtcttttagcaagaatcttactagaataaaatggctcttgctacctgtatttttaatcagcctatgtatattgatcccattcctgatattatcaccttaatatataacagccccaattcctcttattgagcattggttgctagggaaagcaaaaagttaagagaaaactactgagattttctctctaatttgcctctgtctgcctctaactagcttagagatcttggacaagtcctttaacagttctctgtcagctgcttggactgtgaaatagagataaaagtacctgtctawttcaggccgggcacggtggctcacgcctgtaatcccagcactttgggaggcccaggagggtgggtcacgaggtcaggagattgagaccatcctggctaatgcagtgaaaccccgtttctactaaaaatacaaaaaaattagccgggggtggtggtgggcacctgtagtcccagctacctgggaggctgaggcaggagaatggcatgaaacccggaggcggagcttgcagtgagccgagatcacgccacggcattgcagcctgagtgacagagtgagacyccstctcnaaaaaatwaaaccttnaaaaaaaaaaaaaaacaactgtctatttcatagaggtattgtgaggattaaatgagataatgttgatgaagtaattttgaaaagcatatcaatgtgcagctgtaaagttttattcatatttaccagccaggcaagtagtattagctgttataagtaaaggtaaacatccaagtgcatatgttcagatgattatttttaatatacattttctcctgatatatattcttctagttgcagatctgattggttgaattcgatatcaagcttatcgataccgtcgacctcgagggggggcccggtacccaattggccctag

SEQ ID NO: 395 - DNA, 1947 bp, Homo sapiens
ggtggcacatgcctgtaatcccaactacttgggaggctgaggcaggagaatcgcttgaacccaggaggtcaggttgcggtgagccgagatcttgccatcatactccagcctgggcaacaagagtgaaactccatctcacacaaaaaaaagaatgttgaatattggcccgcactctcttctggcttgtagtgtttccgcagagaaatccactgttagtctgatgggcttccctttgtggataacccgacctttctctctggctgcccttaacgtttttttcattcctttcaaccttggtgaatctgatgattacgtgtcttggggctgctcttctcgagaagtatctttgtggtggtctctgtctttcctgaacttgaatgttggtctgtcttgctaggttggggaagttctcctggataatatcctgaagagtgttttccaacttggttccattctccccatcattttcaggtacaccagtcaaacataggtttggtcttctcacatagtcccatatttcttggaggctttgttcattccttttcattcatttttctctaatcttgtcttcatgctttatttcattaagttgatcttcaatctctgaatatccttttttccacttgatcgatttggctattgatacttgtgtatgtgctcacaaagttcttgtgctgtgtttttcagctccatcaggtcattgatgattttctctagactggttattctagttagcaattcttctaaccttctttcaaggttcttagtttcccttgcagtgggttagaatgtgctcctttagctcggaggagttacccaccttccgaagcctacttctgtcaattcgtcaaactcattttccatccagttttgtttccttgctggcgaggagttatgatcccttggaggagaagaggtgttctggtttttggaattttcagccttcttgtgctggtttttcctcatctccctggatttatctgcctttggtctttgatgttggtgacctttggatggggtttttgtgtggacatcgtttttgttgatgttgatgctattcctttctgttttttagtttttctcctaacaggcaggcttctctcctgcaggcctgctggagtttgctggaggtccactccagaccctgtttgcctgagtatcactagcagacactgcagaacagcaagattgctgcctgctccttcctctggaagtttcgtcccagaggggcacccgccagatgctagtggagctctcctgtatgaggtgtctgttgacccctgctgggaggtgtctcccagtcaggaggcacaggggtcagggacccacttgaggaggcagtctgtcccttagcagagtttgagtgctgtgctgggagattcgctgctctcttcagagctggcaggcaggaacatttacgtctgctgaagctgcacccacagccgcctcttccgccaggtcctctgtcccagagaggtgggagttttatctgttagcccctgactggggctgctgcctttctttcagagatgccctgtccagagaggaggaatctagagaggcagtctggctatggcagctttgcagagctgtggtgggctctgccaattcgaacttcccagaagctttgtttatactgtgaggggaaaaccacctactcaagcctcagtaatggtggacgcttctccccacaccaagcttgagagtcccaggtcgacttcagactgctgtgctggcagcaagaatttcaagccagtggattttagcttgctgggctctgtggcggtgggatccactgatccacttggctccctggcttcagttccctttccaggagagtgaacagttctgtcgctggccttccaggtgtcactggggtatggaaaaaaaaaaaaaaaaaactcgagggggggcccgtacccaattcgcccctaagtgatcgtacac

SEQ ID NO: 396 - DNA, 1081 bp, Homo sapiens
  misc_feature (1076)..(1076): n equals a,t,g, or c
  misc_feature (1078)..(1078): n equals a,t,g, or c
gctgagcacgccctctgagccgctcggtggacaccaggcactctagtaggcctggcctacccagaaacagcaggagagagaagaaacaggccagctgtgagaagccaaggacaccgagtcagtcatggcacctaaggcggcaaagggggccaagccagagccagcaccagctccacctccacccggggccaaacccgaggaagacaagaaggacggtaaggagccatcggacaaacctcaaaaggcggtgcaggaccataaggagccatcggacaaacctcaaaaggcggtgcagcccaagcacgaagtgggcacgaggagggggtgtcgccgctaccggtgggaattaaaagacagcaataaagagttctggctcttggggcacgctgagatcaagattcggagtttgggctgcctaatagctgcaatgatactgttgtcctcactcaccgtgcaccccatcttgaggcttatcatcaccatggagatatccttcttcagcttcttcatcttactgtacagctttgccattcatagatacatacccttcatcctgtggcccatttctgacctcttcaacgacctgattgcttgtgcgttccttgtgggagccgtggtctttgctgtgagaagtcggcgatccatgaatctccactacttacttgctgtgatccttattggtgcggctggagtttttgcttttatcgatgtgtgtcttcaaagaaaccacttcagaggcaagaaggccaaaaagcatatgctggttcctcctccaggaaaggaaaaaggaccccagcagggcaagggaccagaacccgccaagccaccagaacctggcaagccaccagggccagcaaagggaaagaaatgacttggaggaggctcctggtgtctgaaacggcagtgtattttacagcaatatgtttccactctcttccttgtcttctttctggaatggttttcttttccattttcattaccacctttgcttggaaaagaatggattaatggattctaaaagcctaaaaaaaaaaaaaaaaaaaaaaaaaaaaaaaaaaaaaaaaaaaaaaaacagnanccc

SEQ ID NO: 397 - DNA, 2179 bp, Homo sapiens
ggaattcggcacgaggatctgtcttcctcctatttgcttgagcagacccgccctgagtctaattgacacaccaggtgggtttatgggcttctccttcctcccaagcatcccacagccacgttgcctattgtctttgtggcaagtcttgcccggcagcctagcttcagagcaatgtaagtggttgctgttatacccttctacccaccatgtgctggaaagaggagcatcatgactaaaaggcatgactcatgttctaatccatggcactactgatcctacttttctgcattttaaagtacaaacagctggatattgctgaagatggctcagggggtcaaggacaaatttcacaaatgtgacctcattctccaggctgcctgtttatcctggaggttgatcttggacttggggaccatttaaggttgcctatcttcaaagtgctcagcttggctttttaattctatactcctaaatctttgacagctgtgcatcaacaagctttcaaggtaactgaagcctagggcagctttctgccctctgttactggtgaatgtttttgcctgttggaaggacgttgcagctacaggcagactcccaccatccaccaacggccttattgtcaatccatagtcgtgtgctgactgcaaagtggcctgagttttttgcatatcttgtgagatcactatgggaacgcagtcattataatacagcagttcctgtcttgaggacttttgatagttttatttcttacagtttcatttcctattgatacaaaagagactcttggtaaccaaaaataaatgtaaccagaaatgtcggattctttgtttcatatatgaacatgattttgtaatgtaaattgaataagcccagatctattatgcaactatatactctcgtaacaagtgagtcacagaagcctccgtcaacactgacatattgatgaccttaagaagttagtgattacctatgatgtacaacaaacaaggctggtagctgccagcagaaactaggcataactacttctagtaagtactactactagttctaaaatttaaattaaatcagctcacaccttattttgtgctgctaccactaaaatccaagccaccatgacattatcactaacctggactactaactcatctttccgctttcactctgaccccctccattcattttccctggtgaagctagtgtcatcttataagtaaatcagatcatgtcattcatctcacaactcatctgctttccatctcaccgcaggatagaatccaaactcatcaccatggtccgtgagaccccctgtgatctggcctgcctgactctccgatctcatggcattaccactcccttccctcttgtgatgatctgtccgcaacgactttgctgtttctcatgcctggcccactatgtgcagacatgcaggttgtacaatgcataactccaagagaggcattcagtaggctgcagggtgaatgatgcccttggaagtatgtagtgtggtgaccctggtcacacgcacagctctttcctaccacaaagccttggcacttgctggcctttctgcctggacatccatctgaagattttttgcacagctggctccttcttgtcattcccttgacaaatattccaccaaacactactccataccagggaggctccataccaggcaggaccagctatatactttgcaggtcccagtgcaaaatgaaaaccagggccccttgttcaaaaagtattaagaatttcaagacggtgacagcagaacattaaactaagcatggggcccttctcagtgcggggccctgtgggacaacataggtcacacctccatcaagatggtaagggtttcacatgtattcatgaactcaattgtattttaaagtttagtagaaattgcacaattaataactggttagtgtatatttacctctgcctttggaagttaaagttttttttttttgaactaaaaattccttaagtgtaatttcatccttgaaaagtcaaagatttgttgttttggcatattgtcaagtttttaaaatttaaaatacagttagttcaaaatatattcacagctttcattcatgagacatttataaatattgggttataaagttccacatttagtatttaactcaaaaaaaaaaaaaaaaaactcgagggggggccc

SEQ ID NO: 398 - DNA, 2795 bp, Homo sapiens
aatttgtaggcaggagtaaacgttaactgacggtgggttagtgccctgcatcttgcatatttgaactgtctagagttcctgccattgctgggtataaaacgaggagctctctgttgacctgtaaatcattaatacttcttgacttagagtgtcacttcactttatagatgacattttcctctttccccttgatattttctatgttgtgttagataattggtagatatrtagttgtggtttagtacatttagggcttctatttatttagattttgtttgttggagtctgtttccaaaagggaatgtgccatttagtctgcatctgtatctttgtggacttgatgatcactggtttgattttgaaaaatgtcttttccagcttttagttactctcatcaaatgtcacatatttyctaatcacatgcactcctttaccacagaggcacataatcatttggcctcatagcagttatccatggccgtactgtagtaaagttccttagaactttgccaggagtgaactagaaaaaagtgcttactagggcctaagagttgctttgtgccgtgtagtccggcctttgcactagtagatcattgctgacataggtcagtttagagacctttctgtgttaatgcctcctggtactgtcttaagatacgtacagtgtctgtttttagatctatgcatatgtcatgaagctccttgtgggctctgcatgaagctgctgctttgtttttgggttaacagatgtgcctgtcaactagcatgtgtattgtccaaattccataaacttaaggtttttaagggctgtgtggtttctgagctctatgtgtctttcctatccttgtaccttcaaagggtgagaaatgagatttatacatccaaagttagtctgataaatatggctttttgtttctccatgtaacctagactgtcaaaaataagtgatggtgataagtaggcctggagcctcagcttctgtaaatctcattcctaaaattttgctagactcgtgttggcaaaaacaaatacctgtggattgtccttaaggcttttaatcagatacctgtgttgctgttagctgaactgtagtgaagcatcgatccaaatcggtcttctgaagtatcagttatgcttttgagtttagaaaatacttaggtgttagtctagtcttcccattcatgaatcagtgtatgtccatatcagagagcctcaacttcttttttcttcctttttaaaaatgattttagtgttttgatttagtgtatactacatagttcagtattattggctttaccagtgttgacagaaaaattttaaatctccagttgcaaacagcaatggattaggatatggaaataaaatcatggtgacatcactgctgagttatcttaaacctctgctacttaattctccatattgaaatgcatactcctccacatacatggcttccaagtaaaggcaattgtagaggggccctgtctatcccagtatggttggattttaaacatatctgtgtttccgttattttgggaactgattaatatttacaattttttttgtttatgagttattttgatactaagaaaagagagaatctagaacatcttgmagttgaaatacaaattttattcttttggtcttgggagaatttaagcagtctatgcaactcatcaaatggtgagaaatagccctccgaggttccagtaagctttcagtgactttgatacctccccaagtttcttgagttgctgcttgttaacacccagcttttaactgagtgtttgctcctgatggtttaggagattttcatgttgtatcacactgtcaagttttattttgtctttttatccctccgtggatgtgagtttgaaacaagcacggtacagtaatcctgcctgatagagtagtctggaatgagaattactttttgggtgagagagttctccattttaatgtttctaaagtttttcatatgaacttggcattggaaaagggaggtaaagaaaaaggacgtttactaaaagcagtgtctactcttcccctttgtgagtgtttattcatggctaatgaaaaaaagagaaggactcttgggttttgtgttgccatgttaagcatggagagggatgcttgacagcatgctaattgaagccagagcaagtatgtccttcatcaggtaatcaggaactcttcagttgaagctgaggaactaactgattagttgttgatcataatataattggttacaaagtggaagtgccagctggcttaagtacccaaagaaaagaatgcagcagcctaacttagtgttaccatatgttactgaatttgaaactgaccttttttcccaccctacttcacacacctaaaactcttttcttgtcagaccaaagagcgaaaagaaaaaaaaaaagtaaaacactttaccaatctgtcactcaggtacaattttgtggtgagatttttgtctgttctctttgtattgctcttaagagtcctttctcagcatattattctgccattgcctctgtcttccttggggcacctcagctctggatgctacccctgggatatctactgctgttatgtgaatgataggaggtaagtgaccattatagtaagggctctttgtaaaaaaattcaaaaaatttaaaaaggatgtatacattttatagtctggctatcagtttgatatcttgctgtcaagtatgtttctcaatctgtatttatccatcccatcaataaatgttaatggtaaaacactcaaaaaaaaaaaaaaaaaaaaaaaaaaaaaa

SEQ ID NO: 399 - DNA, 929 bp, Homo sapiens
  misc_feature (904)..(904): n equals a,t,g, or c
  misc_feature (906)..(906): n equals a,t,g, or c
  misc_feature (914)..(914): n equals a,t,g, or c
gcttcatcggtgaacaagggtgtttactgaatgtggagaagtcagtgaaatctccacagtgacagatgcactctggagatggggctgaggctaggtgtgcacctcccctgccagccatcagcagcctgcccacgtctgtcgcgttatgagttgttgatcttaaatttctgcaaatgtttcttgttacagagtatggtgtttgcgaaaacttgcggaagctggagatcacaggcgtgtcttgtcgggacgtctatgcgaagcgtattaaaccctcgcgtgaagtcgggacgttttgtgaaaattctccctgattatgagcacatggcgtacagagacgtttacacctgcctgcttcaccgatatagacacattttgggattgtggcagccagatatcgggccatacggaggactgctgaacgtggtggtggacggcctgttcatcatcgggtrratgaggcgtgcgccgccaatatgcactgtacattccacaagcattgccttcttattttacttcttttagctgtttaactttgtaagatgcaaagaggttggatcaagtttaaatgactgtgctgcccctttcacatcaaagaactactgacaacgaaggccgcgcctgcctttcccatctatctatctggctggcagggaaggaaagaacttgcatgttggtgaaggaagaagtggggtggaagaagtggggtgggacgacagtgaaatctagagtaaaaccaagctggcccaaggtgtcctgcaggctgtaatgcagtttaatcagagtgccatttttttttttgttcaaatgattttaattattggaatgcacaatttttttaatatgcaaataaaaagtttaaaaacttaaaaaaaaaaaaaaaaaaaaccccggggggggccccggnanccaattcnccccaaaagggagcc

SEQ ID NO: 400 - DNA, 1301 bp, Homo sapiens
ggcacgagcccacggcaagtgtgattccatctggtgtagaatggatcaaagctagagtgactgagttgaacccagacaagaactgcattcacacagatgacgacgagaagatctcctaccgatatcttattattgctctcggaatccagctggactatgagaagattaaaggcctacctgaaggtttcgctcatcccaaaatagggtcgaattattcagttaagactgtagagaagacatggaaagctctgcaggacttcaaagagggcaatgccatcttcaccttcccaaatactccagtgaagtgtgctggagcccctcagaagatcatgtacttatcagaagcctacttcaggaagacagggaagcgatccaaggccaatatcattttcaacacttctcttggagccattttcggggttaagaagtatgcagatgccctgcaggagatcatccaggagcggaacctcactgttaactacaagaaaaacctcactgaagtccgagccgataaacaagaggctgtatttgagaacctggacaaaccaggagagacccaagtgatttcatatgaaatgcttcatgtcacacctccaatgagcccaccagatgtcctcaagaccagtcctgtggctgatgctgctggttgggtggatgtggataaagaaactctgcaacacaggaggtacccaaatgtgtttgggattggggactgcaccaaccttcctacgtcaaagaccgctgctgcagtagctgcccagtcaggaatacttgataggacaatttctgtaattatgaagaatcaaacaccaacaaagaagtatgatggctacacatcatgtccactggtgaccggctacaaccgtgtgattcttgctgagtttgactacaaagcagagccgctagaaaccttcccctttgatcaaagcaaagagcgcctttccatgtatctcatgaaagctgacctgatgcctttcctgtattggaatatgatgctaaggggttactggggaggaccagcgtttctgcgcaagttgtttcatctaggtatgagttaaggatggctcagcacttgctcatcttggatggcttctgggccaaaactgcagtcactgaatgaccaagagcagcacgaaggacttggaacctatccttgtaaagagttccttgatgggtaatggtgaccaaatgcctcccttttcagtacctttgaacagcaaccatgtgggctactcatgatgggcttgattctttgggaataataaaatgaaataatacttttattttctgaaaaaaaaaaa

SEQ ID NO: 401 - DNA, 1887 bp, Homo sapiens
  misc_feature (1882)..(1882): n equals a,t,g, or c
gttcatcttagtcaatcctatgccacctcttcttcctccagtcccctcacctgatggtcccgacacttcatcatccaccacctcctggagggggtaccctgaggtgctccgctgggggctccgctcttcctggggctgcggttgatggctcatcatgatctttcccaaaatctgtcccatctcaccaaacctagtctctgttctgtccttggtcttcttctggacactgctgggatccagaagagtgtgttatcaattctcgaggctgggagaagtcaggagtggagaacagctctgagaagttactgttgtccaactgaactcccaggtgccgacagagtccggtccctccaatcaggaaggtcggaatctctgatgtcatcgctcatgccaacctggcaaccagtttgaaaaaaaacacatgtaactgccaggctgatctcttgtcctggagatcctgggtgaatggtatctcctgccactgtcccaacctcagaccaytgtccaaaagcatcttcagggwctccrcatccctctrttccctgtcccagcagaggctgtgtcctctccactcaaagcytgaagcrtgttggggtctcytcttctctgtacatgcccgtttcagagtccagtctggtgggagagggatcaggatgggaaagaaaagtagggtaagcagaaacgatgaaaccttacaagagtgagattatcatgtacaagagatcccaggaacattgacttgatgaaaaagtcacatcagagcactcaatttggcagaggttttctgccgagtgtctactgacattcactgtccgagattctgtactgggggtacacgcgtcctctgccctaaggcatctttgagtccaagagatattttgaggactggaaatcataggaaactgcccatgagttcacacatatttccaatggtgtccccaatttcagggagtccacggatcacctaaagccagcccctccagtttggctaagaaactctatatatcaagttttgtatcatatgtattgctcttaactcagaaaattccaccatttatagcagtggtttatttatttataccattgaaggaaatggtttatttatgaatctatattatggatattctataagatactgggtgtacaaaaagactaagtcgaaaaatctcagctgtgcacagtggctcatgyttgtaaycccatctctttgggtgsccaagggaggaagactgcctgaggccagcagttcaagaccagtataggcaacatagcaagagcccatctctaaaacaaaacaaaacaaaacaaaacaaaattagccaggtgtcgtggctggcacctgtgttccaacaacttgagagactgaggtggcaggaggattgcttgagcctaggagttaggggctgcagtgagctgtgatcgtgacaccgcactccagtctgggcaacacagcaagrccttgtgtcaaaaaaatttttttaattaaatataaaagagtttcatgacattcagagaccatccaaagaacctgtgggttccggccaggcacagtgctcacgcctgtaatcccagcgctttgggaggccatagcaggtggatcgcttgaggtcaggagtttaagagcagcctggccaacatggtgaaaccccatctcttctaaaaatacaaaaaattagtcaggcatggtggtgggtgcctgtaatcccagccactcaggaggcggggacagcagaatggcttaaacttgggaggcggaggttgcagtgagccaaggtcacaccattgcactccagcctgggcaacaagagcaaaactacatctcaaaaaaaaaaaaaaaaaactcgagggggggcccggtacccaattcgccctatggtgagtngaatg

SEQ ID NO: 402 - DNA, 2878 bp, Homo sapiens
  misc_feature (205)..(205): n equals a,t,g, or c
  misc_feature (213)..(213): n equals a,t,g, or c
  misc_feature (840)..(840): n equals a,t,g, or c
tgatgatcaggatgaagggagcccagtcacccaagaacctgagctagcatcaggtggtggtggtagtggtggagttggcaaaaaggrgcagctgtctgtgaagaagyttcgagtagtactgtttgctctatgctgcamtacagaacaggcagytgaacacttccgaaatccccagcgacgtattcgccgttggcttcgacgtttncaggcctnccagggggagaatctagagggcaaatatctgagctttgaggcagaagagaaactggctgagtrggtgctaacccagcgcgaacaacagctacctgtaaatgaggagaccttgttccagaaggccaccaaaataggacgttctttggaaggggggtttaagatctcctatgagtgggctgtgcgtttcatgctgcggcaccacctgactccccatgcccggcgagctgtggcccacaccctacctaaggatgtagcagagaatgcaggactcttcattgattttgtacaacggcagattcacaaccaggacttacccttgtctatgattgtggctattgatgagatctctttgttcctggatacagaggtgctgagcagtgatgatcgaaaggagaatgccctgcagacagtgggcacaggggaaccttggtgtgatgtagtcctagccattctggcagatggcactgtccttcccaccctggttttctacagagggcagatggatcagcctgctaacatgccagactccatattgctagaggcaaaggagagtggctacagtgatgacgagatcatggagctgtggtcaactcgagtgtggcagaagcacacagcttgccagcgcanaaaggcatgcttgtgatggactgtcatcgcactcacttgtcagaagaggtactggctatgcttagtgcctctagcactttgcctgcagtggtcccagcaggctgtagctccaaaattcagccattagatgtatgcatcaaaagaactgtcaagaacttcctgcataaaaaatggaaggaacaggctcgggaaatggcagatactgcatgtgattctgatgtcctgcttcagctggtgcttgtctggctgggtgaagtgctaggtgtcattggggactgtccagagctagttcagcgctccttcctggtggctagtgttctgcctggccccgatggcaacattaactcacctacaagaaatgctgacatgcaggaggagctaattgcctccctagaggagcaactgaagctgagtggggaacattctgagtcttccactccacgacccagatcatctcctgaagagacaattgagcctgaaagtcttcaccagctctttgagggtgaaagtgagaccgagtctttctatggctttgaagaagctgacctagatctgatggagatttgagtgttggggtcatgagggggtgtggagtgggggtgggaacatgtgagggagggtaaaggggcttagggaaaagggggcataccaggtggggtatttggtttctattttttaattttataccaccactcccccctgaagttgacttacacttccctgtggatttgtggattaattaggaaaaccaatagtaatcacgtctgagccaaggagctggcccattggtcattcacttctgctaaaaacaggtttttgtgactttttttttttttaaatttaaatcactgtgtttggtatttttctgacaaaattaagaaaaagaaaaaaaattatttgtgggcaaatgttaaatttttttgtttccccttttacctcaattgtatcatagtactgggtttttttgtttgttttattgtgtggccaatgtctttgggcatgatgctatctaatcattgttaatgtgagaacatttctgaagatgggaaagacaaattatgtagctcacaaactggtttattatatatatggataaaaaacttttttcattgtggtcttaacacttttatataaaaatgaaaatggaaaaaaagtcccactgaactctctcttccttctccttttctttccttccctctccagagatgttggtttctacagcaaccctagatataaaattgtggctttaaaaatgcatgaaaccacctttaattatccagaatgaatagatttgtcttttcctcaccaccttccctccaaaacatgacataaacaatattttttgcacttgtgatccttggcccctttccccattctcaacaccatccatccctctggacaaaggatcatacaggtgttattagcaagcaagagatactgaagcgatcaaacagttttagggtggaagccattcccagtttgagtcttcatcctgtaagcccccaggggcagtccctgctttactgaacttcatcctgttagatggagagcatgcctgtttaagggattactggtcctacagccaggagctaattgttcaagaagtgttgaactttaaaaagacaagaccacttgttgaaatccagcgtgctctgtggctttcccctatttctcttaatacttagggaagaatctgacaggaagaagcgcacaggggtgtgcacaaagaaaatgacatgaatctttatttttcactgccagcttcaaggaaagaaaattttttctacaatttgcatgagggatttttttaattgtatgtactcatggttgtaaaccaaaacgtactgtaccgtacagagaaaaggagcaaaaaaccaagtcttctgtttatcctgaggctttccacaatgttcccctcctgtgagccaaggaggcaaactgcacaagcttgtaaatggttcgtctttaaaatgtacataagtggaacatttaataaaatgaggggaaatggaaaaaaaaaaaaaaaaaaaaaaaaaaa

SEQ ID NO: 403 - DNA, 2443 bp, Homo sapiens
  misc_feature (41)..(41): n equals a,t,g, or c
  misc_feature (77)..(77): n equals a,t,g, or c
  misc_feature (2326)..(2326): n equals a,t,g, or c
  misc_feature (2348)..(2348): n equals a,t,g, or c
  misc_feature (2375)..(2375): n equals a,t,g, or c
  misc_feature (2434)..(2434): n equals a,t,g, or c
ttatagtcctgtcgggtttcgccacctctgacttgagcgtngatttttgtgatgctcgtcaggggggcggagcctanggaaaaacgccagcaacgcggyctttttacggttcctggccttttgctggccttttgctcacatgttctttcctgcgttatcccctgattctgtggataaccgtattaccgcctttgagtgagctgataccgctcgccgcagccgaacgaccgagcgcagcgagtcagtgagcgaggaagcggaagagcgcccaatacgcaaaccgcctctccccgcgcgttggccgattcattaatgcagctggcacgacaggtttcccgactggaaagcgggcagtgagcgcaacgcaattaatgtgagttagctcactcattaggcaccccaggctttacactttatgcttccggctcgtatgttgtgtggaattgtgagcggataacaatttcacacaggaaacagctatgaccatgattacgccaagctcgaaattaaccctcactaaagggaacaaaagctggagctccaccgcggtggcggccgctctagaactagtggatcccccgggctgcaggaattcggcacgagtttgtatttatattgaatgcatcccttccttaccatatgttagcaacctgtgcagaagccctacccagacctaactgggaactggctctgtatatcatcatctcaggaataatgagtgcactgtttcttttggtcattggaacagcctatttggaagctcaaggaatatgggagccatttcgaaggcggctatcctttgaggcctcgaacccgcccttcgatgtgggaaggccatttgatctcaggagaatcgttggtatttcatctgaaggaaacttgaacacactcagctgtgaccccggtcacagtagggggttctgtggagcaggcggttcatcatcccgacccagtgccgggagtcataagcagtgtggcccatcggtccacccacacagcagtcacagcaatagaaactcagctgacgtggaaaacgtcagagccaaaaacagttcaagtacctctagtaggacttctgctcaagcagcttcttcacagtctgctaacaaaacaagcccccttgtcttagattcgaacacagtgactcaaggtcatacagcgggcagaaagtccaaaggggcaaagcagagccagcacggcagccagcaccatgcccacagcccgctggagcagcaccctcagcctcctctgccaccgccagtgcctcagccccaggagcygcagcctgaaaggctgtctcccgcccccctcgcacacccttcccacccagaacgtgccagcagcgcgaggcacagttccgaggactcggacatcaccagtctcatagaagccatggacaaagacttcgaccaccatgactccccagccctagaagtgtttacagagcagcctccatcgccattgccaaaaagcaaagggaaaggaaaacctcttcagcgcaaggtgaaaccacctaagaagcaagaggaaaaggagaagaagggaaagggaaagccacaggaagatgagctgaaggactctttggctgatgatgatagctcctccaccaccacagagacctccaaccctgacacagaaccgctcctcaaggaggatacagaaaagcaaaagggaaaacaagccatgcctgaaaaacatgaaagtgaaatgtctcaagtgaagcaaaaaagcaaaaaactcttaaatattaagaaagaaatcccaacagatgtgaaacccagttcattagaactaccatatactccccctttggaaagtaagcaacgtagaaatctcccaagcaagattcctcttccaactgcaatgacaagtggatccaaatcacgaaatgcccagaaaacaaaaggtacaagtaagttagtggataacagaccacctgccctagcaaaattcctcccgaatagtcaagaattaggcaacaccagtagctcagagggtgaaaaagactctcctccaccggagtgggattccgttccagttcacaaacctggcagctctactgatagtctttataaactttctctgcaaaccctcaacgcagacattttcttaaaacaacgccagacctcaccgacacctgcttccccgtctcccccagctgccccctgcccctttgtggcccggggcagctacagcagcatcgtcaacagcagctccagcagtgaccctaaaataaaacagccaaatggaagcaaacacaagttgacaaaggcagcctcgctyccgggcaagaacggcaaccccayttttgctgcartcacggctnggctacgacaagagcccaggtngggaatggctttgcttaaagtttcttncaaacaaaacaggtttyttcmagcagccttkgggwwtttmacagsttctgkttgacagnggtgggttt

SEQ ID NO: 404 - DNA, 3179 bp, Homo sapiens
  misc_feature (49)..(49): n equals a,t,g, or c
  misc_feature (2993)..(2993): n equals a,t,g, or c
gctctctctctctctctctctctctctgctttcctcgcgagcctgcggntgggcttcttctcagaggaacgagaatgaatatgactcaagcccgggttctggtggctgcagtggtggggttggtggctgtcctgctctacgcctccatccacaagattgaggagggccatctggmtgtgtactwcaggggaggagctttactaactagccccagtggaccaggctatcatatcatgttgcctttcattactacgttcagatctgtgcagacaacactacaaactgatgaagttaaaaatgtgccttgtggaacaagtggtggggtcatgatctatattgaccgaatagaagtggttaatatgttggctccttatgcagtgtttgatatcgtgaggaactatactgcagattatgacaagaccttaatcttcaataaaatccaccatgagctgaaccagttctgcagtgcccacacacttcaggaagtttacattgaattgtttgatcaaatagatgaaaacctgaagcaagctctgcagaaagacttaaacctcatggccccaggtctcactatacaggctgtgcgtgttacaaaacccaaaatcccagaagccataagaagaaattttgagttaatggaggctgagaagacaaaactccttatagctgcacagaaacaaaaggttgtggaaaaagaagctgagacagagaggaaaaaggcagttatagaagcagagaagattgcacaagtggcaaaaattcggtttcagcagaaagtgatggaaaaagaaactgaaaagcgcatttctgaaatcgaagatgctgcattcctggcccgagagaaagcgaaagcagatgctgaatattatgctgcacacaaatatgccacctcaaacaagcacaagttgaccccggaatatctggagctcaaaaagtaccaggccattgcttctaacagtaagatctattttggcagcaacatccctaacatgttcgtggactcctcatgtgctttgaaatattcagatattaggactggaagagaaagctcactcccctctaaggaggctcttgaaccctctggagagaacgtcatccaaaacaaagagagcacaggttgatgcaagaggtggaaatgttctccatatcaagatgtggcccaaggggttaagtgggaacaatcattatacggactcttcagatttacagagaacttacacttcatctgttccacctctcctgcgatagtcctgggtgctccactgattggaggatagagccagctgtctgacacacaaatggtcttttcagccacagtcttatcaagtatcctatatgtattcctttctaaactgctactcatgaatgaggaaagtctgatgctaagatactgcctgcactggaatgttaaacactaaatatataacaagctgtgttttcctaagctgagatctgttgaataatgtttacattcgtcccccggggaaatgtatgctcagccaccattcaagagatgactgagaaggagatggtaagttcaagaagactgattgcacctgggacccaggccctttctttgggatccagtcccagccttcatccatgtgattaagatccaggccgctgaagttccccaggaaatgatcttccacttgagcaaccttttacttgatacgatttgcacctttctgttttcctgcagtcagggtggtggcctgcagggacctgagctttgctacccaaccagattcctcatagagattcctaatcactagtttcttgtattcataaactcagagatacagagggcttggtttgaagttggggtgagatgaaacctttgctctgagccaaagctctggggccttgcattccctgcattgggttgatgactgtcagcatcactgccgcagcatgcttgactaaggtacctggttttagccacagccacctccttgtatgttacctttcagctctggccaagagtgggacagggttttaaccacaaataggagcagcatgcaattcctagtgacttgctgcacagtattgtatcataattacaggaagtttttatttttaaaactggatctggggtatattcatttgccccatcacctctgtctaaaggcccaagtcctagggctgccatggtcacaagcacactgatgctccttaagattgtttatctggagcccacatagtgtggaacaaaaagtcacctagaaagcatccttggtcatcattgtctccttcccacctggcccagagatgcttaaatccaagttgtttctccagctgtcacctcccccaggagatcaggattccactgacgtcctgggcagccagtgaatttaattttccatgagaaacaacagagttaacctgtggcattaggagacctacttcatgtggaccctttttttccttcagtttaacttttctggagcagtgtgctgcgtagttcggcctgagtttgtgcagcttgttaagacaactcttgtgtacgctatgttgaagctcaacaaaaaagtcatgggaccacttctagaaatctttcagctgtcaggcctgtcagtctcatgacagtttgttggttgtgccaaacactttatttgggaaaggaaagcccagatttgaatgggtctttcccctgggccttatcctatagaggcatttgtaatatggagaaaataatttttcatttttgctcatttaattctataaattctctttataaatgaattttgtgttctttagttctccttaaaagaacttttgaattataaaaataaaatctttacctgtcgaattgttgctgcagatgattgttgtggaaaatctggatcattgacctctgtgctttcattcctagagatgttttatagttacatgagcaaaagctgttgccccaaagtgatggccctggaggcggggctgaggaacagggaaatgccgctgtgaagtcttaaagcacttctgcttaaactccnatgtgtgaggagtgtgcctccctgtgccctctcagctctgaggctggccgtctttcggggtgttccttttggcaaatatacactgtaatcttgagtctaaatttatatgttgaaatgctaccttttttaaaataagaaactaaataaaattattttactatcaaaaaaaaaaaaaaaaaactcgag

SEQ ID NO: 405 - DNA, 1411 bp, Homo sapiens
ggcacgagctgtaccaaggcttcagagtgagcagggggacatctggataggttagccagggccacagagagaagagctgcttacacctgaattgtttcacccttttcaagaacagggttgtccttctccccatctggatccttgggctagatctctgccgaggggctccgtcaagtcccgcaaggctagagaagggagccccacatcatttccactttcaaagagggaagatgctcgtcattcaaattacttctgttgatttccatggtatccccctgtccgtcccacaatctcttaccaggcgtcaatgcacatgcaggggatggaaagaggatgagccgatgagcagactttgcattaatcaaggagaaagaaaaagcagatggaaggaggtaggtagatggagaaagcaacagctccttttagcccttgatgacggccctgaaggcctgtctcttttagtgactcctctttgggtcctcttcccctacctctcagtgactaggttcctcatattaattccctgctgtgagtttggctccttgtgctgggcaattcagtcatcctcagaaagagcaaagttggtcttggaattaaggtgcaggtggggaaaaagaggactcagctagacacgaagaaaggctctcttcccagtctaagcccttctaccgtaaggggcattttatcaagacagccacccaactccccatcccatctcccctcctttgtagaaacagcatttgactcaccaagcctttctctccctttccgtgtgtcttgcttagtttctggattgagagaatttctatccttgctccctcgaactctaaaagagcttcttttgaaaactggggagtatcaggcctacctctacatgtgcaacagtgccaggattcaaaggaaaagctcattccagcctctgcctcttgggagatggttcagagtgccacatagggactgaaagagggtgtctgaatccttcaggaatgctttaagtgacattgttgaaaagagataaagaaaaggaaaacaatggaattgggtttctaaggtccctggaaatatcctgggggtctaattgagaaagaaaataagaggaaatttgaagactcacttcttccttcatctgaatccactcagatggcaactgatctctgtcccaaggaccctctaccccacccaattcataatcatctcagattagaaaaggcagaattccttcccattctcaaatcagcatttgggttaggggcccctaagttacgtgagcatgttagaaatgtgaccccaggcctcaagagagaggctctgccacatgagaggagataggaatcatgactgaaaggggattagcacagaacagagaaaactgatttgatagacaaatcaaatagaaaaaaaaaaaaaaaaa

SEQ ID NO: 406 - DNA, 1065 bp, Homo sapiens
ttttttttttttttttttttttttcccaggagtcaacactttattttgttcaggccaaccacactgggagcccagcatccccgcaggataatgcctctgtgggctcatctcgcctcttgagggtggccatgctggctggctctggccaccggggaggcctggccagtctctctgtctccaagttattgtagagtcgggaagtcttcaagggcagcttcaaggaggctgaactggttcctamttctggaggtatttcttcattatgctcgcaacatcgtcgtctttcctccccgtccctggctctctccgctcgggggacgttcgctcgccaccgtcacccgcaagtcgtgggattcctggtcgacttttgatgctgtcagcacttttgaaggacacgatggagccggaggatgaggacgagtcagacaggtgagcgggatcctccttgggctccgggctcttcttcaaaatggtcttgatccccgagagaaaggaacggttagcctcttccgtttcaaagtggatgcttgaacgctgtgaaccgtcttgcccacctttggctgatccagccaaggaggtaggtgtctggggcttccggatagctgggaggaagtcatcgaagtccactttggtcttgcgttcgtagtcgaggcttgggagtttccagctgaatgggtcactgcctagaggttcctccatcaggtgggcaaactggcggttctggaaaacaagcggctcctttccaaggtctggacagcccgcatcgtccacagaggactccagacaccgcctccgaggacgcagtgtgggcgacaacagcatgtccctgggtgtggtcggagagctcagttttctccccatgctcggtctggattctaagagggactcgcaggaactgaatcgggttttcgacttttcggggagtagggttgtgcccccaacaccgtctgaagagatgcatttgaggctggtggacctcaagagaccaccagcggccccttcgatttccaggggtgactttgccccaaccctcagcgagaggtttccctcgtcactgctcgtgcc

SEQ ID NO: 407 - DNA, 1109 bp, Homo sapiens; identical to SEQ ID NO: 389

SEQ ID NO: 408 - DNA, 1980 bp, Homo sapiens
  misc_feature (35)..(35): n equals a,t,g, or c
cggacgcgtgggcgagcccgggcgccggcgggcgnccgtcgcgtctgacagaccactgcagaccacgggccgaggcccagcgcccgtccgcagcgcggcggcatggcggcgacaaggagccccacgcgggcaagggagcgggacggtctggcgctcccgccgcaggaagtgaccaagttcactcctggatgctagctacaagccaagccttagacactgtctggagaatggcaaaaggctttgtgatgttggcagtttcatttctggtggctgccatctgctacttccggaggctacatttatattcagggcacaagctgaaatggtggattggatatctgcagagaaaattcaaaaggaacctcagtgtggaggcagaggttgatttactcagttattgtgcaagagaatggaaaggagagacaccccgtaacaagctgatgaggaaggcttatgaggagctattttggcggcatcacattaaatgtgttcgacaagtaaggagagataactatgatgctctcagatcagtgttatttcagatattcagccagggcatctcttttccatcatggatgaaagaaaaggacattgttaagcttcctgaaaaactgctgttttcacaaggttgtaattggattcagcagtacagttttggtcctgagaagtatacaggctcgaatgtgtttggaaaactacggaaatatgtggaattattgaaaacacagtggactgaatttaatggcattagagattatcacaagagaggaagtatgtgcaacacccttttttcagatgccattctggaatataaactttatgaagctttaaagttcatcatgctgtatcaagtcactgaagtttatgaacaaatgaagactaaaaaggtcattcccagtctttttagactcctgttttccagggagacatcctctgatcctttgagcttcatgatgaatcacctgaattctgtaggcgacacatgtggactagagcagattgatatgtttatacttggatactcccttgaagtaaagataaaagtgttcagactgttcaagtttaactccagagactttgaagtctgctacccagaggagcctctcagggactggccggagatctccctgctgaccgagaacgaccgccactaccacattccagtcttttaagtccgctgggggccgaacagcagtgctcaccagtgacggtggtcacagttgcaataaagtctctctctgaaaccaaagctagcatttcagcatggaaggaattaggaccttttcttcaggattacaggtacactggatgcagccatgcatggatggtttttctttatttttcagtgatttcctctgaagcagctgcactgatacatttgggagttggtggcttgactttgtccataaggggcgtggccacttcacatgatggcgggcctttaagagcacaaagaagtttaatatggacaacaacaggaaaaagcaagaagaaaacaagtagggaaaaacagctaacctggagagaaagaatttctttaacctttatgttcttcattaaaaatcttatcttggactgatttgagggatttttagaaacatggccttattttatataagcattaccttcccaggaatctttgttgtatattaatttttgataaccatttgattaactttaaaattaagtatatgtgtgtatatatacatatgtatgtttatatacacacatgtatctgtatagttttatatatacatatatacacatagacatacagagaaccactactttgtaatagtgtacagtttgttttatatctctttactttttttgttactattttatctggccagcgtaatagttttatttagattttttaaaattctgtagattaaagcaaatgacagttattgaactatcacaaaactattaaactgtggtacatttaaaaaaaaaaaaaaaaaaaaaaaaaaactcgta

SEQ ID NO: 409 - DNA, 1663 bp, Homo sapiens
ggtattaagtccatcttgtgttggtacattggcagagacatatgctttaaaaacttaaatatttcggaggcacatgttggactactttgttttaattaaactgctagtatttctttgtcaaggatgtttctagttttttgctttattgccttgcattctaatgcagtttgttctgtaactcgagagccagtagcattggattgatggaagtgtagggtttatgaattattgcagctgactaccatacctcacacagcgttggtgttgtgagcggcccatgaaaagccaaattaaaaatcaaggattcagtcaaactaagcaggtactcatgccaggtactcctttctctacccacatccatgtttgaatgctattgcctgtgatctttacgcttaactgttgtgtatcttttttgttctttacaagaagtgcagaggggttttttgtgtattgcgtgaaaacttataaaacaaatgttaacagaatggaattttttttcaactgtatgtagggctgcagtggtggccagaattagatatctttaaagaattttaaatacaataaacacttcatattattcgccttgttacactcaatgcaattctcaagtctataagaggtatgtgcttaatatttcctactgtgtaggagaatttgcagtcagccataggtatgtaggaatagtcactcactggctgatacatttaaagcagcagtgtgaatagcaaggacagacaccttcaatttgtgaaatcaaagaactgatgcactatatagaacgaatttgggtttttaaagaaatattaaaagttaggtactgtaagtgttcttaaaacctgtaaacttcattctgtgggctagtggtgtgggacaaaatattcctaatgaaaggaagtaccaattagttgatttgttggtggcattccccttttgggaaagcaatgtaaggttatgtctgtgtatgtcattcacacttaggcaagcatacacaggcacatggctttaagaaccacactgatgccttgataattaaaaagaatacaagcattccatgtacacatgttaattagcagttagtgactgggccaacactttctcataaaaattggccttttacatgttgtctaattatcatttttccccaaattttgcgttgtaggactactgttcgaagatttttggaagaatactgagaacggcataaagtgaagatcgacatttaaaaaatgaggtgaaagaaagctatagtggcatagaaaaagtataaagctcagttagtttttttattattattattattaaaagttaattcaggactgatgtgacctaccagatttcagaacatgtgttaatagtatatatgccactgaaaacttaggtcctgtatcatacttttttctttaagactttttaagaaatattacttaaacatgtggcttgctcagtgtttaattgcaagttttcaatcttggactttgaaaacaggattaaacgttagtattcgtgtgaatcagactaagtgggatttcatttttacaactctgctctacttagcctttggatttagaagtaaaaataaagtatctctgactttctgttaaaaaaaaaaaaaaaaaaaaaaaaaaaaaaaaaaaaaaaaaaaaaaaaaaaaaaaaaactcgag

SEQ ID NO: 410 - DNA, 2495 bp, Homo sapiens
  misc_feature (913)..(913): n equals a,t,g, or c
tgtaaggtggtttggggtcatgtttttaaccacctggccaatacagtccactttctggtttcttttattgtgggaagtaaatggtcaagctgctcaggcagtgaaaagatgtggagaatgtccgttgtcattcttgccactgtattccatttgctaccgagatataacattaaggtggacacatttyctaactgtattaattaaaagtcaatggatacagagagtggatttyctcccaagtcccatccctgctgaagaccgcttggatgaactccccaacccactgtgcccctcccgcaacactaccagtagactttagaaccatagttaactaagtcttttacctctgagatacttaattctgggaaaattggtgacaattttcaacttctaaataggtaactcgactgcaaaataatcaaaactgataacaatgaaactgcggctcttaaacaaagccatgcatgccgtgcatttgtattgaaatgtctccatgatatgaagccaaatattcaatgtaacatacttaatatccaaaggtggaaacaaaagaatgtagagatccagtgttaagagttccatttgcttcaattaattatttaccttcctgtggaataatatatatatatatatttaatagaaccatagatagactagtagaatttagattataaatgtgtgagtgcagattatcctgctattgcacaagctagaggggggaaaaatctcaattccagctggcaagatgctagccaggacacatataagaaagttgcactagattgaatggtcacagaatcggaggacatggaagaaaaaggaaacttcggtggttctgcagcagacatgggctaggtcatatgtggtttctrtsaagttcgtgtctcaaaaaaaaaaggagggggggcatctntccccggtggagctcacctatttggraatatggggcatttgttttttccactgcaatgatttcagtctggtttcatcatgttggaattcgatcacaccattttcaaacaatgttaacatagtccagcttttgtttttctcatctcttctgagaggagactcactgtttctgtctgaggaagctcataccctcggcaaaacatcaggacaaataaagagaaatgggggtacgcattcccaacagaagcagtgtgttatttgttttaaaactctgaacagagatcttgggaaatctttcaaaaagaccattgaattcttcattggctgagaacgacgttttaaaatgtcttaaataaggctttgtttgcattgtttgagttcaaggggccttattattgaatggaattgcacaagcctttctttgtgcaatcaaaccattgttattggtagttctgtaaaggaaactgtggaatcgaattggcagtggagtcataaatctatttactgagtgtggcttccaagaaatgttgcaattcaaaatgcactaagtctgtgatttattggagatttggagattctaaataatatttttaaaaaacttccatgcaacttctggtttaatgtttggcaactccacatgataaaaaaataaaaacagcccaaccgagtttcggaattaagtattcttctagtaagtgattcaaacttgtaatatttgccacaggactgacttatttatttactagctagaagctcttaagttcacttgtttatcagggcatatacagaagggtttgttaaaactcgatgttaactttacaactttctgacctggtgcatgaattctcaagtactgtatttcactgtgttggtgtgtctgatggaaatttcgaggtggtcccacaaaaatattttatgtagtgtgccttcaaagagaaccatttatttctcttcacttatcgtcccacaaagtcacatttggtggtggtcagccaagtcgcatctggtctagttttactcttgtcccaattttaaagagaaatgggaatgagtttgccctggtgagacccataccattgcaatgattatcttgagcacttaaagtccagtgttggctgttagtgtatttgatattctgcctgtctcctcatggttgaaatatgtctgaagaatagcagcataatctcttggctgtttatacttttttaaactttcctgtgttgtaaatattgtatacttttggtgattccagctatgtaacctctatgctctgtaaggtgattatttgtatatagcaacatggcccagtgatattatatagtttcccaatggagaggttattgagtaacctttgcattagtttaaacactaccagaagaatgctgagccaactataaacactcaattttgtatgttttccaaattgtacttattactgcttttgatactgtattacgtgccaatagtttcccaatcacatagcaggcaagagatattttgtactttttgatccactgtaatatttaataaaaaatgttactatctgttaaaaaaaaaaaaaaaaaagggsggccgcccaaggg

SEQ ID NO: 411 - DNA, 1771 bp, Homo sapiens
  misc_feature (1672)..(1672): n equals a,t,g, or c
  misc_feature (1696)..(1696): n equals a,t,g, or c
  misc_feature (1706)..(1706): n equals a,t,g, or c
  misc_feature (1749)..(1749): n equals a,t,g, or c
gcctgcagtcgacactagtggatccaaagaattcggcctgtgcgagtaggcgcttgggcactcagtctccctggcgagcgacgggcagaaatctcgaaccagtggagcgcactcgtaacctggatcccagaaggtcgcgaaggcagtaccgtttcctcagcggcggactgctgcagtaagaatgtcttttccacctcatttgaatcgccctcccatgggaatcccagcactcccaccagggatcccacccccgcagtttccaggatttcctccacctgtacctccagggaccccaatgattcctgtaccaatgagcattatggctcctgctccaactgtcttagtacccactgtgtctatggttggaaagcatttgggcgcaagaaaggatcatccaggcttaaaggctaaagaaaatgatgaaaattgtggtcctactaccactgtttttgttggcaacatttccgagaaagcttcagacatgcttataagacaactcttagctaaatgtggtttggttttgagctggaagagagtacaaggtgcttccggaaagcttcaagccttcggattctgtgagtacaaggagccagaatctaccctccgtgcactcagattattacatgacctgcaaattggagagaaaaagctactcgttaaagttgatgcaaagacaaaggcacagctggatgaatggaaagcaaagaagaaagcttctaatgggaatgcaaggccagaaactgtcactaatgacgatgaagaagccttggatgaagaaacaaagaggagagatcagatgattaaaggggctattgaagttttaattcgtgaatactccagtgagctaaatgccccctcacaggaatctgattctcaccccaggaagaagaagaaggaaaagaaggaggacattttccgcagatttccagtggccccactgatcccttatccactcatcactaaggaggatataaatgctatagaaatggaagaagacaaaagagacctgatatctcgagagatcagcaaattcagagacacacataagaaactggaagaagagaaaggcaaaaaggaaaaagaaagacaggaaattgagaaagaacggagagaaagagagagggagcgtgaaagggaacgagaaaggcgagaacgggaacgagaaagggaaagagaacgtgaacgagaaaaggagaaagaacgggagcgggaacgagaacgggatagggaccgtgaccggacaaaagagagagaccgagatcgggatcgagagagagatcgtgaccgggatagagaaaggagctcagatcgtaataaggatcgcagtcgatcaagagaaaaaagcagagatcgtgaaagggaacgagagcgggaaagagagagagagagagaacgagagcgagaacgagaacgggagcgagagagagagcgagagagggaacgggagcgagaaaragaaaaagacaaaaaacgggaccgagaagaagatgaagaagatgcatacgaacgaagaaaacttgaaagaaaactccgagagaaagaagctgcttatcaagagcgccttaagaattgggaaatcagagaacgaaagaaaacccgggaatatgagaaagaagctraaararaaggaagaaagaaggaaggagaattggccaaaggaagcttaaacganttaaaaagatttttttaggaagantttttgttgnttgattaggaggttgaccccaattttttaccagagggaattgntttttcaggaaaagttttcctt

SEQ ID NO: 412 - DNA, 1534 bp, Homo sapiens
ggcacaagcagctcgccgcgcagcggctgtatttgcggcctgtgcgagtaggcgcttgggcactcagtctccctggcgagcgacgggcagaaatctcgaaccagtggagcgcactcgtaacctggatcccagaaggtcgcgaaggcagtaccgtttcctcagcggcggactgctgcagtaagaatgtcttttccacctcatttgaatcgccctcccatgggaatcccagcactcccaccagggatcccacccccgcagtttccaggatttcctccacctgtacctccagggaccccaatgattcctgtaccaatgagcattatggctcctgctccaactgtcttagtacccactgtgtctatggttggaaagcatttgggcgcaagaaaggatcatccaggcttaaaggctaaagaaaatgatgaaaattgtggtcctactaccactgtttttgttggcaacatttccgagaaagcttcagacatgcttataagacaactcttagctaaatgtggtttggttttgagctggaagagagtacaaggtgcttccggaaagcttcaagccttcggattctgtgagtacaaggagccagaatctaccctccgtgcactcagattattacatgacctgcaaattggagagaaaaagctactcgttaaagttgatgcaaagacaaaggcacagctggatgaatggaaagcaaagaagaaagcttctaatgggaatgcaaggccagaaactgtcactaatgacgatgaagaagccttggatgaagaaacaaagaggagagatcagatgattaaaggggctattgaagttttaattcgtgaatactccagtgagctaaatgccccctcacaggaatctgattctcaccccaggaagaagaagaaggaaaagaaggaggacattttccgcagatttccagtggccccactgatcccttatccactcatcactaaggaggatataaatgctatagaaatggaagaagacaaaagagacctgatatctcgagagatcagcaaattcagagacacacataagaaactggaagaagagaaaggcaaaaaggaaaaagaaagacaggaaattgagaaagaacggagagaaagagagagggagcgtgaaagggaacgagaaaggcgagaacgggaacgagaaagggaaagagaacgtgaacgagaaaaggagaaagaacgggagcgggaacgagaacgggatagggaccgtgaccggacaaaagagagagaccgagatcgggatcgagagagagatcgtgaccgggatagagaaaggagctcagatcgtaataaggatcgcagtcgatcaagagaaaaaagcagagatcgtgaaagggaacgagagcgggaaagagagagagagagagaacgagagcgagaacgagaacgggagcgagagagagagcgagagagggaacgggagcgagaaaaaaaaaaaaaaaaaaaagggcggccgctctagaggatccaagcttacgtacgcgtgcatgcgacgtcaaagtcttctg

SEQ ID NO: 413 - DNA, 1157 bp, Homo sapiens
  misc_feature (826)..(826): n equals a,t,g, or c
caaggtcgccggtatcgataagctttgatatcgaattcaaccaatcactgttatcagggcagtcatccctttgtccagccatgctcctgtatcagagaagcactgccatgacagatattgggcaaactgatatatgacccccaatactgggtttggtgctcattctcgttaatgcatgtgttaagggtttcattctaatcatctgcaaaaaagtgattgttgtctttaaaatgttaccaaaactagtcttttagcaagaatcttactagaataaaatggctcttgctacctgtatttttaatcagcctatgtatattgatcccattcctgatattatcaccttaatatataacagccccaattcctcttattgagcattggttgctagggaaagcaaaaagttaagagaaaactactgagattttctctctaatttgcctctgtctgcctctaactagcttagagatcttggacaagtcctttaacagttctctgtcagctgcttggactgtgaaatagagataaaagtacctgtctawttcaggccgggcacggtggctcacgcctgtaatcccagcactttgggaggcccaggagggtgggtcacgaggtcaggagattgagaccatcctggctaatgcagtgaaaccccgtttctactaaaaatacaaaaaaattagccgggggtggtggtgggcacctgtagtcccagctacctgggaggctgaggcaggagaatggcatgaaacccggaggcggagcttgcagtgagccgagatcacgccacggcattgcagcctgagtgacagagtgagacyccstctcnaaaaaataaacctttaaaaaaaaaaaaaaacaactgtctatttcatagaggtattgtgaggattaaatgagataatgttgatgaagtaattttgaaaagcatatcaatgtgcagctgtaaagttttattcatatttaccagccaggcaagtagtattagctgttataagtaaaggtaaacatccaagtgcatatgttcagatgattatttttaatatacattttctcctgatatatattcttctagttgcagatctgattggttgaattcgatatcaagcttatcgataccgtcgacctcgagggggggcccggtacccaattggccctag

SEQ ID NO: 414 - DNA, 1854 bp, Homo sapiens
  misc_feature (1280)..(1280): n equals a,t,g, or c
  misc_feature (1826)..(1826): n equals a,t,g, or c
  misc_feature (1835)..(1835): n equals a,t,g, or c
  misc_feature (1852)..(1853): n equals a,t,g, or c
agatcttgccatcatactccagcytgggcaacaagagtgaactccatctcacacaaaaaaaagaatgttgaatattggcccgcactctcttctggcttgtagtgtttccgcagagaaatccactgttagtctgatgggcttccctttgtggataacccgacctttctctctggctgcccttaacgtttttttcattcctttcaaccttggtgaatctgatgattacgtgtcttggggctgctcttctcgagaagtatctttgtggtggtctctgtctttcctgaacttgaatgttggtctgtcttgctaggttggggaagttctcctggataatatcctgaagagtgttttccaacttggttccattctccccatcattttcaggtacaccagtcaaacataggtttggtcttctcacatagtcccatatttcttggaggctttgttcattccttttcattcatttttctctaatcttgtcttcatgctttatttcattaagttgatcttcaatctctgatatccttttttccacttgatcgatttggctattgatacttgtgtatgcttcacaaagttcttgtgctgtgtttttcagctccatcaggtcattgatgattttctctagactggttattctagttagcaattcttctaaccttctttcaaggttcttagtttccttgcagtgggttagaatgtgctcctttagctcggaggagttacccaccttccgaagcctacttctgtcaattcgtcaaactcattttccatccagttttgtttccttgctggcgaggagttatgatcccttggaggagaagaggtgttctggtttttggaattttcagccttcttgtgctggtttttcctcatctccctggatttatctgcctttggtctttgatgttggtgacctttggatggggtttttgtgtggacatcgtttttgttgatgttgatgctattcctttctgttttttagtttttctcctaacaggcaggcttctctcctgcaggcctgctggagtttgctggaggtccactccagaccctgtttgcctgagtatcactagcagacactgcagaacagcaagattgctgcctgctccttcctctggaagtttcgtcccagaggggcacccgccagatgctagtggagctctcctgtatgaggtgtctgttgacccctgctgggaggtgtctcccagtcaggaggcacaggggtcagggacccacttraggaggcagtctgtcccttagcagagtttgagtgctgngctgggagattcgctgctctcttcagagctggcaggcaggaacatttacgtctgctgaagctgcacccacagccgcctcttccgccaggtcctctgtcccagagaggtgggagttttatctgttagcccctgactggggctgctgcctttctttcagagatgccctgtccagagaggaggaatctagagaggcagtctggctatggcagctttgcagagctgtggtgggctctgccaattcgaacttcccagaagctttgtttatactgtgaggggaaaaccacctactcaagcctcagtaatggtggacgcttctccccacaccaagcttgagagtcccaggtcgacttcagactgctgtgctggcagcaagaatttcaagccagtggattttagcttgctgggctctgtggcggtgggatccactgatccacttggctccctggcttcagttccctttccaggagagtgaacagttctgtcgctggcctttccaggtgtcactggggtatggaaaaaaaaaaaaaaaaaamtcgggggggcccntacccattngccttagggggcgtttnna

SEQ ID NO: 415 - DNA, 1081 bp, Homo sapiens; identical to SEQ ID NO: 396
  misc_feature (1076)..(1076): n equals a,t,g, or c
  misc_feature (1078)..(1078): n equals a,t,g, or c

SEQ ID NO: 416 - DNA, 1081 bp, Homo sapiens; identical to SEQ ID NO: 396
  misc_feature (1076)..(1076): n equals a,t,g, or c
  misc_feature (1078)..(1078): n equals a,t,g, or c

SEQ ID NO: 417 - DNA, 1044 bp, Homo sapiens
gctgagcacgccctctgagccgctcggtggacaccaggcactctagtaggcctggcctacccagaaacagcaggagagagaagaaacaggccagctgtgagaagccaaggacaccgagtcagtcatggcacctaaggcggcaaagggggccaagccagagccagcaccagctccacctccacccggggccaaacccgaggaagacaagaaggacggtaaggagccatcggacaaacctcaaaaggcggtgcaggaccataaggagccatcggacaaacctcaaaaggcggtgcagcccaagcacgaagtgggcacgaggagggggtgtcgccgctaccggtgggaattaaaagacagcaataaagagttctggctcttggggcacgctgagatcaagattcggagtttgggctgcctaatagctgcaatgatactgttgtcctcactcaccgtgcaccccatcttgaggcttatcatcaccatggagatatccttcttcagcttcttcatcttactgtacagctttgccattcatagatacatacccttcatcctgtggcccatttctgacctcttcaacgacctgattgcttgtgcgttccttgtgggagccgtggtctttgctgtgagaagtcggcgatccatgaatctccactacttacttgctgtgatccttattggtgcggctggagtttttgcttttatcgatgtgtgtcttcaaagaaaccacttcagaggcaagaaggccaaaaagcatatgctggttcctcctccaggaaaggaaaaaggaccccagcagggcaagggaccagaacccgccaagccaccagaacctggcaagccaccagggccagcaaagggaaagaaatgacttggaggaggctcctggtgtctgaaacggcagtgtattttacagcaatatgtttccactctcttccttgtcttctttctggaatggttttcttttccattttcattaccacctttgcttggaaaagaatggattaatggattctaaaagcctaaaaaaaaaaaaaaaaaaaa

SEQ ID NO: 418 - DNA, 1081 bp, Homo sapiens; identical to SEQ ID NO: 396
  misc_feature (1076)..(1076): n equals a,t,g, or c
  misc_feature (1078)..(1078): n equals a,t,g, or c

SEQ ID NO: 419 - DNA, 1100 bp, Homo sapiens
agagcacgccctctgagccgcwcggtggacaccaggcactctagtaggcctggcctacccagaaacagcaggagagagaagaaacaggccagctgtgagaagccaaggacaccgagtcagtcatggcacctaaggcggcaaagggggccaagccagagccagcaccagctccacctccacccggggccaaacccgaggaagacaagaaggacggtaaggagccatcggacaaacctcaaaaggcggtgcaggaccataaggagccatcggacaaacctcaaaaggcggtgcagcccaagcacgaagtgggcacgaggagggggtgtcgccgctaccggtgggaattaaaagacagcaataaagagttctggctcttggggcacgctgagatcaagattcggagtttgggctgcctaatagctgcaatgatactgttgtcctcactcaccgtgcaccccatcttgaggcttatcatcaccatggagatatccttcttcagcttcttcatcttactgtacagctttgccattcatagatacatacccttcatcctgtggcccatttctgacctcttcaacgacctgattgcttgtgcgttccttgtgggagccgtggtctttgctgtgagaagtcggcgatccatgaatctccactacttacttgctgtgatccttattggtgcggctggagtttttgcttttatcgatgtgtgtcttcaaagaaaccacttcagaggcaagaaggccaaaaagcatatgctggttcctcctccaggaaaggaaaaaggaccccagcagggcaagggaccagaacccgccaagccaccagaacctggcaagccaccagggccagcaaagggaaagaaatgacttggaggaggctcctggtgtctgaaacggcagtgtattttacagcaatatgtttccactctcttccttgtcttctttctggaatggttttcttttccattttcattaccacctttgcttggaaaagaatggattaatggattctaaaagccwaaaaaaaaaaaaaaaaaaaaaaaaaaaaaaaaaaaaaaaaaaaaaaaaaaaaaaaaaaaaaaaaaaaaaaaactcgag

SEQ ID NO: 420 - DNA, 2167 bp, Homo sapiens
aattcggcacagggatctgtcttcctcctatttgcttgagcagacccgccctgagtctaattgacacaccaggtgggtttatgggcttctccttcctcccaagcatcccacagccacgttgcctattgtctttgtggcaagtcttgcccggcagcctagcttcagagcaatgtaagtggttgctgttatacccttctacccaccatgtgctggaaagaggagcatcatgactaaaaggcatgactcatgttctaatccatggcactactgatcctacttttctgcattttaaagtacaaacagctggatattgctgaagatggctcagggggtcaaggacaaatttcacaaatgtgacctcattctccaggctgcctgtttatcctggaggttgatcttggacttgggaccatttaaggttgcctatcttcaaagtgctcagcttggctttttaattctatactcctaaatctttgacagctgtgcatcaacaagctttcaaggtaactgaagcctagggcagctttctgccctctgttactggtgaatgtttttgcctgttggaaggacgttgcagctacaggcagactcccaccatccaccaacggccttattgtcaatccatagtcgtgtgctgactgcaaagtggcctgagttttttgcatatcttgtgagatcactatgggaacgcagtcattataatacagcagttcctgtcttgaggacttttgatagttttatttcttacagtttcatttcctattgatacaaaagagactcttggtaaccaaaaataaatgtaaccagaaatgtcggattctttgkttcatatatgaacatgattttgtaatgtaaattgaataagcccagatctattatgcaactatatactctcgtaacaagtgagtcacagaagcctccgtcaacactgacatattgatgaccttaagaagttagtgattacctatgatgtacaacaaacaaggctggwagctgccagcagaaactaggcataactacttctagtaagtactactactagttctaaaatttaaattaaatcagctcacaccttattttgtgctgctaccactaaaatccaagccaccatgacattatcactaacctggactactaactcatctttccgctttcactctgaccccctccattcattttccctggtgaagctagtgtcatcttataagtaaatcagatcatgtcattcatctcacaactcatctgctttccatctcaccgcaggatagaatccaaactcatcaccatggtccgtgagaccccctgtgatctggcctgcctgactctccgatctcatggcattaccactcccttccctcttgtgatgatctgtccgcaacgactttgctgtttctcatgcctggcccactatgtgcagacatgcaggttgtacaatgcataactccaagagaggcattcagtaggctgcagggtgaatgatgcccttggaagtatgtagtgtggtgaccctggtcacacgcacagctctttcctaccacaaagccttggcacttgctggcctttctgcctggacatccatctgaagattttttgcacagctggctccttcttgtcattcccttgacaaatattccaccaaacactactccataccagggaggctccataccaggcaggaccagctatatactttgcaggtcccagtgcaaaatgaaarccagggscccttgttcaaaaagtattaagaatttcaagacggtgacagcagaacattaaactaagcatggggcccttctcagtgcggggccctgtgggacaacataggtcacacctccatcaagatggtaagggtttcacatgtattcatgaactcaattgtattttaaagtttagtagaaattgcacaattaataactggttagtgtatatttacctctgcctttggaagttaaagttttttttttttgaactaaaaattccttaagtgtaatttcatccttgaaaagtcaaagatttgttgttttggcatattgtcaagtttttaaaatttaaaatacagttagttcaaaatatattcacagctttcattcatgagacatttataaatattgggttataaagttccacatttagtatttaactcaaaaaaaaaaaaaaaaaactcgag

SEQ ID NO: 421 - DNA, 2793 bp, Homo sapiens
  misc_feature (2762)..(2762): n equals a,t,g, or c
aatttgtaggcaggagtaaacgttaactgacggtgggttagtgccctgcatcttgcatatttgaactgtctagagttcctgccattgctgggtataaaacgaggagctctctgttgacctgtaaatcattaatacttcttgacttagagtgtcacttcactttatagatgacattttcctctttccccttgatattttctatgttgtgttagataattggtagatatrtagttgtggtttagtacatttagggcttctatttatttagattttgtttgttggagtctgtttccaaaagggaatgtgccatttagtctgcatctgtatctttgtggacttgatgatcactggtttgattttgaaaaatgtcttttccagcttttagttactctcatcaaatgtcacatatttctaatcacatgcactcctttaccacagaggcacataatcatttggcctcatagcagttatccatggccgtactgtagtaaagttccttagaactttgccaggagtgaactagaaaaaagtgcttactagggcctaagagttgctttgtgccgtgtagtccggcctttgcactagtagatcattgctgacataggtcagtttagagacctttctgtgttaatgcctcctggtactgtcttaagatacgtacagtgtctgtttttagatctatgcatatgtcatgaagctccttgtgggctctgcatgaagctgctgctttgtttttgggttaacagatgtgcctgtcaactagcatgtgtattgtccaaattccataaacttaaggtttttaagggctgtgtggtttctgagctctatgtgtctttcctatccttgtaccttcaaagggtgagaaatgagatttatacatccaaagttagtctgataaatatggctttttgtttctccatgtaacctagactgtcaaaaataagtgatggtgataagtaggcctggagcctcagcttctgtaaatctcattcctaaaattttgctagactcgtgttggcaaaaacaaatacctgtggattgtccttaaggcttttaatcagatacctgtgttgctgttagctgaactgtagtgaagcatcgatccaaatcggtcttctgaagtatcagttatgcttttgagtttagaaaatacttaggtgttagtctagtcttcccattcatgaatcagtgtatgtccatatcagagagcctcaacttcttttttcttcctttttaaaaatgattttagtgttttgatttagtgtatactacatagttcagtattattggctttaccagtgttgacagaaaaattttaaatctccagttgcaaacagcaatggattaggatatggaaataaaatcatggtgacatcactgctgagttatcttaaacctctgctacttaattctccatattgaaatgcatactcctccacatacatggcttccaagtaaaggcaattgtagaggggccctgtctatcccagtatggttggattttaaacatatctgtgtttccgttattttgggaactgattaatatttacaattttttttgtttatgagttattttgatactaagaaaagagagaatctagaacatcttgmagttgaaatacaaattttattcttttggtcttgggagaatttaagcagtctatgcaactcatcaaatggtgagaaatagccctccgaggttccagtaagctttcagtgactttgatacctccccaagtttcttgagttgctgcttgttaacacccagcttttaactgagtgtttgctcctgatggtttaggagattttcatgttgtatcacactgtcaagttttattttgtctttttatccctccgtggatgtgagtttgaaacaagcacggtacagtaatcctgcctgatagagtagtctggaatgagaattactttttgggtgagagagttctccattttaatgtttctaaagtttttcatatgaacttggcattggaaaagggaggtaaagaaaaaggacgtttactaaaagcagtgtctactcttcccctttgtgagtgtttattcatggctaatgaaaaaaagagaaggactcttgggttttgtgttgccatgttaagcatggagagggatgcttgacagcatgctaattgaagccagagcaagtatgtccttcatcaggtaatcaggaactcttcagttgaagctgaggaactaactgattagttgttgatcataatataattggttacaaagtggaagtgccagctggcttaagtacccaaagaaaagaatgcagcagcctaacttagtgttaccatatgttactgaatttgaaactgaccttttttcccaccctacttcacacacctaaaactcttttcttgtcagaccaaagagcgaaaagaaaaaaaaaaagtaaaacactttaccaatctgtcactcaggtacaattttgtggtgagatttttgtctgttctctttgtattgctcttaagagtcctttctcagcatattattctgccattgcctctgtcttccttggggcacctcagctctggatgctacccctgggatatctactgctgttatgtgaatgataggaggtaagtgaccattatagtaagggctctttgtaaaaaaattcaaaaaatttaaaaaggatgtatacattttatagtctggctatcagtttgatatcttgctgtcaagtatgtttctcaatctgtatttatccatcccatcaataaatgttaatggtaaaacancaaaaaaaaaaaaaaaaaaaaaaaaaaaaaa

SEQ ID NO: 422 - DNA, 927 bp, Homo sapiens
  misc_feature (883)..(883): n equals a,t,g, or c
  misc_feature (912)..(912): n equals a,t,g, or c
gcttcatcggtgaacaagggtgtttactgaatgtggagaagtcagtgaaatctccacagtgacagatgcactctggagatggggctgaggctaggtgtgcacctcccctgccagccatcagcagcctgcccacgtctgtcgcgttatgagttgttgatcttaaatttctgcaaatgtttcttgttacagagtatggtgtttgcraaaacttgcggaagctggagatcacaggcgtgtcttgtcgggacgtctatgcgaagcgtattaaaccctcgcgtgaagtcgggacgttttgtgaaaattctccctgattatgagcacatggcgtacagagacgtttacacctgcctgcttcaccgatatagacacattttgggattgtggcagccagatatcgggccatacggaggactgctgaacgtggtggtggacggcctgttcatcatcgtaatgaggcgtgcgccgccaatatgcactgtacattccacaagcattgccttcttattttacttcttttagctgtttaactttgtaagatgcaaagaggttggatcaagtttaaatgactgtgctgcccctttcacatcaaagaactactgacaacgaaggccgcgcctgcctttcccatctatctatctggctggcagggaaggaaagaacttgcatgttggtgaaggaagaagtggggtggaagaagtggggtgggacgacagtgaaatctagagtaaaaccaagctggcccaaggtgtcctgcaggctgtaatgcagtttaatcagagtgccatttttttttttgttcaaatgattttaattattggaatgcacaatttttttaatatgcaaataaaaagtttaaaaacttaaaaaaaaaaaaaaaaaaaanccccggggggggccccggwaccaatttcnccccaaaagggagcc

SEQ ID NO: 423 - DNA, 1735 bp, Homo sapiens
cccacgcgtccgccaggccttgagacccagaagggagcgaaggtttttgctgcgccaacgcagtgaccgaaggctccgctcacgcccggcctgatcctgcctgaagatggtgccactggtggctgtggtatcagggccccgtgcccagctctttgcctgcctgctcaggctgggcactcagcaggtcggcccccttcagctgcacaccggggccagccatgcggccaggaaccattatgaggtgctggtgctgggtgggggcagtggcggaatcaccatggctgcccgcatgaagaggaaagtgggtgcagagaatgtggccattgttgagcccagtgagagacatttctaccagccaatctggacactggtgggtgctggtgccaaacaattgtcctcatctggtcgtcccacggcaagtgtgattccatctggtgtagaatggatcaaagctagagtgactgagttgaacccagacaagaactgcattcacacagatgacgacgagaagatctcctaccgatatcttattattgctctcggaatccagctggactatgagaagattaaaggcctacctgaaggtttcgctcatcccaaaatagggtcgaattattcagttaagactgtagagaagacatggaaagctctgcaggacttcaaagagggcaatgccatcttcaccttcccaaatactccagtgaagtgtgctggagcccctcagaagatcatgtacttatcagaagcctacttcaggaagacagggaagcgatccaaggccaatatcattttcaacacttctcttggagccattttcggggttaagaagtatgcagatgccctgcaggagatcatccaggagcggaacctcactgttaactacaagaaaaacctcattgaagtccgagccgataaacaagaggctgtatttgagaacctggacaaaccaggagagacccaagtgatttcatatgaaatgcttcatgtcacacctccaatgagcccaccagatgtcctcaagaccagtcctgtggctgatgctgctggttgggtggatgtggataaagaaactctgcaacacaggaggtacccaaatgtgtttgggattggggactgcaccaaccttcctacgtcaaagaccgctgctgcagtagctgcccagtcaggaatacttgataggacaatttctgtaattatgaagaatcaaacaccaacaaagaagtatgatggctacacatcatgtccactggtgaccggctacaaccgtgtgattcttgctgagtttgactacaaagcagagccgctagaaaccttcccctttgatcaaagcaaagagcgcctttccatgtatctcatgaaagctgacctgatgcctttcctgtattggaatatgatgctaaggggttactggggaggaccagcgtttctgcgcaagttgtttcatctaggtatgagttaaggatggctcagcacttgctcatcttggatggcttctgggccaaaactgcagtcactgaatgaccaagagcagcacgaaggacttggaacctatccttgtaaagagttccttgatgggtaatggtgaccaaatgcctcccttttcagtacctttgaacagcaaccatgtgggctactcatgatgggcttgattctttgggaataataaaatgaaataatacttttattttctgaataaaagtttgtcactgaaaaaaaaaaaaaaaaaaaactcgag

SEQ ID NO: 424 - DNA, 1733 bp, Homo sapiens
  misc_feature (1730)..(1730): n equals a,t,g, or c
cccacgcgtccgccaggccttgagacccagaagggagcgaaggtttttgctgcgccaacgcagtgaccgaagctccgctcacgcccggcctgatcctgcctgaagatggtgccactggtggctgtggtatcagggccccgtgcccagctctttgcctgcctgctcaggctgggcactcagcaggtcggcccccttcagctgcacaccggggccagccatgcggccaggaaccattatgaggtgctggtgctgggtgggggcagtggcggaatcaccatggctgcccgcatgaagaggaaagtgggtgcagagaatgtggccattgttgagcccagtgagagacatttctaccagccaatctggacactggtgggtgctggtgccaaacaattgtcctcatctggtcgtcccacggcaagtgtgattccatctggtgtagaatggatcaaagctagagtgactgagttgaacccagacaagaactgcattcacacagatgacgacgagaagatctcctaccgatatcttattattgctctcggaatccagctggactatgagaagattaaaggcctacctgaaggtttcgctcatcccaaaatagggtcgaattattcagttaagactgtagagaagacatggaaagctctgcaggacttcaaagagggcaatgccatcttcaccttcccaaatactccagtgaagtgtgctggagcccctcagaagatcatgtacttatcagaagcctacttcaggaagacagggaagcgatccaaggccaatatcattttcaacacttctcttggagccattttcggggttaagaagtatgcagatgccctgcaggagatcatccaggagcggaacctcactgttaactacaagaaaaacctcattgaagtccgagccgataaacaagaggctgtatttgagaacctggacaaaccaggagagacccaagtgatttcatatgaaatgcttcatgtcacacctccaatgagcccaccagatgtcctcaagaccagtcctgtggctgatgctgctggttgggtggatgtggataaagaaactctgcaacacaggaggtacccaaatgtgtttgggattggggactgcaccaaccttcctacgtcaaagaccgctgctgcagtagctgcccagtcaggaatacttgataggacaatttctgtaattatgaagaatcaaacaccaacaaagaagtatgatggctacacatcatgtccactggtgaccggctacaaccgtgtgattcttgctgagtttgactacaaagcagagccgctagaaaccttcccctttgatcaaagcaaagagcgcctttccatgtatctcatgaaagctgacctgatgcctttcctgtattggaatatgatgctaaggggttactggggaggaccagcgtttctgcgcaagttgtttcatctaggtatgagttaaggatggctcagcacttgctcatcttggatggcttctgggccaaaactgcagtcactgaatgaccaagagcagcacgaaggacttggaacctatccttgtaaagagttccttgatgggtaatggtgaccaaatgcctcccttttcagtacctttgaacagcaaccatgtgggctactcatgatgggcttgattctttgggaataataaaatgaaataatacttttattttctgaataaaagtttgtcactgaaaaaaaaacctccgggggggnccg

SEQ ID NO: 425 - DNA, 1733 bp, Homo sapiens; identical to SEQ ID NO: 424
  misc_feature (1730)..(1730): n equals a,t,g, or c

SEQ ID NO: 426 - DNA, 1733 bp, Homo sapiens; identical to SEQ ID NO: 424
  misc_feature (1730)..(1730): n equals a,t,g, or c

SEQ ID NO: 427 - DNA, 1887 bp, Homo sapiens; identical to SEQ ID NO: 401
  misc_feature (1882)..(1882): n equals a,t,g, or c

SEQ ID NO: 428 - protein, 141 aa, Homo sapiens
LPASGCHGPAASSYSASAEPARVRALVYGHHGDPAKVVELKNLELAAVRGSDVRVKMLAAPINPSDINMIQGNYGLLPELPAVGGNEGVAQVVAVGSNVTGLKPGDWVIPANAGLESRSVAQAGAILAHCNLQPPPHRRMA

SEQ ID NO: 429 - protein, 18 aa, Homo sapiens
LGLLVPLEPHHVLGVESP

SEQ ID NO: 430 - protein, 78 aa, Homo sapiens [sequence omitted]

SEQ ID NO: 431 - protein, 41 aa, Homo sapiens
MCGRRPRLGWTCVWGCTRAPCWGASWARSAGSTTCGRLMSL

SEQ ID NO: 432 - protein, 139 aa, Homo sapiens
MSCPAHASPPCSNTSGCLEFSFCGFALPIPSPVLHSSWQGGEGWGWFGWVRGFFLCVRCCYLTVLRPYWPFSSSSYLYGTSNKDTHFRPGKKKKKKKKKKKKKKKKKKKKKKKKKKKKKKKKKKKKKKKKKKKKKKKKK

SEQ ID NO: 433 - protein, 30 aa, Homo sapiens
MLMMGTLVLILLHDVIVTFTEFYNAQNLKW

SEQ ID NO: 434 - protein, 23 aa, Homo sapiens
CLQWFVPLVPQQIPELILMTIWK

SEQ ID NO: 435 - protein, 20 aa, Homo sapiens
FLLSFCAFPCVFMFWVSVLH

SEQ ID NO: 436 - protein, 21 aa, Homo sapiens
MIYLSIYLLVNILAVSNSWPS

SEQ ID NO: 437 - protein, 55 aa, Homo sapiens
MVLAIFQNALSFTISALLFILSFYFGTAALWLFICQNCHFLSIQLLCPLFHESPN

SEQ ID NO: 438 - protein, 11 aa, Homo sapiens
MHQPLCIYCFS

SEQ ID NO: 439 - protein, 92 aa, Homo sapiens
  SITE (32): Xaa equals any amino acid
MHFLFGYYVFSLTSASPALWAAASTCSSDLDXPCWVLVHLLIWCFVCHQYLHCSWWDVSHHLLYLLPTRKIKRSYFFPLRSNFSLDSWYPQF

SEQ ID NO: 440 - protein, 54 aa, Homo sapiens
MTENPKVQMMLIIVVPLQLFINPVQHPIQQVRCIHLHLCHGWALDRLALELVCL

SEQ ID NO: 441 - protein, 10 aa, Homo sapiens
MTRCLWRTLQ

SEQ ID NO: 442 - protein, 38 aa, Homo sapiens
VLLILKLLLLKGARSIQIFMFRCLIAFALITKLQNYMD

SEQ ID NO: 443 - protein, 94 aa, Homo sapiens
MRTIYSAFFFLSLCLSVLLSSTVFDDWHPISISWVQNFGLTPSFDVQVPQTLRCFFRSGCRWHPLNLLQFKLSTFLRIISFYLSFCSEKRLQHE

SEQ ID NO: 444 - protein, 38 aa, Homo sapiens
MRTEVGAQRACAVRCVLALGAVVSLLVPPTPALSSIPS

SEQ ID NO: 445 - protein, 1167 aa, Homo sapiens
  SITE (429): Xaa equals any amino acid
  SITE (435): Xaa equals any amino acid
  SITE (437): Xaa equals any amino acid
  SITE (444): Xaa equals any amino acid
  SITE (447): Xaa equals any amino acid
  SITE (452): Xaa equals any amino acid
  SITE (588): Xaa equals any amino acid
  SITE (832): Xaa equals any amino acid
VELPFVTHLFLPLVFLTGLCSPFNLDEHHPRLFPGPPEAEFGYSVLQHVGGGQRWMLVGAPWDGPSGDRRGDVYRCPVGGAHNAPCAKGHLGDYQLGNSSHPAVNMHLGMSLLETDGDGGFMACAPLWSRACGSSVFSSGICARVDASFQPQGSLAPTAQRCPTYMDVVIVLDGSNSIYPWSEVQTFLRRLVGKLFIDPEQIQVGLVQYGESPVHEWSLGDFRTKEEVVRAAKNLSRREGRETKTAQAIMVACTEGFSQSHGGRPEAARLLVVVTDGESHDGEELPAALKACEAGRVTRYGIAVLGHYLRRQRDPSSFLREIRTIASDPDERFFFNVTDEAALTDIVDALGDRIFGLEGSHAENESSFGLEMSQIGFSTHRLKDGILFGMVGAYDWGGSVLWLEGGHRLFPPRMALEDEFPPALQNHAXYLGYSXSXMLLRGGXRLXLSGAXRFRHRGKVIAFQLKKDGAVRVAQSLQGEQIGSYFGSELCPLDTDRDGTTDVLLVAAPMFLGPQNKETGRVYVYLVGQQSLLTLQGTLQPEPPQDARFGFAMGALPDLNQDGFADVAVGAPLEDGHQGALYLYHGTXSGVRPHPAQRIAAASMPHALSYFGRSVDGRLDLDGDDLVDVAVGAQGAAILLSSRPIVHLTPSLEVTPQAISVVQRDCRRRGQEAVCLTAALCFQVTSRTPGRWDHQFYMRFTASLDEWTAGARAAFDGSGQRLSPRRLRLSVGNVTCEQLHFHVLDTSDYLRPVALTVTFALDNTTKPGPVLNEGSPTSIQKLVPFSKDCGPDNECVTDLVLQVNMDIRGSRKAPFVVRGGRRKVLVSTTLEXRKENAYNTSLSLIFSRNLHLASLTPQRESPIKVECAAPSAHARLCSVGHPVFQTGAKVTFLLEFEFSCSSLLSQVFVKLTASSDSLERNGTLQDNTAQTSAYIQYEPHLLFSSESTLHRYEVHPYGTLPVGPGPEFKTTLRVQNLGCYVVSGLIISALLPAVAHGGNYFLSLSQVITNNASCIVQNLTEPPGPPVHPEELQHTNRLNGSNTQCQVVRCHLGQLAKGTEVSVGLLRLVHNEFFRRAKFKSLTVVSTFELGTEEGSVLQLTEASRWSESLLEVVQTRPILISLWILIGSVLGGLLLLALLVFCLWKLGFFAHKKIPEEEKREEKLEQ

SEQ ID NO: 446 - protein, 23 aa, Homo sapiens
MSVLLLSSSCGAAFAVLCPPHCE

SEQ ID NO: 447 - protein, 97 aa, Homo sapiens
MEVVVTVTPKTCPLSSLLLFLLYFLVIGSVIHLTAGFRILVLGLVFLFFPYPPYPNCHQVLLHALMISHLSYPSSFQIGPSDFNLGHSHYLLYYGKI

SEQ ID NO: 448 - protein, 68 aa, Homo sapiens [sequence omitted]

SEQ ID NO: 449 - protein, 42 aa, Homo sapiens
  SITE (38): Xaa equals any amino acid
MLLFWAIFASYVSIQSMHFRCCGREIFGGAGTSKTGIXLKSQ

SEQ ID NO: 450 - protein, 17 aa, Homo sapiens
MTCFCQIKYRYHWGFLF

SEQ ID NO: 451 - protein, 42 aa, Homo sapiens [sequence omitted]

SEQ ID NO: 452 - protein, 19 aa, Homo sapiens
MYAFLQGFIFLLLFFFIAE

SEQ ID NO: 453 - protein, 124 aa, Homo sapiens [sequence omitted]

SEQ ID NO: 454 - protein, 2 aa, Homo sapiens
GA

SEQ ID NO: 455 - protein, 76 aa, Homo sapiens
LVPLLPGPLVRFCFCLHVGVGSSVGGGAPCPGCRPASCARAPFRVGLDHPSPHQGPHCEVITALNPPLLFYLLNLI

SEQ ID NO: 456 - protein, 203 aa, Homo sapiens
MGIKTALPAAELGLYSLVLSGALAYAGRGLLEASQDGAHRKAFRESVRPGWEYIGRKMDVADFEWVMWFTSFRNVIIFALSGHVLFAKLCTMVAPKLRSWMYAVYGALAVMGTMGPWYLLLLLGHCVGLYVASLLGQPWLCLGLGLASLASFKMDPLISWQSGFVTGTFDLQEVLFHGGSSFTCCVAPALHWRAVPTLTATTP

SEQ ID NO: 457 - protein, 136 aa, Homo sapiens
MAGWGLVDVSGAPEPWRIPHGIPLPALSGLCGVRRSPSSRFSFFPPQQRNWRKDIKLSAVDLSAEIFPESMVVLNYLHVSSIFNSGVGLFLISSQKCSALGEGTSPLACHFPGVLYHFDGTLWSAENALSWHASRL

SEQ ID NO: 458 - protein, 29 aa, Homo sapiens
MFSCFSLVVFILFSLGFFCNAFVQLILSC

SEQ ID NO: 459 - protein, 42 aa, Homo sapiens
VKVLWLILFILSCSLAGYWQTQSFCFHKELMKRTIGETHVCL

SEQ ID NO: 460 - protein, 34 aa, Homo sapiens
MISMCQMLRTTVMTHLWIVTWIQRSWQESGDIRV

SEQ ID NO: 461 - protein, 23 aa, Homo sapiens
MQSWLWAAVCSAGCPCFWGMKAL

SEQ ID NO: 462 - protein, 31 aa, Homo sapiens
MLSPFTLLLSYATIVHFCMPLIPFLLILTIK

SEQ ID NO: 463 - protein, 107 aa, Homo sapiens
MAQQDPGLPFLFWFSVASLITLFHLFLFKLSFGGLQFTENHLQFQADPDVLHNSYALHGIRYKNDHINLAVLADAEGKPYLHVSVESRGQPVKIYACKQAAWTSQWS

SEQ ID NO: 464 - protein, 8 aa, Homo sapiens
KSILGSHS

SEQ ID NO: 465 - protein, 77 aa, Homo sapiens
LLITILLGLYFTLLQASEYFESPFTISDGIYGSTFFVATGFHGLHVIIGSTFLTICFIRQLIFHFTSKHHFGFEAAA

SEQ ID NO: 466 - protein, 31 aa, Homo sapiens
MISMKMILVILVTLALPVAQLHLLLLVLKIQ

SEQ ID NO: 467 - protein, 4 aa, Homo sapiens
FPYS

SEQ ID NO: 468 - protein, 28 aa, Homo sapiens
MVFSCHLLFLIRCLYSCGHLSSTLQHII

SEQ ID NO: 469 - protein, 31 aa, Homo sapiens
MPLVYPVCLLLICFHLSFIEEDPFMILNTFH

SEQ ID NO: 470 - protein, 89 aa, Homo sapiens
  SITE (34): Xaa equals any amino acid
MVCTYFLPFCNVFLCLLFLWLCRSFFICCNLIFXSLLFLLVLLESYPKNHCPVQSQETFPYIFFSSFIILGLTCKSLIQFELIFVYGVR

SEQ ID NO: 471 - protein, 94 aa, Homo sapiens
MDIKNITCSMKITWYILVLLVFIFLIILTIRKILEGQRRVQKWQSHRDKPTSVLLRGSDSEKLRALNVQVLSAETTQRLPLDQVQEVLPPIPEL

SEQ ID NO: 472 - protein, 28 aa, Homo sapiens
MARNVWFFIVSFCYKFLSYFRASSTLKV

SEQ ID NO: 473 - protein, 9 aa, Homo sapiens
MPLPSSGQF

SEQ ID NO: 474 - protein, 68 aa, Homo sapiens
LASGPGATLRCLVWLWSLSLRALLPLSHAVWWVILCPEPPPWTGPVSRAGTPCLFSLFRHNSRSLASH

SEQ ID NO: 475 - protein, 29 aa, Homo sapiens
  SITE (27): Xaa equals any amino acid
MEGKLTTSKILIVGKVFWVSCTLFYIXFF

SEQ ID NO: 476 - protein, 48 aa, Homo sapiens
  SITE (2): Xaa equals any amino acid
MXLQGLPGTSGTGLGCLLCLVLFLSIAVTNKGMEEQSDKKKKKKKKNS

SEQ ID NO: 477 - protein, 16 aa, Homo sapiens
MALRLARMWLSSLASV

SEQ ID NO: 478 - protein, 1 aa, Homo sapiens
I

SEQ ID NO: 479 - protein, 35 aa, Homo sapiens
AHVVVVVLWWEFAAVQTLWPGKSKFLQDGFTASLD

SEQ ID NO: 480 - protein, 40 aa, Homo sapiens
MLFISNLPLPSQFIYLASDSFFSSPTPFSSTSQPTNTYSL

SEQ ID NO: 481 - protein, 254 aa, Homo sapiens
  SITE (222): Xaa equals any amino acid
MQGVILLLFAKYYHLPFLRDVQTDCTRTGLGGYWGNKGGVSVRLAAFGHMLCFLNCHLPAHMDKAEQRKDNFQTILSLQQFQGPGAQGILDHDLVFWFGDLNFRIESYDLHFVKFAIDSDQLHQLWEKDQLNMAKNTWPILKGFQEGPLNFAPTFKFDVGTNKYDTSAKKRKPAWTDRILWKVKAPGGGPSPSGRKSHRLQVTQHSYRSHMEYTVSDHKPVXAQFLLQFAFQGRHATGAAGGGQMSGCGPSRRW

SEQ ID NO: 482 - protein, 23 aa, Homo sapiens
VQTYVVLLHFALSCFADIVFFTN

SEQ ID NO: 483 - protein, 32 aa, Homo sapiens
YLLKISLFLGAVYVTLHSSGSCHVFMSEYFWF

SEQ ID NO: 484 - protein, 32 aa, Homo sapiens
KAIWFLILCTTHSILIITFIYKKNKENNSKLC

SEQ ID NO: 485 - protein, 55 aa, Homo sapiens
MWALKSLFLLTPSPVIRFYFAALWIRAAGRLLGGGGSPTPPTSLAPGFSEAGGLC

SEQ ID NO: 486 - protein, 23 aa, Homo sapiens
VGHFWVVIWLVRSMSDRMNKNAL

SEQ ID NO: 487 - protein, 43 aa, Homo sapiens
MGIFDYKLFSHYFKACFIFFLILLTHLCLSLFYYKLFIVQSLP

SEQ ID NO: 488 - protein, 13 aa, Homo sapiens
GNSLTLAILLLSF

SEQ ID NO: 489 - protein, 265 aa, Homo sapiens
MGGQVAGVYAAYYPSDVSSLCLVCPAGLQYSTDNQFVQRLKELQGSAAVEKIPLIPSTPEEMSEMLQLCSYVRFKVPQQILQGLVDVRIPHNNFYRKLFLEIVSEKSRYSLHQNMDKIKVPTQIIWGKQDAGAGCVWGRHVGQVNCQLPGGASGKLWALSSDGKTQEDSQAHNRLFSFCAQHRQQQEAGLRPRLQPAFCTQHLLPSPKSDAATTLRDPAPNAVGAPVTLRKPVPYPWYPRFPRALGTTRKPPRYFSQNRNSYGTK

SEQ ID NO: 490 - protein, 27 aa, Homo sapiens
MVVHILWSWCCRGLAGTAALPRVLFYF

SEQ ID NO: 491 - protein, 15 aa, Homo sapiens
MPLPSSPRNCFLKWI

SEQ ID NO: 492 - protein, 25 aa, Homo sapiens
MALCSLAVFCPSTILGCDLVQLGPE

SEQ ID NO: 493 - protein, 1 aa, Homo sapiens
I

SEQ ID NO: 494 - protein, 29 aa, Homo sapiens
GFLGILYLTIFILYQTHLQFLGLLVKTFF

SEQ ID NO: 495 - protein, 45 aa, Homo sapiens
  SITE (31): Xaa equals any amino acid
MHVLLFSFLIPFLLLSPVGVTCNSHMLERQXSWLKKRSTQASQHV

SEQ ID NO: 496 - protein, 1 aa, Homo sapiens
W

SEQ ID NO: 497 - protein, 145 aa, Homo sapiens
KSQVFSYPHRYLVLDLALLFLMGILEAVRLYLGTRGNLTEAERPLAASLALTAGTALLSAHFLLWQALVLWADWALSATLLALHGLEAVLQVVAIAAFTRGFGGEVRAKAGDETAGERAAEGHIRSLRPLQFYQLLPFCTELNKF

SEQ ID NO: 498 - protein, 211 aa, Homo sapiens
MTTLTRQDLNFGQVVADVLCEFLEVAVHLILYVREVYPVGIFQKRKKYNVPVQMSCHPELNQYIQDTLHCVKPLLEKNDVEKVVVVILDKEHRPVEKFVFEITQPPLLSISSDSLLSHVEQLLRAFILKISVCDAVLDHNPPGCTFTVLVHTREAATRNMEKIQVIKDFPWILADEQDVHMHDPRLIPLKTMTSDILKMQLYVEERAHKGS

SEQ ID NO: 499 - protein, 46 aa, Homo sapiens
MLQTCSVVLHFILCLCVCVFRLIQVVCYISCIIYKVTQNIKSSKLV

SEQ ID NO: 500 - protein, 122 aa, Homo sapiens [sequence omitted]

SEQ ID NO: 501 - protein, 29 aa, Homo sapiens
MLCVLVLFILYLPGFSKSNQDVPWGDILC

SEQ ID NO: 502 - protein, 60 aa, Homo sapiens [sequence omitted]

SEQ ID NO: 503 - protein, 49 aa, Homo sapiens
  SITE (40): Xaa equals any amino acid
  SITE (48): Xaa equals any amino acid
MKGHSSKLFCLVVWGFLCFLFLGCFFFNCLVQKKKEKKNXGGAPEPNXP

SEQ ID NO: 504 - protein, 5 aa, Homo sapiens
WASLT

SEQ ID NO: 505 - protein, 22 aa, Homo sapiens
MTCLSCLISFLASLSANWASTR

SEQ ID NO: 506 - protein, 26 aa, Homo sapiens
MKYCFRPWVLCDTTLGIGLFGFALCF

SEQ ID NO: 507 - protein, 12 aa, Homo sapiens
LLVLLQIMKGNL

SEQ ID NO: 508 - protein, 55 aa, Homo sapiens
MGGDQRSMGLACESPLAAWSLGITPALVLQMLLGFIGAGPSRAGPLTLPAWLHSP

SEQ ID NO: 509 - protein, 120 aa, Homo sapiens
MMCVVLTTLPCLTFSIAVTEVQKSINGSADVLPDMLPDLPVSLVLLSLIMVDIIEKLRIYPLRGSQKSKCSFKCEYFLKFDIFFTFLPLCYLTTCLMIPFLRANITDRRLQMKISKHNYF

SEQ ID NO: 510 - protein, 20 aa, Homo sapiens
MGTIKPWKSSAVVGGPGHQG

SEQ ID NO: 511 - protein, 52 aa, Homo sapiens
MRLSVRRVLLATGCALVLVLAVQLGQQVLECRAVLAGLRTPGGPCGLSRRSW

SEQ ID NO: 512 - protein, 7 aa, Homo sapiens
MQVFEFF

SEQ ID NO: 513 - protein, 60 aa, Homo sapiens
MRSVPAILQMLWILRRSTNWTLYLILHGCPAVVCAWPRQHAPWGMVRLWVPTAAPAALSP

SEQ ID NO: 514 - protein, 23 aa, Homo sapiens
MAFLPSPAWWISLLPSLLSIARS

SEQ ID NO: 515 - protein, 62 aa, Homo sapiens
MEQEPVRRYPLVPLVPLVVVAVWGFFPGGSESSSSELDSISLRSSLDTLPLETALQAIFTIK

SEQ ID NO: 516 - protein, 16 aa, Homo sapiens
LFVFFCFVLVFFFFLA

SEQ ID NO: 517 - protein, 12 aa, Homo sapiens
MLLLSIVLLLIL

SEQ ID NO: 518 - protein, 29 aa, Homo sapiens
MLMASALSRCAGAAVLVLLLWLAVDWALM

SEQ ID NO: 519 - protein, 41 aa, Homo sapiens
MKLFFCLCAGLILEFQKALWERKRLLNKVWNRAPHSDNMQS

SEQ ID NO: 520 - protein, 17 aa, Homo sapiens
MSSLLLIIILALSLAYE

SEQ ID NO: 521 - protein, 33 aa, Homo sapiens
MWMAKPTCYLALTGWSCWRTCWERSGWALYLQP

SEQ ID NO: 522 - protein, 20 aa, Homo sapiens
MAAMVFLLLSITTIWGAFKK

SEQ ID NO: 523 - protein, 29 aa, Homo sapiens
APLCHCPYFGFCKHPLRLVSSLGKQASTS

SEQ ID NO: 524 - protein, 52 aa, Homo sapiens
  SITE (18): Xaa equals any amino acid
MSLTTLWTLDKLLLCVCXLICKMKIISVSYRYSLNRDNYTYFKVVKYTITTR

SEQ ID NO: 525 - protein, 39 aa, Homo sapiens
MVMFLSLSLWINPVIGKDMTIWRWNTYRKDQISYLLFFH

SEQ ID NO: 526 - protein, 42 aa, Homo sapiens
MLLCPNLRNPLIWGLILLTHAISVSVASFYYIILVKSKLYHV

SEQ ID NO: 527 - protein, 41 aa, Homo sapiens
MPFPWSFRLLMLLSTAQSPQPQKRFPLHSTPLQSNFPLSKC

SEQ ID NO: 528 - protein, 62 aa, Homo sapiens
EAFCFLRSYFCYSCNAPPYMPHLCESTGIRFGHHTCLKLGSVCSVFCVEWRKKRLPCCLPCS

SEQ ID NO: 529 - protein, 46 aa, Homo sapiens
MALLWQINWTIAEAFLRGDITDSTALWSWAATSRTSLWSTVTSPAL

SEQ ID NO: 530 - protein, 33 aa, Homo sapiens
MRAGIVCILYIFICSVFAQCLVHSRVSMYECVG

SEQ ID NO: 531 - protein, 11 aa, Homo sapiens
MRWNLLLVKLL

SEQ ID NO: 532 - protein, 24 aa, Homo sapiens
MLFFPLVLLPCVFLSYSKRRRAQG

SEQ ID NO: 533 - protein, 187 aa, Homo sapiens [sequence omitted]

SEQ ID NO: 534 - protein, 9 aa, Homo sapiens
MASGSKISS

SEQ ID NO: 535 - protein, 69 aa, Homo sapiens
MVPTPPGWVGFFVFWVFLGGGLFHVTSISVFISYLFHFQVYHGKCTDFFVNNVLGFAKKEKKKTLLSLP

SEQ ID NO: 536 - protein, 36 aa, Homo sapiens
MFLLTIGKIEKALCFLFFCCCCHCCFFQKTSVSVLS

SEQ ID NO: 537 - protein, 41 aa, Homo sapiens
DFLFFFPPCGSHCFLSCLYLSLCLSSSFPQMSQLSLPNFPI

SEQ ID NO: 538 - protein, 29 aa, Homo sapiens
MRQQQTHLAAGVLFCCRLTFSSSVSGKSG

SEQ ID NO: 539 - protein, 42 aa, Homo sapiens
MMNVSLEIYFVVFLSLFCVVLPLHALFLKSFFFLDFACFQIL

SEQ ID NO: 540 - protein, 81 aa, Homo sapiens [sequence omitted]

SEQ ID NO: 541 - protein, 20 aa, Homo sapiens
MTTFLLLLLLVSIFSSVNCG

SEQ ID NO: 542 - protein, 17 aa, Homo sapiens
MRIASFCWEDRIFHSKF

SEQ ID NO: 543 - protein, 10 aa, Homo sapiens
MVVVTLMLFL

SEQ ID NO: 544 - protein, 51 aa, Homo sapiens
LEAPSMKTDTRTIFVAIFSCISILLLFLSVFIIYRCSQHGELRERKGREGE

SEQ ID NO: 545 - protein, 15 aa, Homo sapiens
LPCLAGCRVKFMIMK

SEQ ID NO: 546 - protein, 32 aa, Homo sapiens
MEKGAAKKNFWVQGTVYLLLLFMPVAGCPTTL

SEQ ID NO: 547 - protein, 50 aa, Homo sapiens
MSLSVAWWLSVCSAAGEGPTPGQCSAFRRPTGNQKFPNIMAPSPLQSSFP

SEQ ID NO: 548 - protein, 40 aa, Homo sapiens
MKNPITKRWKHLTGTLILVNSLDVLRAAAFSPADQDDFVI

SEQ ID NO: 549 - protein, 22 aa, Homo sapiens
MVPSLNLYLLVSWDTLLENFLM

SEQ ID NO: 550 - protein, 66 aa, Homo sapiens
FYLLVLVFLNSIFAELSLFLPCLSPVCLSFVVDIVLSSPKYLSLETYSKRILFSMSVFLLCCPPCL

SEQ ID NO: 551 - protein, 2 aa, Homo sapiens
DI

SEQ ID NO: 552 - protein, 15 aa, Homo sapiens
MFEDNKWWCILFLIR

SEQ ID NO: 553 - protein, 18 aa, Homo sapiens
MKTVSPKCLRITLSTSCP

SEQ ID NO: 554 - protein, 40 aa, Homo sapiens
MRCARHWKWLLLCFWGQLICRRLWRRSGRGKCFLCCLHRE

SEQ ID NO: 555 - protein, 27 aa, Homo sapiens
MNVIIVLVHALCPWCRGCPHWGPLVPP

SEQ ID NO: 556 - protein, 82 aa, Homo sapiens [sequence omitted]

SEQ ID NO: 557 - protein, 43 aa, Homo sapiens
MEIYVSLGIVGLAILALLAVTSIPSVSDSLTWREFHYIQVNNI

SEQ ID NO: 558 - protein, 42 aa, Homo sapiens
MLLVSCCLAGHICVWDAQTGDCLTRIPRPGRQRRGQWRGQRA

SEQ ID NO: 559 - protein, 55 aa, Homo sapiens
MSMSCPWLGTWAVVCASPRQRNDSQGTDARGGNRADQRLPGHKRNLEERTPAEQT

SEQ ID NO: 560 - protein, 14 aa, Homo sapiens
MAHWHVFYVFSCHS

SEQ ID NO: 561 - protein, 35 aa, Homo sapiens
  SITE (5): Xaa equals any amino acid
  SITE (6): Xaa equals any amino acid
  SITE (7): Xaa equals any amino acid
MFLLXXXSSLCPFSPSFSLSSLPFYLWCYHVLEQQ

SEQ ID NO: 562 - protein, 25 aa, Homo sapiens
MCRYLPLMLFMTMCRFLLGLFAVGW

SEQ ID NO: 563 - protein, 23 aa, Homo sapiens
MGLFLLFLLRVGVGCVICKYFCA

SEQ ID NO: 564 - protein, 30 aa, Homo sapiens
MAVGSCSPILSLLGPGILAPLSALPLISVP

SEQ ID NO: 565 - protein, 10 aa, Homo sapiens
MWQVAPVHLL

SEQ ID NO: 566 - protein, 5 aa, Homo sapiens
NNRYV

SEQ ID NO: 567 - protein, 36 aa, Homo sapiens
ERCVFWLFRPPAFPSLSLLPAPASLFRDTKISKLVQ

SEQ ID NO: 568 - protein, 26 aa, Homo sapiens
MFFLLLLMLLPHCLNYYILLTNLTFW

SEQ ID NO: 569 - protein, 19 aa, Homo sapiens
MLPPLLEWAVFVPLSQLLL

SEQ ID NO: 570 - protein, 39 aa, Homo sapiens
MFFLIKVPLNWPLYQPLVLAKCPKHALGPRHVTIHRLSV

SEQ ID NO: 571 - protein, 36 aa, Homo sapiens
MVLALAVFTLLASVCCQLHSHSFYPCMSCFYSSLSF

SEQ ID NO: 572 - protein, 64 aa, Homo sapiens
MWLLWQPYLAGFLLQVLEGRVAQSQAEADSGVLGAGGTTPAGGRRGLCQQSEQPRGPIPHILQV

SEQ ID NO: 573 - protein, 756 aa, Homo sapiens
MSALFLLVIGTAYLEAQGIWEPFRRRLSFEASNPPFDVGRPFDLRRIVGISSEGNLNTLSCDPGHSRGFCGAGGSSSRPSAGSHKQCGPSVHPHSSHSNRNSADVENVRAKNSSSTSSRTSAQAASSQSANKTSPLVLDSNTVTQGHTAGRKSKGAKQSQHGSQHHAHSPLEQHPQPPLPPPVPQPQEPQPERLSPAPLAHPSHPERASSARHSSEDSDITSLIEAMDKDFDHHDSPALEVFTEQPPSPLPKSKGKGKPLQRKVKPPKKQEEKEKKGKGKPQEDELKDSLADDDSSSTTTETSNPDTEPLLKEDTEKQKGKQAMPEKHESEMSQVKQKSKKLLNIKKEIPTDVKPSSLELPYTPPLESKQRRNLPSKIPLPTAMTSGSKSRNAQKTKGTSKLVDNRPPALAKFLPNSQELGNTSSSEGEKDSPPPEWDSVPVHKPGSSTDSLYKLSLQTLNADIFLKQRQTSPTPASPSPPAAPCPFVARGSYSSIVNSSSSSDPKIKQPNGSKHKLTKAASLPGKNGNPTFAAVTAGYDKSPGGNGFAKVSSNKTGFSSSLGISHAPVDSDGSDSSGLWSPVSNPSSPDFTPLNSFSAFGNSFNLTGEVFSKLGLSRSCNQASQRSWNEFNSGPSYLWESPATDPSPSWPASSGSPTHTATSVLGNTSGLWSTTPFSSSIWSSNLSSALPFTTPANTLASIGLMGTENSPAPHAPSTSSPADDLGQTYNPWRIWSPTIGRRSSDPWSNSHFPHEN

SEQ ID NO: 574 - protein, 41 aa, Homo sapiens
MLSGSSRGSQGSLNLHVCLWLPPQPPLHPSYSFSFFLQFWE

SEQ ID NO: 575 - protein, 223 aa, Homo sapiens
MWGLVSALAATLCFSLQNIFSKKVLRDSRIHHLRLLNILGCHAVFFMIPTWVLVDLSAFLVSSDLTYVYQWPWTLLLLAVSGFCNFAQNVIAFSILNLVSPLSYSVANATKRIMVITVSLIMLRNPVTSTNVLGMMTAILGVFLYNKTKYDANQQARKHLLPVTTADLSSKERHRSPLEKPHNGLLFPQHGDYQYGRNNILTDHFQYSRQSYPNSYSLNRYDV

SEQ ID NO: 576 - protein, 47 aa, Homo sapiens
MTLTAWTGACWPSFTWLMPRTSWRMLLLLFWTSSMIWLPRECGSFST

SEQ ID NO: 577 - protein, 24 aa, Homo sapiens
MGELLWLVILCAHIIVATHHCWEN

SEQ ID NO: 578 - protein, 8 aa, Homo sapiens
MFQRLLKY

SEQ ID NO: 579 - protein, 80 aa, Homo sapiens
ISSTDIWWNRSLDTGLRLLLSWPGAAGTTACVCADTVYYYQMVPSWKFRSPPTWISLLGPFSGSFNVDNDSGMWLYLLLY

SEQ ID NO: 580 - protein, 27 aa, Homo sapiens
GVSVIISLLISSSEDCYQSLGLEVQII

SEQ ID NO: 581 - protein, 38 aa, Homo sapiens
MRVVLPSWLGSSGCWDILSLLCFNIFTALFLNGPVTRD

SEQ ID NO: 582 - protein, 55 aa, Homo sapiens
MSACLPGSLFLLFPPAGRYQRRGHPSRPGMGRKEVTAKAVEWGWHQPLVCFPCGS

SEQ ID NO: 583 - protein, 24 aa, Homo sapiens
MSIWLMHFCLLVLGKRMSILDVKL

SEQ ID NO: 584 - protein, 32 aa, Homo sapiens
APRFPSLLVLLPGILFPGLSGHCFVSGFFTLL

SEQ ID NO: 585 - protein, 9 aa, Homo sapiens
LKILFLIEV

SEQ ID NO: 586 - protein, 27 aa, Homo sapiens
MTSSVACPGARVCLAGSWPAASSSPCW

SEQ ID NO: 587 - protein, 34 aa, Homo sapiens
FGYFWYRWPLGWIFLHSVPQLQEGVPLVCEYVCL

SEQ ID NO: 588 - protein, 18 aa, Homo sapiens
LATLLLRLLLSLGTGCQR

SEQ ID NO: 589 - protein, 43 aa, Homo sapiens
  SITE (28): Xaa equals any amino acid
  SITE (33): Xaa equals any amino acid
DQFSTAVRHRVPAGHWQVAGSTPTPCPXNPDLXPGKEREGPVS

SEQ ID NO: 590 - protein, 117 aa, Homo sapiens
CVETPRPGFCQKAPWYQPGKSATKPTTTREETIPSKFTSPNTNLPKLNRLQPLCPDPTLTAFPFTQIWAFWQKVLRLWGKRRAVMALRWVSYSPEEIGLFYALPYIRNYIQDAILRH

SEQ ID NO: 591 - protein, 281 aa, Homo sapiens
MAEALLLRATFYLLIGNANAAKPDLDKVISLKEANVKLRANALIKRGSMYMQQQQPLLSTQDFNMAADIDPQNADVYHHRGQLKILLDQVEEAVADFDECIRLRPESALAQAQKCFALYRQAYTGNNSSQIQAAMKGFEEVIKKFPRCAEGYALYAQALTDQQQFGKADEMYDKCIDLEPDNATTYVHKGLLQLQWKQDLDRGLELISKAIEIDNKCDFAYETMGTIEVQRGNMEKAIDMFNKAINLAKSEMEMAHLYSLCDAAHAQTEVAKKYGLKPPTL

SEQ ID NO: 592 - protein, 50 aa, Homo sapiens
MHLCLLWQLHYVVGDVDAEPHILSSCLCYSPLCFTFSNECQAGDFQIQKF

SEQ ID NO: 593 - protein, 50 aa, Homo sapiens
MVYIYYLYFLTFYYLLNPLHQTTTYGTSQGSSLGALFFKYSVLMKNKFNI

SEQ ID NO: 594 - protein, 36 aa, Homo sapiens
  SITE (35): Xaa equals any amino acid
MFDSTPVLVALFLHPRLGASYSLCLQHSSSPCLPXS

SEQ ID NO: 595 - protein, 4 aa, Homo sapiens
LDFC

SEQ ID NO: 596 - protein, 41 aa, Homo sapiens
MYNHLSLNCTLPLFICALFLVYSVIIPHLKNKNHYCYILLI

SEQ ID NO: 597 - protein, 348 aa, Homo sapiens
MNMTQARVLVAAVVGLVAVLLYASIHKIEEGHLAVYYRGGALLTSPSGPGYHIMLPFITTFRSVQTTLQTDEVKNVPCGTSGGVMIYIDRIEVVNMLAPYAVFDIVRNYTADYDKTLIFNKIHHELNQFCSAHTLQEVYIELFDQIDENLKQALQKDLNLMAPGLTIQAVRVTKPKIPEAIRRNFELMEAEKTKLLIAAQKQKVVEKEAETERKKAVIEAEKIAQVAKIRFQQKVMEKETEKRISEIEDAAFLAREKAKADAEYYAAHKYATSNKHKLTPEYLELKKYQAIASNSKIYFGSNIPNMFVDSSCALKYSDIRTGRESSLPSKEALEPSGENVIQNKESTG

SEQ ID NO: 598 - protein, 66 aa, Homo sapiens
  SITE (40): Xaa equals any amino acid
MCLLSLAYFILVLGYGASYGKGKGPFRKTSFGEIKMWTVXKKKKKKKKKKKKKKKKKKKKKKKKKK

SEQ ID NO: 599 - protein, 343 aa, Homo sapiens
  SITE (184): Xaa equals any amino acid
  SITE (198): Xaa equals any amino acid
  SITE (210): Xaa equals any amino acid
  SITE (300): Xaa equals any amino acid
  SITE (307): Xaa equals any amino acid
MYISPEEFKPIAEKLTGSTPAASYEEEELPPDPSEETLTIEARFQPLLPETMTKSKDGFLGVSRLALSGLRNWTAAASPSAVFATRHFQPFLPPPGQELGEPWWIIPSELSMFTGYLSNNRFYPPPPKGKEVIIHRLLSMFHPRPFVKTRFAPQGAVACLTAISDFYYTVMFRIHAEFQLSEPXDFPFWFSPAQFTGXIILSKDATHVRXFRLFVPNHRSLNVDMEWLYGASESSNMEVDIGYIPQMELEATGPSVPSVILDEDGSMIDSHLPSGEPLQFVFEEIKWAAGAELGGGCPAXGGGHVPXQEVSYLPFTEAFDRAKAENKLVHSILLWGALDDQSC

SEQ ID NO: 600 - protein, 34 aa, Homo sapiens
MFLSFLNILIILLQGIWEPYLVFACNVIRYNYTM

SEQ ID NO: 601 - protein, 127 aa, Homo sapiens
MVFCLAFGATLLLAGKIQFGYVYGISAIGCLGMFCLLNLMSMTGVSFGCVASVLGYCLLPMILLSSFAVIFSLQGMVGIILTAGIIGWCSFSASKIFISALAMEGQQLLVAYPCALLYGVFALISVF

SEQ ID NO: 602 - protein, 2 aa, Homo sapiens
PC

SEQ ID NO: 603 - protein, 72 aa, Homo sapiens [sequence omitted]

SEQ ID NO: 604 - protein, 17 aa, Homo sapiens
MCTSVLLAIFLLCFSVT

SEQ ID NO: 605 - protein, 49 aa, Homo sapiens
MWAGASRGRTGARLAVPLHAWCTLWPLALGQAILLQIPVLPQGHHQAPP

SEQ ID NO: 606 - protein, 28 aa, Homo sapiens [sequence omitted]

SEQ ID NO: 607 - protein, 12 aa, Homo sapiens
MVCLLVHSFLSF

SEQ ID NO: 608 - protein, 52 aa, Homo sapiens
MKWVLTCTTLEVVCLACDKHAADVMLAFIIIGYLPYPRMSSCPLSPLIIDRS

SEQ ID NO: 609 - protein, 30 aa, Homo sapiens
MAKFTSWFLVFFVLVAHSLHILPHPVCLGS

SEQ ID NO: 610 - protein, 32 aa, Homo sapiens
MFHVCCAFLNFMLHSKTVVLFLWCLDSCGVCF

SEQ ID NO: 611 - protein, 50 aa, Homo sapiens
MYPLDVDNNVPFLSLFLLLLLKLIVLPNLLLCFFPNTVIYLICRQEPCLC

SEQ ID NO: 612 - protein, 43 aa, Homo sapiens
MKAISVSLLRLTKLLWFFSIVLYVPLLAVLLFNTVLYFFSKCT

SEQ ID NO: 613 - protein, 35 aa, Homo sapiens
MAFLILHGVQMTTILLLVAQMTALSFGFGMYKQEN

SEQ ID NO: 614 - protein, 97 aa, Homo sapiens
MAQPPQNLKRFSSCRAFARLGYPPYFPCLPSSAARPSVPASAQPSVKGSPASNLHCTASPKTVTSWKAGAQLPLNKRVAKKEKKKKKKKKKKKKKGR

SEQ ID NO: 615 - protein, 12 aa, Homo sapiens
MIVIVFYLINLL

SEQ ID NO: 616 - protein, 43 aa, Homo sapiens
  SITE (14): Xaa equals any amino acid
MCNQVFLLLILILXDDHFYTLWQSLIASVSCLENEFIIYLLGN

SEQ ID NO: 617 - protein, 14 aa, Homo sapiens
MRKLAFGLRISYCS

SEQ ID NO: 618 - protein, 73 aa, Homo sapiens [sequence omitted]

SEQ ID NO: 619 - protein, 48 aa, Homo sapiens
MCPPHLMLICLMVMPRVQDLVTCAVVNTQRLGRSVSLVLPSFKVHGKI

SEQ ID NO: 620 - protein, 26 aa, Homo sapiens
MVFFSAILFLYILYLFADYSSIFDFP

SEQ ID NO: 621 - protein, 8 aa, Homo sapiens
MAKFTVLW

SEQ ID NO: 622 - protein, 33 aa, Homo sapiens
MLHGVVIVRLWLLLGRNSLKRNSLVWRGSRSPK

SEQ ID NO: 623 - protein, 31 aa, Homo sapiens
MYNLSSLFMISFLVCHVTPSQTLKGPPLSWS

SEQ ID NO: 624 - protein, 32 aa, Homo sapiens
TSCCIIIFLCAEQLKTQPQYANCFNAILRQLI

SEQ ID NO: 625 - protein, 30 aa, Homo sapiens
MKTWLPKRSLLLCTPTTCRPAASPTLTCRS

SEQ ID NO: 626 - protein, 10 aa, Homo sapiens
MLLYLTVGYW

SEQ ID NO: 627 - protein, 20 aa, Homo sapiens
MTRGTLPPTLLGLSFLSSQL

SEQ ID NO: 628 - protein, 27 aa, Homo sapiens
MTVPTLAMKKNQDAASWSLTCVSCLHY

SEQ ID NO: 629 - protein, 35 aa, Homo sapiens
MKFKSQCLEIKFYSHTACSFVYLLCMATFTLQWQS

SEQ ID NO: 630 - protein, 93 aa, Homo sapiens [sequence omitted]

SEQ ID NO: 631 - protein, 113 aa, Homo sapiens
MSPSPRWGFLCVLFTAVHPAPSTAPVQDKCPVNTWEAMQASSQQLLQTDPRPKPFLLPPLPPLLLISAGTEVSSLVFQKSPLHTQPEGAIKTAGQPTSVHSKVLSKGSLLLGE

SEQ ID NO: 632 - protein, 35 aa, Homo sapiens
HKKSFQGRALGDPLFKGIWAGFIVVSSEESGKGRP

SEQ ID NO: 633 - protein, 48 aa, Homo sapiens
MIGKKKGTLEEIVLMIVVLVSTQCLIMTMEVVLKNLVIMTEWIMKMTD

SEQ ID NO: 634 - protein, 30 aa, Homo sapiens
MAMGAASSGWSAPASSSWSTLWWSSFPRPR

SEQ ID NO: 635 - protein, 25 aa, Homo sapiens
MLISVMLHSLWLVIHLGPQHTVILF

SEQ ID NO: 636 - protein, 40 aa, Homo sapiens
MRRNMMNPLTFMLLGCACLRWLHLNILTRSAKMLRRSTVA

SEQ ID NO: 637 - protein, 34 aa, Homo sapiens
MFYWGGLSFYFLLSSGVGFYCFLFGFGMEIWIAA

SEQ ID NO: 638 - protein, 58 aa, Homo sapiens
  SITE (54): Xaa equals any amino acid
MYMPAPPLSLAPAVGETFPVCRERMWSWQAWLLPDSVSSGNTQPSFKKKKTRSXPSDR

SEQ ID NO: 639 - protein, 33 aa, Homo sapiens
MCVCMHVCVCCVWWEAAWGCQKRAEGGIRPSWT

SEQ ID NO: 640 - protein, 32 aa, Homo sapiens
MLIITPKLKKVGSQPQMEDWAPLLPSSASLLP

SEQ ID NO: 641 - protein, 629 aa, Homo sapiens
MCFIPLVCWIVCTGLKQQMESGKSLAQTSKTTTAVYVFFLSSLLQPRGGSQEHGLCAHLWGLCSLAADGIWNQKILFEESDLRNHGLQKADVSAFLRMNLFQKEVDCEKFYSFIHMTFQEFFAAMYYLLEEEKEGRTNVPGSRLKLPSRDVTVLLENYGKFEKGYLIFVVRFLFGLVNQERTSYLEKKLSCKISQQIRLELLKWIEVKAKAKKLQIQPSQLELFYCLYEMQEEDFVQRAMDYFPKIEINLSTRMDHMVSSFCIENCHRVESLSLGFLHNMPKEEEEEEKEGRHLDMVQCVLPSSSHAACSHGLVNSHLTSSFCRGLFSVLSTSQSLTELDLSDNSLGDPGMRVLCETLQHPGCNIRRLWLGRCGLSHECCFDISLVLSSNQKLVELDLSDNALGDFGIRLLCVGLKHLLCNLKKLWLVSCCLTSACCQDLASVLSTSHSLTRLYVGENALGDSGVAILCEKAKNPQCNLQKLGLVNSGLTSVCCSALSSVLSTNQNLTHLYLRGNTLGDKGIKLLCEGLLHPDCKLQVLELDNCNLTSHCCWDLSTLLTSSQSLRKLSLGNNDLGDLGVMMFCEVLKQQSCLLQNLGLSEMYFNYETKSALETLQEEKPELTVVFEPSW

SEQ ID NO: 642 - protein, 114 aa, Homo sapiens
DRERNMATCAQLLRLVLEAEHIAPAAWHWPWDMGGRGRRVPAYVGRWAGAQTQQAPWGHSSPLHPFILKHLQRASSARLSGAKGTEMRTDSPLGETVFAWSCPQCKAQEWCRGA

SEQ ID NO: 643 - protein, 46 aa, Homo sapiens
EVIGLLLLLLLLCNNNRQKQRRGESADAWPLPWGFPSAEESVAAQL

SEQ ID NO: 644 - protein, 243 aa, Homo sapiens
  SITE (146): Xaa equals any amino acid
MLVIQITSVDFHGIPLSVPQSLTRRQCTCRGWKEDEPMSRLCINQGERKSRWKEVGRWRKQQLLLALDDGPEGLSLLVTPLWVLFPYLSVTRFLILIPCCEFGSLCWAIQSSSERAKLVLELRCRWGKRGTQLDTKKGSLPSLSPXTVRGILSRQPPNSPSHLPSFVETAFDSPSLSLPFRVSCLVSGLREFLSLLPRTLKELLLKTGEYQAYLYMCNSARIQRKSSFQPLPLGRWFRVPHRD

SEQ ID NO: 645 - protein, 17 aa, Homo sapiens
LLLLLFMLSLGKPLGRT

SEQ ID NO: 646 - protein, 22 aa, Homo sapiens
GSLLSQILHMACDHPRGLTVGA

SEQ ID NO: 647 - protein, 52 aa, Homo sapiens
GATGMWRCRGYWAPGQNAIWWLALKMVLCCSCLGLGEFMRPSMSSLSGAVPL

SEQ ID NO: 648 - protein, 32 aa, Homo sapiens
MAPAPCSASPRPAGGRDGGGAPELSFLLSVLV

SEQ ID NO: 649 - protein, 68 aa, Homo sapiens
MLLLFLLNLLPVPQALPALSWPWVFVIAIPLLGSTVLPDLCKAGSLFSFSFALMPLPQSCHCATPVKA

SEQ ID NO: 650 - protein, 12 aa, Homo sapiens
MILALIKMMTFA

SEQ ID NO: 651 - protein, 9 aa, Homo sapiens
VFYCYGLII

SEQ ID NO: 652 - protein, 8 aa, Homo sapiens
HRAVILAL

SEQ ID NO: 653 - protein, 73 aa, Homo sapiens
  SITE (52): Xaa equals any amino acid
MALSNSVAPKPSPPWPLLGCFLHSPSHFLVCCILHTFIMFTVALLCSDGHPXRPGVLPGPLLYLECRILGSSD

SEQ ID NO: 654 - protein, 45 aa, Homo sapiens
MAAAKALISLWLVSACGQWETSFPIYGGDMECQAVVFWWLEEERK

SEQ ID NO: 655 - protein, 74 aa, Homo sapiens
MLLPQILAWLTPLCSGFCQAVTFSMRPTWATIFNTAVYTASPPTTQHSQALTLLPLFFPFRQPSSNTWDHILIY

SEQ ID NO: 656 - protein, 34 aa, Homo sapiens
MQCPYLLGAQLLVSSICPVVPALPRPVNKCLVPD

SEQ ID NO: 657 - protein, 25 aa, Homo sapiens
MSMLFLFCVHVSLLIFLICSPMLYL

SEQ ID NO: 658 - protein, 17 aa, Homo sapiens
IVILCMCAFSLWVIVRI

SEQ ID NO: 659 - protein, 21 aa, Homo sapiens
MLAALACSWRLLSLGAHSGRA

SEQ ID NO: 660 - protein, 64 aa, Homo sapiens
MSSFGKCLFILVLGLFFNWVFVFFFAIDFLKFLDSNLLSDMWFTNIFSYSVDCLFILSIISFAL

SEQ ID NO: 661 - protein, 59 aa, Homo sapiens
MPGPHQLCLINAGQPCSLVTSVGHWLLGVFSILPCSLLAPGEKGPYRSLFQVTRSWGGP

SEQ ID NO: 662 - protein, 41 aa, Homo sapiens
MTTSSLAVGCFGWLRLLLHFLDPGNYSHQDDMDQSTVFKHD

SEQ ID NO: 663 - protein, 38 aa, Homo sapiens
MGVLPGLFPFPPSLATVLGVWQLFGFFFFLQLCVCVFV

SEQ ID NO: 664 - protein, 43 aa, Homo sapiens [sequence omitted]

SEQ ID NO: 665 - protein, 27 aa, Homo sapiens
SFYVLFSNLQWYVFNIFATYTLGKKKM

SEQ ID NO: 666 - protein, 10 aa, Homo sapiens
NTMIAAGSCD

SEQ ID NO: 667 - protein, 71 aa, Homo sapiens
WTPSRPRHPWGRWTLATWWPHWTRGLPVTSPLPAITTPSSSHLGRLPLWGPRIRLCLVPCCWSWPRPSTGS

SEQ ID NO: 668 - protein, 152 aa, Homo sapiens
MEFLGPCGLRLVESRLLVPYWLLVLLAALNALLQWLLRPLFLYAPLLNPYTLAVASTTFTVSTDKAHATSATYPCSLGRTAGPAPSAGCRPWRAQPGDVELGPGARCVARPSIQVQGPLALGAEGLVLHQLACLAAPRASKPRAASLHPHAS

SEQ ID NO: 669 - protein, 51 aa, Homo sapiens
MCWYVISRPLWLNRLCMSSRLFVLPQPSVLITLRPAASVGFLPVGEHISRL

SEQ ID NO: 670 - protein, 20 aa, Homo sapiens
MLFVLLIWKLYMIYIKTFCF

SEQ ID NO: 671 - protein, 21 aa, Homo sapiens
MKPKFPAFAGFPIYFFVDFAS

SEQ ID NO: 672 - protein, 39 aa, Homo sapiens
LFWSVSETGIAFGVSRVLGMLEGHLQEAWGRREISCDAL

SEQ ID NO: 673 - protein, 198 aa, Homo sapiens
MFFAPTVLGLARLRHWVYLLCFSAGNYYNQGETRKKELLQSCDVLGIPLSSVMIIDNRDFPDDPGMQWDTEHVARVLLQHIEVNGINLVVTFDAGGVSGHSNHIALYAAVRALHSEGKLPKGCSVLTLQSVNVLRKYISLLDLPLSLLHTQDVLFVLNSKEVAQAKKAMSCHRSQLLWFRRLYIIFSRYMRINSLSFL

SEQ ID NO: 674 - protein, 24 aa, Homo sapiens
MILISVIPSFFPVISAVQTTYEQC

SEQ ID NO: 675 - protein, 83 aa, Homo sapiens
MCVFVYELMLLSLVFLPHWSLPSLPYFSFALHSNTVKPDIYFLCGSNSLIFPVDKRYVFYSFISLIVNRKQLENWNTFSLCGC

SEQ ID NO: 676 - protein, 28 aa, Homo sapiens
MPVWKCLLWCTPLLRCTQLLLQLQSRCC

SEQ ID NO: 677 - protein, 33 aa, Homo sapiens
MCSFHINFCLLSSTFILLTGLCFSVYASNIWVC

SEQ ID NO: 678 - protein, 88 aa, Homo sapiens
SLKIFSVSGVLQGWPLAPEPLPQCSHQPPPHPSVCRASSTGPHAAFFTHSALGRFVIWLSLHWAEVCVHRVGVPSSPFHSEGHTQRCQ

SEQ ID NO: 679 - protein, 65 aa, Homo sapiens
MSGAPTAGAALMLCAATAVLLSAQGGPVQSKSPRFASWDEMNVLAHGLLQLGQGLREHAEAPAVS

SEQ ID NO: 680 - protein, 11 aa, Homo sapiens
ERSSLMSCAFF

SEQ ID NO: 681 - protein, 72 aa, Homo sapiens
METPQLQVQGQLLHLLLCLYHHKVVQQKLLLLILLKLLKVTTLYPMEQILGSFHQLERSFIGIILSHRLLRP

SEQ ID NO: 682 - protein, 20 aa, Homo sapiens
MSGVKLQLFGTRLSLPLSSY

SEQ ID NO: 683 - protein, 26 aa, Homo sapiens
  SITE (3): Xaa equals any amino acid
MAXGSFLFFCLVHINVATSFLDLGLS

SEQ ID NO: 684 - protein, 25 aa, Homo sapiens
MTCHIQFVFVPTVRGLNFIILAFCS

SEQ ID NO: 685 - protein, 30 aa, Homo sapiens
MNSYMCACVFSSEIHLGGGFFCFFNSVPDL

SEQ ID NO: 686 - protein, 45 aa, Homo sapiens
MCCWIRFASILLRIFTPMFIRDIGLKFCFFVVSLPSFVIRMMLAS

SEQ ID NO: 687 - protein, 19 aa, Homo sapiens
MSLLLESCVEPLSFLLLLQ

SEQ ID NO: 688 - protein, 37 aa, Homo sapiens
LISLAFLLPGILGKTNGFSRHPLSTNAFLKQTGTFLL

SEQ ID NO: 689 - protein, 17 aa, Homo sapiens
SVWGSFLSMLMLLLSVC

SEQ ID NO: 690 - protein, 19 aa, Homo sapiens
QRPWILTTDLSVFFLCLFP

SEQ ID NO: 691 - protein, 38 aa, Homo sapiens
MPCGHLRIRAGIAGGSGAAQSLLFPYLESLWECDFDRA

SEQ ID NO: 692 - protein, 47 aa, Homo sapiens
MNVLCGYGLPIGRWFWGLRIILKLSLTDSPVFYKLTTNLSKDHLGRH

SEQ ID NO: 693 - protein, 35 aa, Homo sapiens
HSCGPDTCVCPSPVSPCLPVPLAALMVTPKGSNPC

SEQ ID NO: 694 - protein, 34 aa, Homo sapiens
MWPLIGYLTKSLLNFILCVIIAMCLCVLSSSDTY

SEQ ID NO: 695 - protein, 39 aa, Homo sapiens
MIVQESPFLTMDLLESCFPYVLLRNAYHAVYKQSVTSSA

SEQ ID NO: 696 - protein, 108 aa, Homo sapiens
ITYQDVGCPGVLPDSSLLVPIPNVLLSFFAFHNIKETTTLLPNSILCLLFHIKWELCLLRSAPPINYMCPRIIQARDTRWENISKKKSPLKASNLSEKVFYHTLTPYI

SEQ ID NO: 697 - protein, 187 aa, Homo sapiens
NGVVHDVVLVLILGACIVVHAVTVTSLGNLFGGAGQTQQSWVEVLDVAGHGFNVVPLGVHSDEDRLHWRQTRLCFQLPHHLHQLLQLVWADVRAVSEAKVHQHPLAPEVSLAASPASVIQQVEVALAHSCLAQGFCSLLLLQPLLLSPQGQPGPTESSPEQACDQQPGSKPRALGLALPTCLCRALP

SEQ ID NO: 698 - protein, 71 aa, Homo sapiens
GRLIWGALWPVPDCGCTAPEGQDQPPSLVCCHGCRPGSHAEVWQGCSRGQDYAGFSVGSGAGAPSLEEPRS

SEQ ID NO: 699 - protein, 80 aa, Homo sapiens
MGRMAILACSLPTTWSSLSEAEGTSCPSPLRHGFLIAGRGGLGVDIQHSSRNRTPSEDEASGLPPAWQTQPVTPNAAMAW

SEQ ID NO: 700 - protein, 33 aa, Homo sapiens
MPVVSVHRPVTVSTCVPSPGHPVKRAHFLQSGI

SEQ ID NO: 701 - protein, 6 aa, Homo sapiens
MNTYLR

SEQ ID NO: 702 - protein, 13 aa, Homo sapiens
MKLFCVLIVVVVT

SEQ ID NO: 703 - protein, 26 aa, Homo sapiens
MSQACFPISVKLFETLLCLCFVCACV

SEQ ID NO: 704 - protein, 25 aa, Homo sapiens
PGHLWGQSCASLPPCALSSELPEFL

SEQ ID NO: 705 - protein, 44 aa, Homo sapiens
ICVANYRLWCKVCLIFLPLTPANCCILDSLFQYCIKTLVLCWTE

SEQ ID NO: 706 - protein, 253 aa, Homo sapiens
MNCFLSPLLTLLAKNGAFFAGSILAVLIALTIYDEDVLAVEHVLTTVTLLGVTVTVCRSFIPDQHMVFCPEQLLRVILAHIHYMPDHWQGNAHRSQTRDEFAQLFQYKAVFILEELLSPIVTPLILIFCLRPRALEIIDFFRNFTVEVVGVGDTCSFAQMDVRQHGHPQRLSAGQTEASVYQQAEDGKTELSLMHFAITNPGWQPPRESTAFLGFSRSRFSGMEQLLASPKGVCSLKMPSLRLSSPYNLSLSP

SEQ ID NO: 707 - protein, 65 aa, Homo sapiens
MAPSTATRHWHAHCFASCRSTGMQRLCGPGIPKNSLPVTSWWTWGASTTLGDTDMTITRGLSQRP

SEQ ID NO: 708 - protein, 63 aa, Homo sapiens
MQIHMIPVTYELKIRCLLLFVSFSRKMSQQPIRKLYQSTLDYKLTETINNKATQYEYNTPKGT

SEQ ID NO: 709 - protein, 31 aa, Homo sapiens
MCCSCCGRYPWVLGKHMCSLLWLQIPAYLKS

SEQ ID NO: 710 - protein, 46 aa, Homo sapiens
GIIQSVLFCAWFVLVNIASGSFISVQGWRTPAYKPNLVLCLFSYGL

SEQ ID NO: 711 - protein, 9 aa, Homo sapiens
AGAGLPPGS

SEQ ID NO: 712 - protein, 10 aa, Homo sapiens
MPLHSSLGGH

SEQ ID NO: 713 - protein, 10 aa, Homo sapiens
GLVAAVRFIS

SEQ ID NO: 714 - protein, 33 aa, Homo sapiens
MHLAFHIVFILQAIACFSCSLPVLAAGVDRLLS

SEQ ID NO: 715 - protein, 26 aa, Homo sapiens
IFLHLLSCSLLFAWTNGEKSAQNEIM

SEQ ID NO: 716 - protein, 63 aa, Homo sapiens [sequence omitted]

SEQ ID NO: 717 - protein, 37 aa, Homo sapiens
MLCQRSVGYKYLALFLGCLFCSIGLCTCCYTSPMLFW

SEQ ID NO: 718 - protein, 14 aa, Homo sapiens
MRGVEFCLVFWPCW

SEQ ID NO: 719 - protein, 36 aa, Homo sapiens
  SITE (31): Xaa equals any amino acid
  SITE (33): Xaa equals any amino acid
MSSLLLIIILALSLAYKKKKKKLEGGPGTHXPXGGV

SEQ ID NO: 720 - protein, 10 aa, Homo sapiens
WHPVCSWCLH

SEQ ID NO: 721 - protein, 13 aa, Homo sapiens
  SITE (12): Xaa equals any amino acid
MWLVHRRLMSLXL

SEQ ID NO: 722 - protein, 91 aa, Homo sapiens
MVTFSTALTILIMNLHYCGPSVRPVPAWARALLLGHLARGLCVRERGEPCGQSRPPELSPSPQSPEGGAGPPAGPCHEPRCLCRQKPYCTT

SEQ ID NO: 723 - protein, 27 aa, Homo sapiens
PAPHLPRLTLPCQVVWGPRCWGGESGS

SEQ ID NO: 724 - protein, 70 aa, Homo sapiens
MCDVLWGLFILLVHRRGTLPQESRHLSSSSSSSSATEEPPYLGQVSHCLPVMFTTHERTRRFDVSIKLNE

SEQ ID NO: 725 - protein, 4 aa, Homo sapiens
DKLM

SEQ ID NO: 726 - protein, 42 aa, Homo sapiens
LPGSRSRCFIFPLFSHYIVISPTLSLVLFFSWKTRKPLSPKC

SEQ ID NO: 727 - protein, 11 aa, Homo sapiens
MCLPLMPSWPR

SEQ ID NO: 728 - protein, 265 aa, Homo sapiens
MATLLRPVLRRLCGLPGLQRPAAEMPLRARSDGAGPLYSHHLPTSPLQKALLAAGSAAMALYNPYRHDMVAVLGETTGHRTLKVLRDQMRRDPEGAQILQERPRISTSTLDLGKLQSLPEGSLGREYLRFLDVNRVSPDTRAPTRFVDDEELAYVIQRYREVHDMLHTLLGMPTNILGEIVVKWFEAVQTGLPMCILGAFFGPIRLGAQSLQVLVSELIPWAVQNGRRAPCVLNLYYERRWEQSLRALREELGITAPPMHVQGLA

SEQ ID NO: 729 - protein, 21 aa, Homo sapiens
EKQLYLESYCLGFLIRHSSPD

SEQ ID NO: 730 - protein, 21 aa, Homo sapiens
  SITE (14): Xaa equals any amino acid
MAGRVGYLRYCLFXISALLIF

SEQ ID NO: 731 - protein, 62 aa, Homo sapiens
MCNLPENLFCFWSTSGVASGPRAFATVLPPAPTSSVCLQSLIYRSPRCLLYSLCAWPFCYLA

SEQ ID NO: 732 - protein, 60 aa, Homo sapiens
ELWWFWLLWTVLILFSCCCAFRHRRAKLRLQQQQRQRRNQLVGLSWGMPWGWSFPYRFTA

SEQ ID NO: 733 - protein, 125 aa, Homo sapiens
GRGPVLGPMVYAICYCPLPRLADLEALKVADSKTLLESERERLFAKMEDTDFVGWALDVLSPNLISTSMLGRVKYNLNSLSHDTATGLIQYALDQGVNVTQVFVDTVGCQRHTRRGCSKVFPGLR

SEQ ID NO: 734 - protein, 38 aa, Homo sapiens
MLPNFSWLLLLCHTAHRSCPPPPYTPRPHPPVRQFKSC

SEQ ID NO: 735 - protein, 6 aa, Homo sapiens
MISVHL

SEQ ID NO: 736 - protein, 14 aa, Homo sapiens
HSSISRSSLSCPYS

SEQ ID NO: 737 - protein, 33 aa, Homo sapiens
MFWTNLVQYVFCLSFFILLLSQQVENLALLGSM

SEQ ID NO: 738 - protein, 27 aa, Homo sapiens
  SITE (2): Xaa equals any amino acid
  SITE (6): Xaa equals any amino acid
  SITE (18): Xaa equals any amino acid
  SITE (20): Xaa equals any amino acid
MXLVHXIIVLIFLPGMTXKXERRKKMC

SEQ ID NO: 739 - protein, 4 aa, Homo sapiens
FVCI

SEQ ID NO: 740 - protein, 50 aa, Homo sapiens
ENSFKKNMSLGSCVVLLPGCKLSPPRASHYHQTSSGPGCEALFLVFRMDL

SEQ ID NO: 741 - protein, 31 aa, Homo sapiens
MAPLRRLTVWRVGLRLGPAGAAGGPGEASSV

SEQ ID NO: 742 - protein, 20 aa, Homo sapiens
MGATARPGPTRGRWDSCLRQ

SEQ ID NO: 743 - protein, 22 aa, Homo sapiens
MPFYIHLWHQMLLIIIVMWWIC

SEQ ID NO: 744 - protein, 56 aa, Homo sapiens
MRSIWKPTRCWPLCTLLRSTSSQHWQKPVSTFWRQVWKPRTPASCCPRAGCLRSPS

SEQ ID NO: 745 - protein, 23 aa, Homo sapiens
MLKQLLMIAVGVKLQWKLWLQNR

SEQ ID NO: 746 - protein, 45 aa, Homo sapiens
AAAFVGWLSGLLGFSFMVARWHYSNSSIMFVFKTEGKGDGLYQSL

SEQ ID NO: 747 - protein, 36 aa, Homo sapiens
MAWRWWAKGGPSRLLLWKTTQCLKEVREAPLKTQHT

SEQ ID NO: 748 - protein, 323 aa, Homo sapiens
  SITE (217): Xaa equals any amino acid
  SITE (226): Xaa equals any amino acid
  SITE (229): Xaa equals any amino acid
MELSKAFSGQRTLLSAILSMLSLSFSTTSLLSNYWFVGTQKVPKPLCEKGLAAKCFDMPVSLDGDTNTSTQEVVQYNWETGDDRFSFRSFRSGMWLSCEETVEEPGERCRSFIELTPPAKRENPMVIPGNADHLHRTSIHQLPPATNRLATHWEPCLWAQTERLCCCFLCPVRSPGDVAHMMYSQVFQATVNLGPEDWRPHVWNYGWAFYMACSPSXAAWRRLSPXSTXTPGWCWSSSASIVKSFKENPNCLPHHHQCFPRRLSSAAPTVGPLTSYHQYHNQPIHSVSEGVDFYSELRNKGFQRGASQELKEAVRSSVEEEQC

SEQ ID NO: 749 - protein, 37 aa, Homo sapiens
VLSCWTWMTWCGWLCPTPSASTHTSRNCTAALCRKDW

SEQ ID NO: 750 - protein, 7 aa, Homo sapiens
FVKLRHP

SEQ ID NO: 751 - protein, 88 aa, Homo sapiens
  SITE (28): Xaa equals any amino acid
  SITE (67): Xaa equals any amino acid
  SITE (73): Xaa equals any amino acid
  SITE (74): Xaa equals any amino acid
AWLSHLMEHHSSHGGRKRYACQGCWKTXHFSLALAEHQKTHEKEKSYALGGARGPQPSTRESQAGAXAGGPPXXVEGEAPPAPPEAQR

SEQ ID NO: 752 - protein, 34 aa, Homo sapiens
MAAMRHLLRLFSGCGDLGFLTLYIFFLYSKQNNF

SEQ ID NO: 753 - protein, 38 aa, Homo sapiens
MLRLAGPPFYWPVLLALLPFASSGFQVSLKVGGCLSSL

SEQ ID NO: 754 - protein, 12 aa, Homo sapiens
MTSVQQFCIYSE

SEQ ID NO: 755 - protein, 20 aa, Homo sapiens
MPQASTHIKAPPPPSPEPGN

SEQ ID NO: 756 - protein, 129 aa, Homo sapiens
MFHLQPLMFLGLFPLFAVFEGLHLSTSEKIFRFQDTGLLLRVLGSLFLGGILAFGLGFSEFLLVSRTSSLTLSIAGIFKEVCTLLLAAHLLGDQISLLNWLGFASASREYPSTLPSKPCIPEVMVAPRP

SEQ ID NO: 757 - protein, 75 aa, Homo sapiens
WVSLCTLASVLLGAGAVSHARACEGTTGVNESPMMTWGEVENTPLRVEGSETPYVDRTPGPAFKILEPGRRNGWV

SEQ ID NO: 758 - protein, 13 aa, Homo sapiens
QKAALRLPFPVLL

SEQ ID NO: 759 - protein, 8 aa, Homo sapiens
MSLLLFLF

SEQ ID NO: 760 - protein, 36 aa, Homo sapiens
MTSGEPWACAGCSFPATAAASDFASVLPGVEGSVCC

SEQ ID NO: 761 - protein, 69 aa, Homo sapiens
MSHFRPARCLPGPCQTLLTFPLLVCAGLRRPPRPHSTQPGSSCSPRHPSFPSLSWVMLLPPCVTFEAVK

SEQ ID NO: 762 - protein, 207 aa, Homo sapiens
MGRKLSSPTTPRDMLLSPTLRPRRRCLESSVDDAGCPDLGKEPLVFQNRQFAHLMEEPLGSDPFSWKLPSLDYERKTKVDFDDFLPAIRKPQTPTSLAGSAKGGQDGSQRSSIHFETEEANRSFLSGIKTILKKSPEPKEDPAHLSDSSSSSGSIVSFKSADSIKSRPGIPRLAGDGGERTSPERREPGTGRKDDDVASIMKKYLQK

SEQ ID NO: 763 - protein, 23 aa, Homo sapiens
MFQAPALAFLSGLQLSFVACSIY

SEQ ID NO: 764 - protein, 38 aa, Homo sapiens
MLSPSQTPGSCLKWAPSWVTRCTFWTLVVASLAQKGPK

SEQ ID NO: 765 - protein, 30 aa, Homo sapiens
FCLFVCLFCMAHVFTIPGALPSFVWIQFSI

SEQ ID NO: 766 - protein, 21 aa, Homo sapiens
MWLSAFFLARLADSVLEESII

SEQ ID NO: 767 - protein, 27 aa, Homo sapiens
MASWICVFCTSPSGCSATCLVCYPAFP

SEQ ID NO: 768 - protein, 34 aa, Homo sapiens
MLFFFSIALSSFFFLNLFLCLCNSRVIGIVLTIS

SEQ ID NO: 769 - protein, 71 aa, Homo sapiens
ERCLSLLFAAIIKIPIHGVNYNEEKFISWSSGGWGVPKSRCWHLVRSFLLSTPWWRVEGQKEREGWRPIGG

SEQ ID NO: 770 - protein, 32 aa, Homo sapiens
MSVFRVIQILLFPFSLRYSLGDLMYLNLTTIY

SEQ ID NO: 771 - protein, 118 aa, Homo sapiens
MDLAGLLKSQFLCHLVFCYVFIASGLIINTIQLFTLLLWPINKQLFRKINCRLSYCISSRLQGPGQERAGLCPNYRLDVVLHRDGLLFAQVGAGSQDGCHQFAAPPGLPREVFFPDSL

SEQ ID NO: 772 - protein, 42 aa, Homo sapiens
EWVKGIVIWQFYLLFYACLSSACLFSPSANIPFMPWAFSTVL

SEQ ID NO: 773 - protein, 63 aa, Homo sapiens
  SITE (45): Xaa equals any amino acid
  SITE (49): Xaa equals any amino acid
YITSCRLTTSFFCCFRNLLSIIRLQDSASSCLDSISKSPSSCPSXMSVXTPQYIKKSISESGL

SEQ ID NO: 774 - protein, 33 aa, Homo sapiens
LPRLQSALLLLPLPPTLQGHVRAPIYPPPACRS

SEQ ID NO: 775 - protein, 18 aa, Homo sapiens
MPHPCLPVSTHLEGRWGC

SEQ ID NO: 776 - protein, 28 aa, Homo sapiens
MKKRLSPLSWARCCLCFWLQWGRRTNRL

SEQ ID NO: 777 - protein, 12 aa, Homo sapiens
AGGLGLHARCWR

SEQ ID NO: 778 - protein, 22 aa, Homo sapiens
ILIFMVFPFVLVFASLTSVISI

SEQ ID NO: 779 - protein, 18 aa, Homo sapiens
MVAWTSTWSRAWQSTLRM

SEQ ID NO: 780 - protein, 151 aa, Homo sapiens
  SITE (4): Xaa equals any amino acid
  SITE (9): Xaa equals any amino acid
  SITE (14): Xaa equals any amino acid
  SITE (17): Xaa equals any amino acid
  SITE (36): Xaa equals any amino acid
  SITE (69): Xaa equals any amino acid
  SITE (71): Xaa equals any amino acid
  SITE (87): Xaa equals any amino acid
  SITE (92): Xaa equals any amino acid
  SITE (95): Xaa equals any amino acid
  SITE (108): Xaa equals any amino acid
  SITE (119): Xaa equals any amino acid
  SITE (150): Xaa equals any amino acid
MRVXAPRTXLLLLXGAXALTETWAGSHSMRYFYTAXSRPGRGEPRFIAVGYVDDTQFVRFDSDARVRGXSXGRLRRQGLHRPERGPXLLDRXGHXGSDHPAQVGGGPXGGAAESLPGGXVRGVAPQIPGEREGDAAARGPPKDTRDPPPXL

SEQ ID NO: 781 - protein, 66 aa, Homo sapiens
ETVGCGFSLSFFFNFLCWVFEQPHVPFPGSLLIYLLELKWMGSRALCVSMLCFLTRLHSEALMPFG

SEQ ID NO: 782 - protein, 29 aa, Homo sapiens
MATLSLRAGLGFCFLLGLTEYFVGFHLIP

SEQ ID NO: 783 - protein, 16 aa, Homo sapiens
MTCCLLRSGVPVCLSL

SEQ ID NO: 784 - protein, 78 aa, Homo sapiens
MSPHQPMQVSSSKTILWLVLSCLCPSSPHPVISGLPQWYIGVLAGIVPVAPIRPGDSGLDLQREGPQPILSQGLNRRT

SEQ ID NO: 785 - protein, 13 aa, Homo sapiens
MWCPAFGRVFCSR

SEQ ID NO: 786 - protein, 37 aa, Homo sapiens
MGLRRHFPALWVLWWPWCPSWRQTRTPSAPSMQMATR

SEQ ID NO: 787 - protein, 26 aa, Homo sapiens
CGTAYCLFTPSPGMPQASAFHCSSLF

SEQ ID NO: 788 - protein, 39 aa, Homo sapiens
ALRGPAFNWLLCCSSTIFCRAQIALLPLSPASTPSPTTR

SEQ ID NO: 789 - protein, 33 aa, Homo sapiens
MLLGTYFKVYLIFKCFYIFLYKSRKMHFHLQKS

SEQ ID NO: 790 - protein, 32 aa, Homo sapiens
  SITE (9): Xaa equals any amino acid
MGLVERLLXCFTHGLWQFAQTAPIRTPLAAFA

SEQ ID NO: 791 - protein, 196 aa, Homo sapiens
MWFMYLLSWLSLFIQVAFITLAVAAGLYYLAELIEEYTVATSRIIKYMIWFSTAVLIGLYVFERFPTSMIGVGLFTNLVYFGLLQTFPFIMLTSPNFILSCGLVVVNHYLAFQFFAEEYYPFSEVLAYFTFCLWIIPFAFFVSLSAGENVLPSTMQPGDDVVSNYFTKGKRGKRLGILVVFSFIKEAILPSRQKIY

SEQ ID NO: 792 - protein, 47 aa, Homo sapiens
MRQRQSHYCSVLFLSVNYLGGTFPVYQKSRNLQRDKIQETFAQKRIK

SEQ ID NO: 793 - protein, 46 aa, Homo sapiens
GRRRAQLLWHIIFLQLYFWARWQREGSVMPPHRHSIRRRVDSFWML

SEQ ID NO: 794 - protein, 22 aa, Homo sapiens
MLLAVILQLIPPVTKAFVYELT

SEQ ID NO: 795 - protein, 5 aa, Homo sapiens
MPCLF

SEQ ID NO: 796 - protein, 29 aa, Homo sapiens
MGKKHHVGRTAWVFALVVVCILGPLLCSS

SEQ ID NO: 797 - protein, 43 aa, Homo sapiens
MVPLLRLCSSFVLLLFCYVTAKKKKKKEKKSANCVHAFLPAGM

SEQ ID NO: 798 - protein, 51 aa, Homo sapiens
  SITE (43): Xaa equals any amino acid
MRAFIWTCGTWTLWSLSDRSLGSSRICMGFAGSLKRPGRTKAXTTFWGTWF

SEQ ID NO: 799 - protein, 90 aa, Homo sapiens
MNIKCFVMCGGLYLASILVTWREHGSPHFLDEHTNVLRKCMIGSKLQNHLPSRIIPIICTASPGANGFIQRGSTELWVIRRQYPRVRVFP

SEQ ID NO: 800 - protein, 50 aa, Homo sapiens
MYIFELSLYLEGTSFVVVLLFLLISVSLDSPPTTKGWGLCLTYLGALIVQ

SEQ ID NO: 801 - protein, 3 aa, Homo sapiens
VER

SEQ ID NO: 802 - protein, 35 aa, Homo sapiens
MFPCCWAHLQRGGKVLCLLVLLVLSLPTEHHVANK

SEQ ID NO: 803 - protein, 32 aa, Homo sapiens
MGSWLWTVANLLHIPPNLYRMLAGRWQRAHWD

SEQ ID NO: 804 - protein, 24 aa, Homo sapiens
MASELARLLHAFGLMGPRKAGESS

SEQ ID NO: 805 - protein, 66 aa, Homo sapiens
  SITE (31): Xaa equals any amino acid
MQLEALNLLHTLVWARSLCRAGAVQTQERLXGSASPEQVPAGECCALQEYEAAVGAAQERADPGAG

SEQ ID NO: 806 - protein, 22 aa, Homo sapiens
MVIFIILLTCFGFSNGSFSFSL

SEQ ID NO: 807 - protein, 327 aa, Homo sapiens
MLATSQALDTVWRMAKGFVMLAVSFLVAAICYFRRLHLYSGHKLKWWIGYLQRKFKRNLSVEAEVDLLSYCAREWKGETPRNKLMRKAYEELFWRHHIKCVRQVRRDNYDALRSVLFQIFSQGISFPSWMKEKDIVKLPEKLLFSQGCNWIQQYSFGPEKYTGSNVFGKLRKYVELLKTQWTEFNGIRDYHKRGSMCNTLFSDAILEYKLYEALKFIMLYQVTEVYEQMKTKKVIPSLFRLLFSRETSSDPLSFMMNHLNSVGDTCGLEQIDMFILGYSLEVKIKVFRLFKFNSRDFEVCYPEEPLRDWPEISLLTENDRHYHIPVF

SEQ ID NO: 808 - protein, 7 aa, Homo sapiens
MFECYCL

SEQ ID NO: 809 - protein, 57 aa, Homo sapiens
MNSQVLYFTVLVCLMEISRWSHKNILCSVPSKRTIYFSSLIVPQSHIWWWSAKSHLV

SEQ ID NO: 810 - protein, 9 aa, Homo sapiens
ALWLLLQLS

SEQ ID NO: 811 - protein, 16 aa, Homo sapiens
FLISLCILIPFLILSP

SEQ ID NO: 812 - protein, 58 aa, Homo sapiens
MGFPLWITRPFSLAALNVFFIPFNLGESDDYVSWGCSSREVSLWWSLSFLNLNVGLSC

SEQ ID NO: 813 - protein, 75 aa, Homo sapiens [sequence omitted]

SEQ ID NO: 814 - protein, 32 aa, Homo sapiens
MALLILLFCILKYKQLDIAEDGSGGQGQISQM

SEQ ID NO: 815 - protein, 69 aa, Homo sapiens
MKLLLCFWVNRCACQLACVLSKFHKLKVFKGCVVSELYVSFLSLYLQRVRNEIYTSKVSLINMAFCFSM

SEQ ID NO: 816 - protein, 124 aa, Homo sapiens
  SITE (102): Xaa equals any amino acid
ELLILNFCKCFLLQSMVFAKTCGSWRSQACLVGTSMRSVLNPRVKSGRFVKILPDYEHMAYRDVYTCLLHRYRHILGLWQPDIGPYGGLLNVVVDGLFIIGXMRRAPPICTVHSTSIAFLFYFF

SEQ ID NO: 817 - protein, 35 aa, Homo sapiens
MTTRRSPTDILLLLSESSWTMRRLKAYLKVSLIPK

SEQ ID NO: 818 - protein, 47 aa, Homo sapiens
MIFPKICPISPNLVSVLSLVFFWTLLGSRRVCYQFSRLGEVRSGEQL

SEQ ID NO: 819 - protein, 124 aa, Homo sapiens [sequence omitted]

SEQ ID NO: 820 - protein, 571 aa, Homo sapiens
  SITE (189): Xaa equals any amino acid
  SITE (531): Xaa equals any amino acid
  SITE (535): Xaa equals any amino acid
  SITE (538): Xaa equals any amino acid
  SITE (545): Xaa equals any amino acid
  SITE (554): Xaa equals any amino acid
  SITE (560): Xaa equals any amino acid
  SITE (561): Xaa equals any amino acid
  SITE (564): Xaa equals any amino acid
  SITE (566): Xaa equals any amino acid
  SITE (567): Xaa equals any amino acid
  SITE (569): Xaa equals any amino acid
  SITE (571): Xaa equals any amino acid
MSALFLLVIGTAYLEAQGIWEPFRRRLSFEASNPPFDVGRPFDLRRIVGISSEGNLNTLSCDPGHSRGFCGAGGSSSRPSAGSHKQCGPSVHPHSSHSNRNSADVENVRAKNSSSTSSRTSAQAASSQSANKTSPLVLDSNTVTQGHTAGRKSKGAKQSQHGSQHHAHSPLEQHPQPPLPPPVPQPQEXQPERLSPAPLAHPSHPERASSARHSSEDSDITSLIEAMDKDFDHHDSPALEVFTEQPPSPLPKSKGKGKPLQRKVKPPKKQEEKEKKGKGKPQEDELKDSLADDDSSSTTTETSNPDTEPLLKEDTEKQKGKQAMPEKHESEMSQVKQKSKKLLNIKKEIPTDVKPSSLELPYTPPLESKQRRNLPSKIPLPTAMTSGSKSRNAQKTKGTSKLVDNRPPALAKFLPNSQELGNTSSSEGEKDSPPPEWDSVPVHKPGSSTDSLYKLSLQTLNADIFLKQRQTSPTPASPSPPAAPCPFVARGSYSSIVNSSSSSDPKIKQPNGSKHKLTKAASLPGKNGNPXFAAXTAXLRQEPRXGMALLKVSXKQNRFXXAAXGXXTXSX

SEQ ID NO: 821 - protein, 348 aa, Homo sapiens
  SITE (34): Xaa equals any amino acid
  SITE (37): Xaa equals any amino acid
MNMTQARVLVAAVVGLVAVLLYASIHKIEEGHLXVYXRGGALLTSPSGPGYHIMLPFITTFRSVQTTLQTDEVKNVPCGTSGGVMIYIDRIEVVNMLAPYAVFDIVRNYTADYDKTLIFNKIHHELNQFCSAHTLQEVYIELFDQIDENLKQALQKDLNLMAPGLTIQAVRVTKPKIPEAIRRNFELMEAEKTKLLIAAQKQKVVEKEAETERKKAVIEAEKIAQVAKIRFQQKVMEKETEKRISEIEDAAFLAREKAKADAEYYAAHKYATSNKHKLTPEYLELKKYQAIASNSKIYFGSNIPNMFVDSSCALKYSDIRTGRESSLPSKEALEPSGENVIQNKESTG

SEQ ID NO: 822 - protein, 132 aa, Homo sapiens
MLVIQITSVDFHGIPLSVPQSLTRRQCTCRGWKEDEPMSRLCINQGERKSRWKEVGRWRKQQLLLALDDGPEGLSLLVTPLWVLFPYLSVTRFLILIPCCEFGSLCWAIQSSSERAKLVLELRCRWGKRGLS

SEQ ID NO: 823 - protein, 9 aa, Homo sapiens
MPLWAHLAS

SEQ ID NO: 824 - protein, 22 aa, Homo sapiens
MVIFIILLTCFGFSNGSFSFSL

SEQ ID NO: 825 - protein, 327 aa, Homo sapiens; identical to SEQ ID NO: 807

SEQ ID NO: 826 - protein, 7 aa, Homo sapiens
MFECYCL

SEQ ID NO: 827 - protein, 57 aa, Homo sapiens; identical to SEQ ID NO: 809

SEQ ID NO: 828 - protein, 9 aa, Homo sapiens
ALWLLLQLS

SEQ ID NO: 829 - protein, 9 aa, Homo sapiens
ALWLLLQLS

SEQ ID NO: 830 - protein, 16 aa, Homo sapiens
FLISLCILIPFLILSP

SEQ ID NO: 831 - protein, 58 aa, Homo sapiens; identical to SEQ ID NO: 812

SEQ ID NO: 832 - protein, 75 aa, Homo sapiens [sequence omitted]

SEQ ID NO: 833 - protein, 75 aa, Homo sapiens [sequence omitted]

SEQ ID NO: 834 - protein, 75 aa, Homo sapiens [sequence omitted]

SEQ ID NO: 835 - protein, 75 aa, Homo sapiens [sequence omitted]

SEQ ID NO: 836 - protein, 75 aa, Homo sapiens [sequence omitted]

SEQ ID NO: 837 - protein, 32 aa, Homo sapiens; identical to SEQ ID NO: 814

SEQ ID NO: 838 - protein, 69 aa, Homo sapiens; identical to SEQ ID NO: 815

SEQ ID NO: 839 - protein, 123 aa, Homo sapiens
ELLILNFCKCFLLQSMVFAKTCGSWRSQACLVGTSMRSVLNPRVKSGRFVKILPDYEHMAYRDVYTCLLHRYRHILGLWQPDIGPYGGLLNVVVDGLFIIVMRRAPPICTVHSTSIAFLFYFF

SEQ ID NO: 840 - protein, 35 aa, Homo sapiens; identical to SEQ ID NO: 817

SEQ ID NO: 841 - protein, 450 aa, Homo sapiens
MVPLVAVVSGPRAQLFACLLRLGTQQVGPLQLHTGASHAARNHYEVLVLGGGSGGITMAARMKRKVGAENVAIVEPSERHFYQPIWTLVGAGAKQLSSSGRPTASVIPSGVEWIKARVTELNPDKNCIHTDDDEKISYRYLIIALGIQLDYEKIKGLPEGFAHPKIGSNYSVKTVEKTWKALQDFKEGNAIFTFPNTPVKCAGAPQKIMYLSEAYFRKTGKRSKANIIFNTSLGAIFGVKKYADALQEIIQERNLTVNYKKNLIEVRADKQEAVFENLDKPGETQVISYEMLHVTPPMSPPDVLKTSPVADAAGWVDVDKETLQHRRYPNVFGIGDCTNLPTSKTAAAVAAQSGILDRTISVIMKNQTPTKKYDGYTSCPLVTGYNRVILAEFDYKAEPLETFPFDQSKERLSMYLMKADLMPFLYWNMMLRGYWGGPAFLRKLFHLGMS

SEQ ID NO: 842 - protein, 35 aa, Homo sapiens; identical to SEQ ID NO: 817

SEQ ID NO: 843 - protein, 450 aa, Homo sapiens; identical to SEQ ID NO: 841

SEQ ID NO: 844 - protein, 47 aa, Homo sapiens; identical to SEQ ID NO: 818

SEQ ID NO: 845 - DNA, 131 bp, Homo sapiens
ggaggctgaggcaggagaatggcgtgaacccaggaggcggagcttgcagtgagctgagattgcgccactgcactccagcctgggcaacagagcgagactccgtctgaaaaaaaaaaaaacaaaaactggtg

SEQ ID NO: 846 - DNA, 162 bp, Homo sapiens
agctacttgggaggctgaggcaggagaatggcgtgaacccgggaggcggagcttgcagtgagccgagatcccgccactgcactccagcctgggcgacagagcgagactccgtctcaaaaaaaaaaaaaaaaaaaaaaaaaaaaaaaaaaaaaaaagaacaaa

SEQ ID NO: 847 - DNA, 100 bp, Homo sapiens
ctgaggcaggagaatggcgtgaacccgagaggcggagcttgcagtgagccgagatcgcgccactgcactccagcctgggcgacagagcgagactcccctt

SEQ ID NO: 848 - DNA, 140 bp, Homo sapiens
ggctgaggcaggagaatggcgtgaacccgggaggcggagcttgcagtgagtcgagatcgcgccactgcactccagcctgggcgacagagcgaaactccgtctcaaaaaaaaaaaaaaaaaaaaaaaaaaagaggggaaaa

SEQ ID NO: 849 - DNA, 114 bp, Homo sapiens
gaggcaggagaatggcgtgaaccctggaggcagagcttgcagtgagccgagatcgcgccactgcactccagcctgggcgacagagcaagattccgtctcaaaaaaaaaaaaacg

SEQ ID NO: 850 - DNA, 61 bp, Homo sapiens
atgccactgcactccagcctgggcgacagagtgagactccatctcaaaaaaaaaaaaaaaa

SEQ ID NO: 851 - DNA, 136 bp, Homo sapiens
ggcaggagaatggcgtgaacccgggaggcggagcttgcagtgagccgagattgtgccactgcactccagcctgggcgacagagtgagactccgtctcaaaaaaaaaaaaaaaaaaaaaaaaaaaaaaaaaaaaaaa

SEQ ID NO: 852 - DNA, 123 bp, Homo sapiens
aggcaggagaatggcgtgaacccgggaggcggagcttgcagtgagccgagatcccgccactgcactccagcctgggcgacagagcgagctccgtctcaaaaaaaaaaaaaaaaaatgctgtta

SEQ ID NO: 853 - DNA, 45 bp, Homo sapiens
ccagcctgggggacagagcgagactccgtctcaaaaaaaaaaaaa

SEQ ID NO: 854 - DNA, 368 bp, Homo sapiens
ggcatgggcaaggacttcatgtctaaaacgccaaaagcaatggcaacaaaagacaaaattgacaaatgggatctaattaaactaaagagcttctgcacagcaaaagagtctaccatcagagtgaacaggcaacctatacaatgggagaaaaattttgcaatctactcatctgacaaagggctaatatccagaatctacagtgaactcaaacaaatttacaagaaaaaaacaaacaaccccatcaaaaagtgggcaaagtatatgaacagacacttctcaaaagaagacatttatgcagctaaaagacacatgaaaaaatgcccatcatcactggccatcagagaaatgcaaatcaaaaccacaatgag

SEQ ID NO: 855 - DNA, 2925 bp, Homo sapiens
ctcccgagtagctgggactacaggcgcccgccaccacgcctggctaattttttgtatttttagtagagacggggtttcaccgcgttagccaggatggtcttgatctcctgacctcgtgatccgcccgtctcggcctcccaaagtcctgggattacaggcgtgagccaccgcgcccggctgagatgggtattattaagaaattaagatgtggattaccagggtaagtcatatttcaatgtgcaacctctgcaagtccacagggtgtgatatggacattaaggagatctatggacgaatagcgtatgataccttgacaagttgacaaaatgtaaaatagttgaatggccatagaaaaaaaccagctttttagccccataggccgagggattcaggagggctggctacgggcattttggaatggaagatgttgtaccaacaaatcaagcttaggttcctggcaatttgcccacatataatatgtgaaagttcagatgtgaaataaatctgcggctaatagtaagaacctagccacaggagttaaaacttacggttctgggaccagatggactgccttctaatcttagtcttactacattttagcggtaaaaccttcagcaagttatttagcctccagcatctcagttttctcatctgtaaaatggtgataatgctactcttacattgggttgtagtaggataaaaggagaaaacgtatgtaaaggatttagtagaaacttattaaaattaagcaattattatttctcaattctaagattctaacctgcaaaaggcataaggcagctgctgagaacagggtgagaagatagggattcggtcaggaaaagtcttgtttccctgttgctgttggtggttttgtttgctcatttgtgtgttttttttattaatcattttcacttgtgtttattgacaagcttaatcaataatgccattgacatttagtaaaagtaaatttccttaagtgatctcccaggtagcaatgtttattcattatgtgtggagtagagataggaattattttattgctgcaaatattttattattggtttttcaagttttaaaagtaattttaattttttaatttttgtgagtatatagtaagtgcacatatttatggggtacatgagatattttgatacaggcatatgatgtgtaataatcacatcagggtaaacagggtaagcatcacctcaagcatttgtccttttttgtattacaaagaatctaattatactcttttagttatttttaaatgtacaataaattattgttgactatagttttgccactgcaaacaatagaaggcttcctgatacagcctcctagtcattggagttctatggcagaattcctaaagtttttaagtttcatgagatggctaaattttggtaaatatgatactttctttgaacagatgctacagaggccaatataaaggagtgtaacagagtgacacctgtgatcagtatctctccaactacaaagagtgtcccttaaatttcttctgtgtggttcctctttttttttttttttttttttgagacgaagtctcgctctgtcgcccaggctggagtgcagtggcgcgaacttggctcgctgcaagctccgcctcccgggttcactccattctcctgcctcaccctctcaagtagctgggactacaggtgcctgccaccactcccggctaatttttttttgcatttttagtgagagatggggtttcactgtgttagccaggatggtctccatctcctgacctcatgatccagccgccttggcctcccaaagtgctcggattacaggcgtgagccaccgcgctcggcctgtgtggctcctcttaagtaatactctgcttcgtccatataagcagaggtcagaactggctaagaatttctttatgtgtgtttatcctgatgttttcctactgtcacttttcttttcttatggattagcattgagggaatggtcagatggtgcctgcgtgagtctgattgaaacattttagcggcggggtgcgggggttgatggcatgtgcaatagtttaggatatttgagttagtggcagaatgtagacatgagggtgagtagagagtgcgtagcagagcaagcaattcaggaatctatgttggttaattacttttgttttgtggacattttattctacctgaaaagattatctaggaactacagaaattaatgacgtgtagtggaaactttgcacagtgtaagtgttatccatttacttctcttagtttccaatacaatgactctcctggtagctgtcatacatgataaatataatttcgttaataaaattatattttatataattgcgtactttaaacaagtgatcaatataactcagttataaatgtacagtaacaaagatcaatggataataaatacttctgcgttcattttcatggatacattctatttttgtttgtctcacaagcagtaatcagactatgaatcatgatatagctccataaacacttactttatagcaattcactgatatatgctccaccaaaaaaaattaagagacggatacaagcaatttaaagcttctgtgtgtgtgtgcatgcaaccgatgtgtatggcttttttttttttttttttttttgacacagagtgtcgctctgtcgcccaggctggagtgcagtggcgtgatctccgctcactgcaagctccgcctgcctggttcacgccattctcctgccttagcctcccaagtagctgggacttcaggcgcctgacaccacgcctggctaattttttgtatttttagtagagacggggtttcaccgtgttatccaggatggtctccatctcctgacctcgtgatccacctgcctccgcctcccaaagtgctgggattacaggcttgagcctcctcgcccggcc

SEQ ID NO: 856 - DNA, 102 bp, Homo sapiens
ttttttttttttttttttttgagacggagtctcgctctgtcgcccaggctggagtgcagtggcacgatctcggctcactgcaagctctgcctcccgggttca

SEQ ID NO: 857 - DNA, 22001 bp, Homo sapiens
ggaagtgcaaagaggcgggcgtgccagtccctggacagctacgacgccatgaatatcttgcccaagaagagctggcacgtccggaacaaggacaatgtcgcccgcgtgcggcgtgacgaggcccaggcccgggaggaggagaaggagcgtgagcggagggtgctgctggctcagcaagaggtaagctcggaagccggcagggcggcgctccggggcccagcgcgcaggcgccgcggttgggggccggaagcggaggcgttgcgcaggctcaatgtgccccgtgtgaaattcgggaccaggcgccgatcccactttcgaggacgttgccccgcaaaccttgtgcccacttccacgaaaccttccttgatctcgccctcgtcttagtttttcccccactgatgtatttcacatggctggaacagtgtctagcacaaaagagaagcttaacatttaatgaatccgtgaacccttggacagttcaaggaaattcggatcactttttagtttgcctgcacagcctatttattgagcatctactgtatgctaactacatgccgtgcacctgacttgcggaatccccaataagcactgttcgttcttagaggggcactgtcatctctgttgcacgaagtgagatggcttcagtgaggggaaggcacattttaaggagaggcggacagccaggctccacgccatcgggcgagccctttcgtgcaccgccccctagacacatacacacaaacacgggctttccgtatggctctttaaatctgtttggtgtacacccaactttcatttccttagctagtctgatcctccgccgtgggtgggaggtagtctaggtttttagaatctcagtaggctgctgagcgctgtttgaaatccgcgtcctgaaggcaggggacagggcttcagcagacttggggtagtcacttggagccatggctagaattcagatcgtctggcctaatgcatacctttatggctgttttaattgtctcacttgaggttaggaacccctttggtttaggccagggacctcctcccatacatccttgatgacccgtggtttactatttgaaagggagtttacaaaacccaggcgttgcctcatctgcctaccctcacccccagctaggacaggtgcctcttttaggcgcctagtgctccctttctcataaccccagcaccctggactgccattttctgtggtgggcaccagactcacagttcttgaattacctctaggttctgaatgtcctgcctataactttctccccaggcccgtacagaattcctacggaagaaagccagacatcagaactcactgcctgagcttgaagcagcagaggcgggagccccaggttctggccctgtggacctgtttcgggagctgctggaggaagggaaaggagtgatcagaggcaataaagagtacgaggaagaaaagcgacaggagaaagtaagctggcctcacccacttcatcagaggggccatgaatcgagttggagggagggggcactttagccattggttgtgaccaaggtcaaacaagagtgaacacacagaatttaggaccataccaaggcatgacactcaaaaagcgttggctattgccgtctgggcgcccacaggggttggaggtagatgctagaggtccccagctgctgggcaaaccgctcagttctccaaactggaggagtctcaaacctgatgggcttttaaaaatttaaatcagccggctgtggctcacgcctgtaatcccaccaccttgggaggctgaggcgggtggatcacctgaggtcaggagttcaagaccagcctggtcaacatggtatctctaaaaatacaaaaaaaattagccgggcatggtggtgcgcgcctgtaatcccagggaagctgaagcaggagaatcgcttgacccaggaggtggaagctgcagtaagccgagattgcgccactgcactccagcctgggtgacagagcgagaccccatctcaaaacaatcaaacaaaaagtgaatcaatcgcctcttgctttttggctaagatcaagtgtaaaaggtacatcagtggctgtgcatggtggctcacgcctgtaatcccagcactttgggaggccaacgtgggtggatcacctgaggtcagaagttcaagaccagcctggccaaacatggcaaaaccccgtctctactaaaaatacaaaaattagctgggcatggtggtgtgtgcctgtaatcccagctactcggggggctgaggtaggaggattgcttgaacctgggaagcagaggttgcagtgagccgagatcgtgccactgcactcgagtctgggcaacagagcgagactccatctcaaaaaaaagaggtacatcagctcttgtcatttatctgctgtctctggacttgctgaccccacccatcgctcctctgctttgcttgatcccttcaggcttctcttcaagtctctctgcaaagatgcctgcctctgaacactcaagtggctccacttgtcccctccttcccctgctgttactgtacctgctactgtccccccagggggagctttgcctctgtttgtcttccatccccagcacctggtccaactggttcataacaagccttagatacctgttcgcttagatacctgtgtcagggagacacacctgacaccttgaaagattatatcacatctcttgtatttcctggccccctcaggagaggcaagagaaagctctgggcatcctgacatacctgggccagagtgcagcggaggcacagactcaacccccttggtaccagctacccccagggcgagggggccccccgcccggcccagccccagatgagaagatcaagagccgtctggaccctctgcgggagatgcagaagcatctggggaagaagagacagcacggcggtgatgaaggcagtcgcagcagaaaggaaaaggaggggtctgagaagcagcgacccaaggagtaagaagaccccacctcggcagaccagggcccagaccttcagggcttggcagcagcccagcatgggcactgcagcgtctctggtcaggacagccagggactccgtgaagggctggctaggtggagaagtggttctcagcatgtggtccagggagccctaggggtcctgacaccctttcccggggtgctgtggtgtcaagcctattttcctgacactggtggacttttccactcgtgttctcaggcatgtagtgcaggtttccagaggctgtgtgatggggagacaccctcactctgatggccaatggcagatgcttgtgtccaaactttcttagttttcactaatgatttgcagcatattaagagaacccatttaaacaaaagctcttggggtccttggtttttaagagtataaaggggtcctgagaccaaagagtttgagagctgctgggttagagagtaaaagcaggcttctgtctccaggatgctgcacccctggtctagagggggtacactgcctgtagtcttctttcctctagaaagggaaactgagggccagggggctgctaagtgtgctttcttgacctggagaagcatcagattttaaagactggggaggaccaaagcccacagaagggaaggccagagacgtgcccatggcgtcccagcaccaagtggctgcttccagcaggcctaaggagctgaggctggggtgtgctggatgcagcggggcttccaggcggcagctccctctatgggagaggttgggggaatggcctcctaggggctaccagctttctgacctcactcctctccccacaggcctccatccctggaccagcttcgagctgaacgtctgcggagggaagcagctgagaggtctcgggcagaggccctgctggcccgggtccaaggccgggcactacaggagggtcagccggaagaagacgagacggatgaccggcggcggcggtacaactcccaattcaacccccagctggcccggcgcccccgccagcaggaccctcaccttactcactgactcctgagggggtacaggagaggccgctgctgccagccgtcatataaaactatttattcataaatattttccaaaatgaaaataggtttaccaaaaaatgtccctcactggggaggggaggagggggcagccctcgcccccgggcccccagggtggggctgagaggaaaacctcccggccccctccctgcttcctgggagagggggatgccccgtggcttggggcctccctccagtcttccagggcagggccctcacctgggcagggggatcagcatgcgggggaagggggtgggtagagggaggggccggtgtcactggaggtcccggtcctccaggtagcggtactcaaaggtgaagccttccttcttccgctggccccacttctcgtagtcaaagtagatgtaggtgccctggccgggggagaaggcggtcagtgagtggacgaggaggtggtctgggatctgggccggaccaacagacaaaggggacaattcttagggctgtggatgtgtcaggcaccgggccagctgccctgcacgcacacactctcatccatcctcacaaggttcttcttgggtaggaaatgttatcatgccacttcagcgaggaggaaacggagggggccgcagaggttccaccgaagccagctgccagaacggggccccagccccaggtgtgagtgcacagccttcgtttcctcgagggctgtggcttttgagcacctctcacgtgagtacaggatgcacagcctagcatttaatcttcacaaagacctcgaggcagtgggtactgtcacccttgttctagagaatggaacagtctcagagtctaaatccaagcactctgcagggacattttattggtgacggaagtggtgtgggaatttctgaatgactggatgccctgaaatgtactaacttggaggatggttttgggccaaaccaggaaaggacaggaagtctgtggttaacatctgaggacacaatgggagaggacctaggttctaaatgaatgtcttaagtgcttcaaagatggcaacctgggagaaccaggagaggggactgagttctctgaggacaaggaccttgtactacttcatccccatgaaggggctcggcatcagggaagtatttggtggaaaaaaacatcactgtagaacacaccaactgaaagtaatttgaaaaaaaaaatccatgacactgactatgtagcagtcaccattaagtacttacatgttattaactcatttaatcttcataacaactgcattaggtaggtggtcttccccccatttttacagataagttaattgagacacagaggttcgagtgacttgcctagagtcgcccagctggactgggctgaaacccaggtaggttggttccagagtgtttgcaagcagcaggaatttcccagtattagaacttgagaagcccattcaaaaaaaatagtttcggcactgagcccctgccctgctgagtgctgggacctggaggtgaagtgggggccatcaaggtccctcggcagcagagcccacagcctggtgcagggacacatactgggaaaatcccacaccccaagcgagtgtgcccagcactgcaaaggggaggcactgggctgggtggctccaggaaggtttctttgaggaagggacatttgggctgagacctacaggaggcctaggagctggccaagtggaggatgagagggcggtgttccaggctgagcagacagccagagggaggagtacttggtcaggctgagggactgcgccagctgaaaggtggaggcaagggagcagaggccagcaggggctgcctggagcctggggactctaccccaaccctagcagcgggaagagagggggcggggccctcacctgctcaaactcgtcagtgatggtcttgggctcctcgtgcctctggaaccacatcatgtacttggtgtggaatcgccatgactgcttctttagggccttggctgccagatactgtgccttagtgccctgggggaggaacagtggagagggggatcagggggcccccaaactgggtggggagccaggggaatggggcaggacatcagggctgaaccccggcccccgccacagaccacagttgggctggacaatcctcttggagatggggctgggggcacagaacataccaatgctgatcaggagaaggaaaatgagacaggaggtgaaaattgctttcagagaagctttgagaaggaagaaaaactaatgtgtgatgagagctgagagaggaggcaatttagaaaatttcccaagtggggatgagggtggaggtcactcatgactcactggggttgggagggggctggacagctccccagtggtctccagggaggcctgagaatgtgccgatgagcagagtggggtcggcctagactggggctgctggagcagggctggggaggggccgcgggtgagccagtgggcaactggaagcggggctgaggtgtgcctcagtggaccagcctcgctgtcaacccaagcagttctaacatctctgggctggaaggcggggacggggacaggtggatttggggcaggggcccaggagtgggaatagggagggggtgcggtcccagtggccgcagtggggcacccacctcacccctccagcccgaggggggacggcggcggtggcggcgaagccggggggcccgaggctgccccgggggccctgctgtacctccagatagtagaagatgaagaagagtgtctcggtcgacaggcgctggtagaattccacagtgtccgagtgtgggggtggcatctggtggtggtaggggggcgtcggacaggggttccgggggaggtactgcctgtgagagcaacaggaaggtcagtgccagctgcctactagtcctgtcgtgatcaaaagggtgctcagacatgcatccctgcggggggaggtggtacagaaagacccagggcggtgctgaccttcagtggagagcccaagtcaggggcctggtgctctacccacagcctcacaggttcagccactgcctcctccgtaagactcaagtcccagaccatcccccttccctgtggcccctcaccgaatacgctcagagtcagaggggtgaggcatgtggtgccaggcggcctcttccatggcctgctgatagagctgctccttggtgaggggcacagggcccagtggacagacacccagcgacagcggtatgttcacctctgacagctgcaggggcggctgggctgaggccggaggtgctgatgtactgctcaggatgatgtctgtggggagggtgggggtccggccccctcagtggtgaggatgggtcaggggcagcccctcctctttggcccgctgcttccccaccatcctgggtccctcacctcgctcggtcaggtgcagcgttggcacagggtcctcaatgccagagctgatggctgcccgttccgccatggacttcaaggagctcagaggctcaggggcctggggaggaaacaagaggcctggcctgagcacttgggctgcaggagcaagtgcagcctgacacaggccccagatgctctcacctgccctgtttgggggccgtggagggccaacgacccactccccacaatctacccatgacaggtaaaagcatcaaactgtagggaaacaatcggagaccacgacgcattcatcagcagaggaacgtctcgtgagtgggactctgcagcatggaatactacgccgagattttcaaaatacaagttcgtgacatactacagaagtaaacgccaacctgcagaatatgtacagtgcgctaccatttttgtcaaaggatgtgccaatagtacacgctccttcactagggacacctacacgctgggagagctcccgcctgtcttgaaggaggcaggaggtctacatgctcagctgtctgcctgtgactggcatggggtgactggaatcggggtgggcccagcccggctaggcttcagtctccttgctggaaacaggtaggttgggtctccagccccgcagccacagcctcgtttcctattacaaaggttacagcaggcttctgttccccaaagtcagggctggttcctcccatctcctccagccacgtgcagctgtcccaaaccccagccctgtgctggactctccacaacgagtcagtcgccaaggcttatccattctgtctcgctatatcgcccaggcaggtctcaaactcctgggctcaagctatcctcccgcctctgcctccctaagagctgggattacaggtgtgagccaccacgcccagctatccgtcctgcttctaaaccccactggatggctcccttccctgtcgtgccaccatgtcccacacagcccaggcctgtcctctcctgcccagaccaccctccctctatcctgtcctcaccagccccaggggacctttccaatgaagtcatgttgttccttctctactccaaaccttgccatggttcccgaccacccaccccagcgattcatttttgttgttggtggtgttaaaagatatggaccccttctgaaaatctcaaagctgctgtttccctttttccagaaaaatgcacgcactataaatatcctgtccacctacttctaaaatttgggccgggcacggtggctcacacctgtaatcccagcactttgggaggtcgaggtgggtggatcacctgaggttcggagttcaagacctgcctgaccaacatggcaaaaccccatctctattaaaaatataaaaattagcctggcgtggtggcaggcgcctgtaatcccagctactcagtaggctgcggcaggagaatcgcttgaacccaggaggcggatgttgcattcagctgagattgcaccactgcactccagcctgggtgacagagcaagactctgtctcaaaaaagaaaaaaaaaaaaaattaatgcttctgttgggccagaaactgttccaagagctttatgaggatgatttagtcttccaaataaccctacatagtaggtataatcgtgactattgccgtttcccagatgaaggcacagaaaggacaatgccaagacttggacctggacagcctgggcgcgcacactgcctcctggacagcctgggcgcgcacactgcctcctggacagcctgggcatacacactggtccccccatggaagctgcgctacagtatactggctcacaagccaagccccagctcctgaccctcgatgatcaggaccccaccgtcctatcctgctacacccactatctcagccctgcagctggtggcactgtctcctgcagagtggacacctctctcctctctgctgcatcctgcccagcttcctaagcacacaggcagatgcatgctcctcctaaagcacctcctgaagcccttcctgcagctgttagcccccctgcctggtccaggtctcagcttaaacatcaccccctctcagaccttcctgggcctgtctcccaggtcaggtcagatgcccctcggtgggcccaccgcaaccttccctgcagctgccccagcagggaagcttcctaaagggtggaaccaggctgcattcacccaaccagtctttctacttgtgcagaaagtacaccagtctatgccttgtgaggacaaacggggacagaaactgagggcctgcgggggggatgaagatggagacccagagagagcaagcaacaagtgcaaccaagagaaaggaaaagagacccagagaaacagagctttggagggaacaagagaggaggtatgagagcccccagagatcaaggtcacggggagggtggtacagaaagacctggagaaagagcaagtgtgagaaggggacagaaagccagagaaagagatccagaaagagggtgggggcagggggtgcagctagagacctggaggaaagaaacaacagagtcaggacacagaggctcgggggatgtccgaggagcccaccttgatttctggggcggtgctgaactgtggaggcccattgagcagggcaccggctgccttggcatcactgaagctgggcgttggggagctgggaggattcacaggcagtggcaccaggaggctgggtccccctgagttgttccctgagcctggggccacgcccccagcccccgttggggctgccgcactgggttccttcctggagagagagcatggaagagggggttgagaggagggtccctgagggtgggatgggcagagaggcctggctggagagaggggagactgcacagatcagatgggatctgagaggggcaggtgagggcagacagatgggagaaagaagtggttctctgggcaaacaaaggcagagcccaatctttggaatggtttctcatcagcagagcagagctgtgggggtgggggtgaggattctcgggtgctccaccaggccacaggctgatcaaaaccacttgccctgggcaggtgttcacagggcccactcccccttgggcaggccagctggagctggggtgagggggcaggaagcaggcctttcctttgtgcacactgatctttcttagggcattcttcgggaaacaggcagacccagtggaatggtctgagctaagatttgaaggagtggctgcagaggaataaggacttcgggacaattcactttgaaaagtgaaacagtgaccctccggtggcagtcaattggcctcaggcaggtaacagaaatggggaggaaagggtatggggctcttgagaaaacttccacttagatgagaacgtattttagaatgttctgaagggcaaagcagggaggctgatgtagtttccttgctggaaagaagtgggggtgtaacacccgagggagatggaggatagcgcttggccattcccagcagcaagggcggggggttcagaacccaccgatgcgggggtgaggcgcctgcgcctctctgtttcaaaaggctgccatcccaaccctgccgatggccgagacactcacgaggtgctgggaggtgggttgtgggggccggaaggggggcccaaggcctggctgctggcattgttgcccccactgctgctcaaagccacctctgccgggctgtctgccacaactgagctgtaacctgggaacaaagagtaaatggaaagggctgctgcctgctgcccagccccgcccacgccccccaccccgctgcctcctcactcactggtggcgccattctgcttgccagcccctccaccggcactgctgttactactgctgctgctccctccacctccgctgccgccgcctccgcctccgctaggctggacgctggggggccggggctgggtcgtgctgggcccactgggagctggtggggccacagcctgggcatagggagcaggggtgcccgagttgtggctgggagctggactggccttggggcccagggcacttgggggtgctgcgggggcggggaccccattgttgccaggagtggtgctcaaggcagaggcagcaggcggggggccggaggggtaggtgggcggcacagctggggactgagggtgctggttgctgtggacaggcttggagccgtttttggctggagactgcgggtgggagagagcagagggtcaggacccagtgggccagctggtctccctcaccacccccacctcaggctccatctttgtcccagcagcctcctctctggcctcgctgcccccacctgctcctgccctcttggggacctgggtgaccttactcaccctcatggcttcaatcaccttcatgcttaaaacactcacactgatttccagcctgcccagcttcccaagtcctgcctggacaccgccccatggacacccccacagggatctgacacacaacttaggttgtcagccagagaagatccatctgttggaagccagaggactagtgggaaacacttaagtgttctcaatatgagattagctggagccgcctaatgtccaagagtagaaggaaaaacagctggaaattggatagtaattctgaatgtcacctgaagggtcacagaagctactcacagggctggaagttaccagcactccagaaagtggtgggagggtaaatgtgctcatggtatccctaccgcaggcaatctgtggacagcactccggctgctgagcctaaccacctcctgggcttctttccagccaccccacaggcaccttgcgcttaccaagcgcccaacaggactgactacccacttctctcctgggcatcgctgcttggcagtgggggcctgggaaggtggcagagcccagcctggcccctggagtacctgcctcagtgtctctcctcatcacctcctggccctgttgcccgccctcactactacctgcgggtccccttagtctccacaccagcctcctcaatgcccactcagggtgtccccttggaaccatccatcccgttagcccacagaggggcctcaggcccatgctgctcctgcctaacattgttctgtagcagcgtttccgaaagcgtgctcctgtcctgggagatgttaaaggagttgaagaagcactgcccgccaccgtctcctctcagaaatttgcagtgtgtattatcagcacagcaaaggccccatcgcttcctaggcttattggactctggaggccactcaggtccacaaagcctgagcccctcagcctgacagtcccagtccctgtgctcacagttgggcccctggccctgcagacctggccagactcatctctcctcacttccaaactttctgtcacaacttgcccatgttactggctgccacctctccctgccaggcaaactcacctgactgtgaagcccagggcactccacagcagcatctcctgactgcctggccaggccaagggtgacctgtgtgctacccccttgaccacagcaccagtcacctgtccacttgccctgcccacctgccctcagggcagcactgatttctgagccacctgtgtccaccagcccagcacagtggccggcgctcaggcctcaagatgcctttgggaagcaacagaggagtgaatggcgtgcccacccggtccaggctcacacccacctggctgacttcactgtctgtggaacgtcccctcttcttatcatcttcagagttttcctgaggtaggggaggcagaatagaaacctgtgtgacctctggggctctgatggagaaccgccaatctctgaatgccccggggacctgggcccaattgactgccattgcggccccagagctggtcaaatggctgtccttaatctgcctggagaaaccatctcaattcaggctctccagtcttcttgttttctgggagccagcactgacccaccagcctcttaaggatctgggaacctgctctccacagggaagccaacccttggatccctgcccaaggtggccagctacccagcctcctcaggcagcccaggcaccggcccctcccacttcccagatccaggacctaaactggcgcgggatgcaccctattgctctttatgtcctttagggacccagatataggaccttagcgtgtgctccaagagcctagaccctggatacctagatctgtgtttcctcaattacgctcccatagccactttggagtgacccagatttgtctcctcgagtcctgccctgctggaaacacaaggtactagtgtcccgtggggcctcaccgtggtacagttggctgggctgggcgggatgggagagctggaggtggttgaggtgggcgtgctgctggactggttgaagatctcatcctccatgtggctgtggctgggaggggaggtggcgaccagcgcctgtgctgtgggggcagaagaagggcatgcttagctggctcacacagcccattctgggccctcacttcctgtgccacgatcagccccagggcctcacgaatgtcctcgaggtccaggtcatcgtagagaaactcgttctcctcgaagtcggggtcctgggatgagtcaacatagtactcaacgtcgtccttgatcttgcggatggcgtcaacgaggatggagtcattgtccagcatgcgcaggatggtctctagcatgcgcacgtggtagcggtgcttctcgatgtgccgcttcaagccctcaatccggtcctgcttctgctggcgagcccagggccaggctcaggggctgcagagcacctgcttggcccctcctgcccccacagaacctgtcctcagtccctgacccctgtggagacccaaagcctccacgccatccccttcggggtggggcagtatggggtccacccaccctctgagccctgtggggaccaatcttagccttgacatcttgggatcccactgctccctcctctccccacacctttctggctccaggagtccttggaaacctctaaaagacccagaggtccttgtgccatcccacgacttggcctccatctgcacctcacctgacagcccagatttctcaactgagcccgcccaccactgtgactgcctctggcatacagataccctccgacctgctccagcagtaacaatgataacccccatttgtgaggagcttgctgtttagaattgtgatatctgtcatcactaggcccccaaccctacccatttatccctgagagagcccagattcctaagcctcgctcctgccctcccctcaaggcccctttaggatttaacatcttagccttggttccaaatctctgctctgttcaaggacccatcatctccccgaaagcccctggttcccaaacccctcagagtctgacacccaaccctgtcatcttccacttcctgaccctctcccacccacagcttccctgaggacccggctctcccctccctgtctttctggtttcagcaagtctgtacagtttgtatccctttgaactcataccccacaatcccggattttagaacctgggaccccaacatccagctttgtcccagactcctgtcttccttcaggcctggttctctgccttctccatgttctgccttgtctctacccactgtgctctccctaggaccagggccctctgggtgccaggaggcctcttgccatgggtgtccttcaggtctcacttttactctgtggcccaagctcaacctgcactcaccttcccccaagtcgctcctcttcacaaaggccccacggtctacccagacacccaggggagcctgagattctgtctgacctccttcctgccccacgcgtgcagctgctaagccctcccaatcctgtctctcaaatccctaatcccggctgttggccctgtccgcctgaggaatccaggccccaactcccaggagcataaatgactggcctcctgctggccagcccattcccatgcccatccccatcccaaaggtgtcgggtctccctcactcacatccttgtcgcccttcttcttgcgtgtctgcactgacagtgactccacttcactctcaaactggtccacctgcatgttgagcgtgtcgatggtattctaggggagggagaggaagaggaagcccatcagctagggttccgcctacacccagggctcaggatcctcagagttcacctcctcttctctaccccaactcaccgtgagccactggccaacctcttccttctccttctgggcaggatctaccttctgggccaggcccaggccctctttgctgtaagctttggttttggtctctcgttccacaactttgaaccgttccatttgctgtagagagtgcagttggcaggggggctctcaaaggtgggaaaggagctgactaagggccagcagacactccgacctgagcctcgtgaccctactttctgagctctgagtccgctgcctcttcacttcccttaggtgcagaaaccttacttctcttgaggacctctggggtctggccgctctgcctccgccccttgggatctcaagaatctggtgaccttcccacctctctgggactcaggctctgggctcctaccgtctcaatgagcttgcggttgtctataagctgcctcttgtccttgatctcgttggacgctacccatgtcttgatttggtccctcagccgctgcagatgggaaaagcaagaaagtcagacctcaggacccaggaactggggcccacagctccttctccctgggacccagcagtccactctcccagttccctctaccctcaggacaaaggcgtccaggcccccagccccctcacttgtagcttcttaatctccttctttaggtcagcctcatacttttctttctggttcgcgttggctgcattgtggagctgagggatggagagaattgagaagtcagtgtgggaggggatgtcccagtacccactccagtgattcttccttatgctagggactcgaggaccccccccaacccctacccccaatccatcttagagctgattctcttaggtcctcagcatctgcatatgtagcccctcccgctggtcaacacccagaggtcctgagccgccttcctgtgccctcctctctgaagacccagattattagggtctcagcccctgtaccttctgccaaatatcttcaaactgctccacgccctcggacaccttcttgaggcagcgatcaatctcacctggccagggaggaacaaggctgtgagaatcctgcccaggtggcaggtatctaaagagcagtcctcagaagagggagcatgtggctacaggtgcagcaggaagtcagtctagtaccttggagtttgcgcttgtccgccatcttccctgccctacagacgcactctcttcatactctcttggagacggacgctgctaggagagattggagaggaattaacacgtattccctggctggtaaaaacccagagacatggacctagtcagcatagtgaggtaggtgggactggtaaagagaagaagcatttgctatctgacaagagaccagccccagttctcctgatgctcgcttgactgcccagcatagtgtctggccaacaggggaccccataagtttgttgaaacaagaaaagttacatacttttttgtgtgcctctgactcaggaagtggaaaattcctagagcatggagtaccttctccccagaatacactcaaaaaggtttttcagagcaggacagtcatgctgcacacagctgatgactgggatggaggcattagccctggaaatcacacttcctactcagaggggctgggcagaggtggctaggagaggtcatccctcagacaagtcaggagacaaatgaaactggcagctcacagagaagggcgtgtgtgtgtgtgtgtgtgtgtgtgtgtgtgtgtgtgtaagctgtaggtaggagaagaaagattgggggtgggggaaaacgacggcgagcagagatgccgaaagctgtgaagagctgaacccgctcatgcagacagggctgaatgccaagtagaagggactcaaaccaccaagacatttattccagagcaggatccttaaaccaaaaggaaataacactcctaacccaaagaagctaataccaagaaggcttagagatttgggggcagaaggcagtacccaagagagacctgggagaagacagaaatcttactaagataagagggtgcaaaggtaccgcagctgtgagggagccgatctgcactcatggaggaatcccatagcaagtggattggtaatttagagtcagggagacatagaccatcagggcaggaacccaaaacttcaagagaggagcgtctttattttaaaggaagttacctggaacccagagaagactgaggtcaaaagggagttccaaggagctttagtccaagggaagacataccttagggcctgacagcgagaccaggggagccctgggaagagaggcttatgcctcagaagaagacttctgagataccagcggagattgccctcttcccctccagggagggggcctacaatgaaaagcacagttccctgggatccacgggccgctcccactctacgtgtgcagggcagggaaccctggagtagtcacttactgtaaagacagaaacagccccatactgaggaacaagagcctcaatacagagggaagtcacaccaaaagagtcctcacccacaaagaagggaacatctggcaaacagtgctatccaacagaactttgcaatgctggaaacactctatttgcgcatatctgttggccactgaacatctgaaatgtggcaagtgtaatggaggaactgaatttttcatttttaactagttactaatcaccacatgtgactagcagcaaccatatgggacggatatgctttagaacaagaagcccataaaggacagggctggtaccttacccccagggagaattttcccaacaccgcagggacccattctgggtgataataggtaggggtgctaccttacacttgagggaatttaaatctcctcagtaaaaggcccaacctaaagaaagccgcagcagcccccgcccaggtcagctatcacgccctacctggggaatctctaagaaggcaaagcaaccaacaaaaggacccaggagaaggtgccacagtggggattcaggctgaggaggggaaagcccctttgacccagggagctcacacaaggcaagggcctggacaccagagctcaggtgtgcagggatcctcaccaaagtccaacaccccaacacagaaaagcctcttactgcatagggggaacaagaatgtgaaacgagagtttacactccctctttccatcccaagaacccaacagagggtcatgggcaggtgctccagcccagagagagaagaggtctcatggtctacacccctaaacaaggcaatcaacaccttaggcaggtgacgccctccctgtgtctccacacggaaaggactggtatcctagtgcagaggaagaatacccacagagaggagaccacactgtggcagcaagagaaggaagtcctggaggggtcacaagccagaaggaggggaacaagagcgctaacccagggaggtgatgtttcagacagaacagtgtgacatcgaagtcggctacagctgagacccagtgaggaggcagctcctccacagagaaggggcaagtgccagaggcccagggtacttgtcccctagagaggctggagccttagccacagtagagacaacaccttccccgctaagaaaatccttatatcatgagggtatctgtacctctggtccccccagcaaaggaccagagagaagggaagctggagcctgagtctcgaagcagagacgccgccagagaagaaagagccccatttgctgtagtcaggggggcatccaccaagatcctccaaggaaggtggtgatcgcaggtccactctcaggcgtgaagaacctgtgctccagcagcaaaggctctccaagagcactgaggaatctgggaacctcggcccaggaggagacttacccaagaggaacacacatccccacagggaagggacccacaaggcgggtggcggggcggggggaggtgagcaggacaccagcctcacaggagccaacacgctaaaatcagagccaaaaccagtaaagaagagccccccagacttcatctcagggaagatgataccaccacacaaagactcgaggagggaggggcaggaggtcagccctgggaaactaacaccgggtggtccttaaccttgggggccgtcatgtgcccacagagtggtctttgtcatgaggcacctttgatctgggagagcttccgcctctgcagcaaggagctctgagaagtgatgttgaagggtgatccttaacccaggtggctgctgacgtggccacacagaggctctgagactccagaagaaggatgcgttagggcctggggtagaggtagtcatctccactgagatgccccatgccaagggtggggggctggaatctcccaccttggaaagtctacaccagagaagtctctggtcccagggacagggtctacagtggagtctcccgcttgagactcaggtatcttacatccacacagccaggaaactatgccttaccccatacagtgacaaatcaagagggggttttggaagcatgagccgggggcacctgcatccgagaggggtcctcagccttacggtggggacacatgcagaggcgtggacacctcaaatccagaaaagcagccataccaataccaaggatggcaagaaccttatccctgggggaggtgacaccaagaaagggtccttaccctggagagaaggcacagccccagagggaagagcccccacctcgcagtacaggaacccgggtctaggaagcttcctactctcatggggtaccagcagcggggccagaaggcgaaacccttgttctccaactgctgacacccagcgtaagggtagatgggaagtcaacaaacccacagtgtgggatctgatgcaaatatcaagggcagtgggcttcttggtccttggagagctgacaccctaaaggaggagactggtgtgaagatggaagaagcctcatactcaggcaggggtgaagggagggaggggagacatcaaaacccctcaccaaaaggacaggagagctcaccccggggtgggtggccgccctgcactgagaggcagggactgctcagaaagaggggctggtgctgcccgcagtgggagctcactaacatggacagcgtggcggcttagtgtctttcaccaggcacctgagcgccaggggatcccagcagcccccagcaacaagaccacagtggtcctgatatcactgggagacgcccacacccagaaggtcggagagtcacgatgcaggggagttcaaggctgcaaagccaggggcagacgccaggatcaaagaagtgtgagagctgagaccagacgtgggccacactgaggacggtcctgtaccccaggtgggggaaagccaaactcccccaaaaaggcaggcgcccagtgcagcgggatggcgaggctggagccacccagggcgctactcgctatgagagggaagagctgcagactacagaggtggaaacttcggcaaaggctccaactaacggggagtttctcctccactcctctcccaagaggctcccatccgatacagacgggcagctggaactgagatccaggggcgaggctgccgcgtcccgggacgccagtgaggagggatgcggaggcgcctcggtcctgggaagggtgactcccccacccagctggggtcctcgtcccgaccaccaccccccctccccgccaccgtcgagggagaagccccggcgcggagctgccccacaacgcgaaggaccgaggccgaggggggcaggcacctgagccccgagagggcgggcacctgggaccaggggcgcctccatccttccagccaggagccataccgacgcggagaggggcgggcacctcgcgcccgggaggcttcgcaccctcacacccctaccggggggcccgacgcgatgccacgcggggaggcggcggcgggcggggcccggggctccgggctcgcggaaggacccccgggaggcgctgaggaacgtgaaagaggcgcaggaacgggagggcgagagggagggagccgccccccgccgggagccccgcgctgcagaggcggcggcagggggcaggcgaggggaggccatgtcgcgacagacggcggtgtcgccagggcgggaggcggcggggagggcggacgatggcgccggggggaggaagggaaggggtccggcccagtcgagcctgacgctctcaccacaggagctggcgccgccgctgaggagcgtatcgcgacaggcgggggaggcgagcgcccgccgcctttttctcgcgccccgggcccgggcgctatcgcgatagcggcgcgtatgtcggatagtgggtttgtttgattgggcccggggttgttctgacgacgggggtcggggctcaagggaggccgcggcgtctgccgatggctccgcggaagctgaccgggccc

SEQ ID NO: 858 - DNA, 13994 bp, Homo sapiens
  misc_feature (156)..(156): n equals a,t,g, or c
  misc_feature (10132)..(10132): n equals a,t,g, or c
  misc_feature (11830)..(11830): n equals a,t,g, or c
ggaagtgcaaagaggcgggcgtgccagtccctggacagctacgacgccatgaatatcttgcccaagaagagctggcacgtccggaacaaggacaatgtcgcccgcgtgcgacgtgacgaggcccaggcccgggaggaggagaaggagcgtgagatngggtgctgctggctcagcaagaggtaagctcggaagccggcaggcggcgctccggggcccagcgcgcaggcggcggttgggggccggaagcggaggctttgcgcaggctcaatgtgccccgtgtgaaattcgggaccaggcgccgatcccactttcgaggacgttgccccgcaaaccttgtgcccacttccacgaaaccttccttgatctcgccctcgtcttagtttttcccacactgatgtatttcacatggctggaacagtgtctagcacaagagagaagcttaacatttaatgaatccgtgaccccttagacagttcaaggaaattcggatcactttttagtttgcctgcacagcctatttattgagcatctactgtatgctaactacatgccgtgcacctgacttgcggaatccccaataagcactgttcgttcttagaggggcactgtcatctctgttgcacgaagtgagatggcttcagtgaggggaaggcacattttaaggagaggcggacagccagctccacgccatcggggagccctttcgtgcaccgccccctagacacatacacacaaacacgggctttccgtatggctctttaaatctgtttggtgtacacccaactttcatttccttagctagtctgatcctccgccgtgggtgggaggtagtctaggtttttagaatctcagtaggctgctgagcgctgtttgaaatccgcgtcctgaaggcaggggacagggcttcagcagacttggggtagtcacttggagccatggctagaattcagatcgtctggcctaatgcatacctttatggctgttttaattgtctcacttgaggttaggaacccctttggtttaggccagggacctcctcccatacatccttgatgacccgtggtttactatttgaaagggagtttacaaaacccaggcgttgcctcatctgcctaccctcacccccagctaggacaggtgcctcttttaggcgcctagtgctccctttctcataaccccagcaccctggactgccattttctgtggtgggcaccagactcacagttcttgaattacctctaggttctgaatgtcctgcctataactttctccccaggcccgtacagaattcctacggaagaaagccagacatcagaactcactgcctgagcttgaagcagcagaggcgggagccccaggttctggccctgtggacctgtttcgggagctgctggaggaagggaaaggagtgatcagaggcaataaagagtacgaggaagaaaagcgacaggagaaagtaagctggcctcacccacttcatcagaggggccatgaatcgagttggagggagggggcactttagccattggttgtgaccaaggtcaaacaagagtgaacacacagaatttaggaccataccaaggcatgacactcaaaaagcgttggctattgccgtctgggcgcccacaggggttggaggtagatgctagaggtccccagctgctgggcaaaccgctcagttctccaaactggaggagtctcaaacctgatgggcttttaaaaatttaaatcagccggctgtggctcacgcctgtaatcccaccaccttgggaggctgaggcgggtggatcacctgaggtcaggagttcaagaccagcctggtcaacatggtatctctaaaaatacaaaaaaaattagccgggcatggtggtgcgcgcctgtaatcccagggaggctgaagcaggagaatcgcttgacccaggaggtggaagctgcagtaagccgagattgcgccactgcactccagcctgggtgacagagcgagaccccatctcaaaacaatcaaacaaaaagtgaatcaatcgcctcttgctttttggctaagatcaagtgtaaaaggtacatcagtggctgtgcatggtggctcacgcctgtaatcccagcactttgggaggccaacgtgggtggatcacctgaggtcagaagttcaagaccagcctggccaaacatggcaaaaccccgtctctactaaaaatacaaaaattagctgggcatggtggtgtgtgcctgtaatcccagctactcggggggctgaggtaggaggattgcttgaacctgggaagcagaggttgcagtgagccgagatcgtgccactgcactcgagtctgggcaacagagcgagactccatctcaaaaaaaagaggtacatcagctcttgtcatttatctgctgtctctggacttgctgaccccacccatcgctcctctgctttgcttgatcccttcaggcttctcttcaagtctctctgcaaagatgcctgcctctgaacactcaagtggctccacttgtcccctccttcccctgctgttactgtacctgctactgtcccccagggggagctttgcctctgtttgtcttccatccccagcacctggtccaactggttcataacaagccttagatacctgttcgcttagatacctgtgtcagggagacacacctgacaccttgaaagattatatcacatctcttgtatttcctggccccctcaggagaggcaagagaaagctctgggcatcctgacatacctgggccagagtgcagcggaggcacagactcaacccccttggtaccagctacccccagggcgagggggccccccgcccggcccagccccagatgagaagatcaagagccgtctggaccctctgcgggagatgcagaagcatctggggaagaagagacagcacggcggtgatgaaggcagtcgcagcagaaaggaaaaggaggggtctgagaagcagcgacccaaggagtaagaagaccccacctcggcagaccagggcccagaccttcagggcttggcagcagccagcatgggcactgcagcgtctctggtcaggacagccagggactccgtgaagggctggctaggtggagaagtggttctcagcatgtggtccagggagccctaggggtcctgacaccctttcccggggtgctgtggtgtcaagcctattttcctgacactggtggacttttccactcgtgttctcaggcatgtagtgcaggtttccagaggctgtgtgatggggagacaccctcactctgatggccaatggcagatgcttgtgtccaaactttcttagttttcactaatgatttgcagcatattaagagaacccatttaaacaaaagctcttggggtccttggtttttaagagtataaaggggtcctgagaccaaagagtttgagagctgctgggttagagagtaaaagcaggcttctgtctccaggatgctgcacccctggtctagagggggtacactgcctgtagtcttctttcctctagaaagggaaactgagggccagggggctgctaagtgtgctttcttgacctggagaagcatcagattttaaagactggggaggaccaaagcccacagaagggaaggccagagacgtgcccatggcgtcccagcaccaagtggctgcttccagcaggcctaaggagctgaggctggggtgtgctggatgcagcggggcttccaggcggcagctccctctatgggagaggttgggggaatggcctcctaggggctaccagctttctgacctcactcctctccccacaggcctccatccctggaccagcttcgagctgaacgtctgcggagggaagcagctgagaggtctcgggcagaggccctgctggcccgggtccaaggccgggcactacaggagggtcagccggaagaagacgagacggatgaccggcggcggcggtacaactcccaattcaacccccagctggcccggcgcccccgccagcaggaccctcaccttactcactgactcctgagggggtacaggagaggccgctgctgccagccgtcatataaaactatttattcataaatattttccaaaatgaaaataggtttaccaaaaaatgtccctcactggggaggggaggagggggcagccctcgcccccgagcccccagggtggggctgagaggaaaacctcccggccccctccctgcttcctgggagagggggatgccccgtggcttggggcctccctccagtcttccagggcagggccctcacctgggcagggggatcagcatgcgggggaagggggtgggtagagggaggggccggtgtcactggaggtcccggtcctccaggtagcggtactcaaaggtgaagccttccttcttccgctggccccacttctcgtagtcaaagtagatgtaggtgccctggccgggggagaaggcggtcagtgagtggacgaggaggtggtctgggatctgggccggaccaacagacaaaggggacaattcttagggctgtggatgtgtcaggcaccgggccagctgccctgcacgcacacactctcatccatcctcacaaggttcttcttgggtaggaaatgttatcatgccacttcagcgaggaggaaacggagggggccgcagaggttccaccgaagccagctgccagaatcgtccccagccccaggtgtgagtgcacagccttcgtttcctcgagggctgtggcttttgagcacctctcacgtgagtacaggatgcacagcctagcatttaatcttcacaaagacctcgaggcagtgggtactgtcacccttgttctagagaatggaacagtctcagagtctaaatccaagcactctgcagggacattttattggtgacgaagtggtgtgggaatttctgaatgactggatgccctgaaatgtactaacttggaggatggttttgggccaaaccaggaaaggacaggaagtctgtggttaacatctgaggacacaatgggagaggacctaggttctaaatgaatgtcttaagtgcttcaaagatggcaacctgggagaaccaggagaggggactgagttctctgaggacaaggaccttgtactacttcatccccatgaaggggctcggcatcagggaagtatttggtggaaaaaaacatcactgtagaacacaccaactgaaagtaatttgaaaaaaaaaatccatgacactgactatgtagcagtcaccattaagtacttacatgttattaactcatttaatcttcataacaactgcattaggtaggtggtcttccccccatttttacagataagttaattgagacacagaggttcgagtgacttgcctagagtcgcccagctggactgggctgaaacccaggtaggttggttccagagtgtttgcaagcagcaggaatttcccagtattagaacttgagaagcccattcaaaaaaaatagtttcggcactgagcccctgccctgctgagtgctgggacctggaggtgaagtgggggccatcaaggtccctcggcagcagagcccacagcctggtgcagggacacatactgggaaaatcccacaccccaagcgagtgtgcccagcactgcaaaggggaggcactgggctgggtggctccaggaaggtttctttgaggaagggacatttgggctgagacctacaggaggcctaggagctggccaagtggaggatgagagggcggtgttccaggctgagcagacagccagagggaggagtacttggtcaggctgagggactgcgccagctgaaaggtggaggcaagggagcagaggccagcaggggctgcctggagcctggggactctaccccaaccctagcagcgggaagagagggcggggccctcacctgctcaaactcgtcagtgatggtcttgggctcctcgtgcctctggaaccacatcatgtacttggtgtggaatcgccatgactgcttctttagggccttggctgccagatactgtgccttagtgccctgggggaggaacagtggagagggggatcagggggccccaaactgggtggggagccaggggaatggggcaggacatcagggctgaaccccggcccccgccacagaccacagttgggctggacaatcctcttggagatggggctgggggcacagaacataccaatgctgatcaggagaaggaaaatgagacaggaggtgaaaattgctttcagagaagctttgagaaggaagaaaaactaatgtgtgatgagagctgagagaggaggcatttagaaaattcccaagtgggaatgagggtggaggtcactcatgactcactgggggttgggagggggctggacaggctccccagtggtctccagggaggcctgagaatgtgccaatgagcagagtggggtcggcctagactggggctgctggagcagggctggggaggagccgcgggtgagccagtgggcaactggaagcggggctgaggtgtgcctcagtagaccagcctcgctgtcaacccaagcagttctaacatctctgggctggaaggcggggacggggacaggtggatttgggacagggcccagggagtgggaatagggagggggtgcggtcccagtgccgcagtgggggacccacctcacccctccagcccgaggggggacggcggcggtggcggcgaagccgggggcccgaggctgccccgggggccctgctgtacctccagatagtagaagatgaagaagagtgtctcggtcgacaggcgctggtagaattccacagtgtccgagtgtgggggtggcatctggtggtggtaggggggcgtcggacaggggttccgggggaggtactgcctgtgagagcaacaggaaggtcagtgccagctgcctactagtcctgtcgtgatcaaaagggtgctcagacatgcatccctgcggggggaggtggtacagaaagacccagggcggtgctgaccttcagtggagagcccaagtcaggggcctggtgctctacccacagcctcacaggttcagccactgcctcctccgtaagactcaagtcccagaccatcccccttccctgtggcccctcaccgaatacgctcagagtcagaggggtgaggcatgtggtgccaggcggcctcttccatggcctgctgatagagctgctccttggtgagggcacagggcccagtggacagacacccagcgacagcggtatgttcacctctgacagctgcaggggcggctgggctgaggccggaggtgctgatgtactgctcaggatgatgtctgtggggagggtgggggtccggccccctcagtggtgaggatgggtcaggggcagcccctcctctttggcccgctgcttccccaccatcctgggtccctcacctcgctcggtcaggtgcagcgttggcacagggtcctcaatgccagagctgatggctgcccgttccgccatggacttcaaggagctcagaggctcaggggcctggggaggaaacaagaggcctggcctgagcacttgggctgcaggagcaagtgcagcctgacacaggccccagatgctctcacctgccctgtttgggggccgtggagggccaacgacccactccccacaatctacccatgacaggtaaaagcatcaaactgtagggaaacaatcggagaccacgacgcattcatcagcagaggaacgtctcgtgagtgggactctgcagcatggaatactacgccgagattttcaaaatacaagttcgtgacatactacagaagtaaacgccaacctgcagaatatgtacagtgcgctaccatttttgtcaaaggatgtgccaatagtacacgctccttcactagggacacctacacgctgggagagctcccgcctgtcttgaaggaggcaggaggtctacatgctcagctgtctgcctgtgactggcatggggtgactggaatcggggtgggcccagcccggctaggcttcagtctccttgctggaaacaggtaggttgggtctccagccccgcagccacagcctcgtttcctattacaaaggttacagcaggcttctgttccccaaagtcagggctggttcctcccatctcctccagccacgtgcagctgtcccaaaccccagccctgtgctggactctccacaacgagtcagtcgccaaggcttatccatcctgtctcgctatatcgcccaggcaggtctcaaactcctgggctcaagctatcctcccgcctctgcctccctaagagctgggattacaggtgtgagccaccacgcccagctatccgtcctgcttctaaaccccactggatggctcccttccctgtcgtgccaccatgtcccacacagcccaggcctgtcctctcctgcccagaccaccctccctctatcctgtcctcaccagccccaggggacctttccaatgaagtcatgttgttccttctctactccaaaccttgccatggttcccgaccacccaccccagcgattcatttttgttgttggtggtgttaaaagatatggaccccttctgaaaatctcaaagctgctgtttccctttttccagaaaaatgcacgcactataaatatcctgtccacctacttctaaaatttgggccgggcacggtggctcacacctgtaatcccagcactttgggaggtcaaggtgggtggatcacctgaggttcggagttcaagacctgcctgaccaacatggcaaaaccccatctctattaaaaatataaaaattagcctggcgtggtggcaggcgcctgtaatcccagctactcagtaggctgcggcaggagaatcgcttgaacccaggaggcggatgttgcattcagctgagattgcaccactgcactccagcctgggtgacagagcaagactctgtctcaaaaaagaaaaaaaaaaaaaattaatgcttctgttgggccagaaactgttccaagagctttatgaggatgatttagtcttccaaataaccctacatagtaggtataatcgtgactattgccgtttcccagatgaaggcacagaaaggacaatgccaagacttggacctggacagcctgggcgcgcacactgcctcctggacagcctgggcgcgcacactgcctcctggacagcctgggcatacacactggtccccccatggaagctgcgctacagtatactggctcacaagccaagccccagctcctgaccctcgatgatcaggaccccaccgtcctatcctgctacacccactatctcagccctgcagctggtggcactgtctcctgcagagtggacacctctctcctctctgctgcatcctgcccagcttcctaagcacacaggcagatgcatgctcctcctaaagcacctcctgaagcccttcctgcagctgttagcccccctgcctggtccaggtctcagcttaaacatcaccccctctcagaccttcctgggcctgtctcccaggtcaggtcagatgcccctcggtgggcccaccgcaaccttccctgcagctgccccagcagggaagcttcctaaagggtggaaccaggctgcattcacccaaccagtctttctacttgtgcagaaagtacaccagtctatgccttgtgaggacaaacggggacagaaactgagggcctgcgggggggatgaagatggagacccagagagagcaagcaacaagtgcaaccaagagaaaggaaaagagacccagagaaacagagctttggagggaacaagagaggaggtatgagagcccccagagatcaaggtcacggggagggtggtacagaaagacctggagaaagagcaagtgtgagaaggggacagaaagccagagagagatccagaaagagggtgggggcaaggggtgcagctagagacctggaggaaagaaacaacagagtcaggacacagaggctcgggggatgtccgaggagcccaccttgatttctggggcggtgctgaactgtggaggcccattgagcagggcaccggctgccttggcatcactgaagctgggcgttggggagctgggaggattcacaggcagtggcaccaggaggctggtccccctgagttgttccctgagcctggccacgcctcnccgcccgttggtgctgccgcactgggttccttcctggagagagagcatggaagagggggttgagaggagggtccctgagggtgggatgggcagagaggcctggctggagagaggggagactgcacagatcagatgggatctgagaggggcaggtgagggcagacagatgggagaaagaagtggttctctgggcaaacaaacgcagagcccaatctttggaatggtttctcatcagcagagcagagctgtgggggtgggggtgaggattctcgggtgctccaccaggccacaggctgatcaaaaccacttgccctgggcaggtgttcacagggcccactcccccttgggcaggccagctggagctggggtgagggggcaggaagcaggcctttcctttgtgcacactgatctttcttagggcattcttcgggaaacaggcagacccagtggaatggtctgagctaagatttgaaggagtggctgcagaggaataaggacttcgggacaattcactttgaaaagtgaaacagtgaccctccggtggcagtcaattggcctcaggcaggtaacagaaatggggaggaaagggtatggggctcttgagaaaacttccacttagatgagaacgtattttagaatgttctgaagggcaaagcagggaggctgatgtagtttccttgctggaaagaagtgggggtgtaacacccgatggagatggaggatagcgcttggccattcccagcagcaagggcggggggttcagaacccaccgatgcgggggtgaggcgcctgcgcctctctgtttcaaaaggctgccatcccaaccctgccgatggccgagacactcacgaggtgctgggaggtgggttgtgggggccggaaggggggcccaaggcctggctgctggcattgttgcccccactgctgctcaaagccacctctgccgggctgtctgccacaactgagctgtaacctgggaacaaagagtaaatggaaagggctgctgcctgctgcccagccccgcccacgccccccaccccgctgcctcctcactcactggtggcgccattctgcttgccagcccctccaccggcactgctgttactactgctgctgctccctccgcctccgctgccgccgcctccgcctccgctaggctggacgctggggggccggggctgggtcgtgctgggcccactgggagctggtggggcacagcctgggcatagggagcaggggtgcccgagttgtggctgggagctggactggccttggggccagggcacttgggggtgctgcgggggcggggaaacattgttgccaggagtggtgctcaaggcagaggcagcaggcggggggccggagaggtaggtgggcggcacagctggggactgagggtgctggttgctgtggacaggcttggagccgtttttgctggagactgcgggtggagagagcagagggtcaggaccagctgggccagctggtctccctcaccacccccacctcaggctccatctttgtcccagcagcctcctctctggcctcgctgcccccacctgctcctgccctcttggggacctgggtgaccttactcaccctcatggcttcaatcaccttcatgcttaaaacactcacactgatttccagcctgcccagcttcccaagtcctgcctggacaccgccccatggacaccnccacagggatctgacacacaacttaggttgtcagccagagaagatccatctgttggaagccagaggactagtgggaaacacttaagtgttctcaatatgagattagctgagcccgcctaatgtcccaagagtaagaaggaaaaacagctggaaattggatagtaattctgaatgtcacctgaagggtcacagaagctactcacagggctggaagttaccagcactccagaaagtggtgggagggtaaatgtgctcatggtatccctaccgcaggcaatctgcggacagcactcgggctgctgagcctaaccacctcctgggcttctttccagccaccccacaggcaccttgcgcttaccaagcgcccaacaggactgactacccacttctctcctgggcatcgctgcttggcagtgggggcctgggaaggtggcagagcccagcctggcccctggagtacctgcctcagtgtctctcctcatcacctcctggccctgttgcccgccctcactactacctgcgggtccccttagtctccacaccagcctcctcaatgcccactcagggtgtccccttggaaccatccatcccgttagcccacagaggggcctcaggcccatgctgctcctgcctaacattgttctgtagcagcgtttccgaaagcgtgctcctgtcctgggagatgtcaaaggagttgaagaagcactgcccgccaccgtctcctctcagaaatttgcagtgtgtattatcagcacagcaaaggccccatcgcttcctaggcttattggactctggaggccactcaggtccacaaagcctgagcccctcagcctgacagtcccagtccctgtgctcacagttgggcccctggccctgcagacctggccagactcatctctcctcacttccaaactttctgtcacaacttgcccatgttactggctgccacctctccctgccaggcaaactcacctgactgtgaagcccagggcactccacagcagcatctcctgactgcctggccaggccaagggtgacctgtgtgctacccccttgaccacagcaccagtcacctgtccacttgccctgcccacctgccctcagggcagcactgatttctgagccacctgtgtccaccagcccagcacagtggccggcgctcaggcctcaagatgcctttgggaagcaacagaggagtgaatggcgtgcccacccggtccaggctcacacccacctggctgacttcactgtctgtggaacgtcccctcttcttatcatcttcagagttttcctgaggtaggggaggcagaatagaaacctgtgtgacctctggggctctgatggagaaccgccaatctctgaatgccccggggacctgggcccaattgactgccattgcggccccagagctggtcaaatggctgtccttaatctgcctggagaaaccatctcaattcaggctctccagtcttcttgttttctgggagccagcactgacccaccagcctcttaaggatctgggaacctgctctccacagggaagccaacccttggatccctgcccaaggtggccagctacccagcctcctcaggcagcccaggcaccggcccctcccacttcccagatccaggacctaaactggcgcgggatgcaccctattgctctttatgtcctttagggacccagatataggaccttagcgtgtgctccaagagcctagaccctggatacctagatctgtgtttcctcaattacgctcccatagccactttggagtgacccagatttgtctcctcgagtcctgccctgctggaaacacaaggtactagtgtcccgtggggcctcaccgtggtacagttggctgggctgggcgggatgggagagctggaggtggttgaggtgggcgtgctgctggactggttgaagatctcatcctccatgtggctgtggctggggggggaggtggcgaccagcgcctgtgctgtgggggcagaagaagggcatgcttagctggctcacacagcccattctgggccctcacttcctgtgccacgatcagccccagggcctcacgaatgtcctcgaggtccaggtcatcgtagagaaactcgttctcctcgaagtcggggtcctgggatgagtcaacatagtactcaacgtcgt

SEQ ID NO: 859 - DNA, 5365 bp, Homo sapiens
gtccacgtgcggctgcgccagcgcatcatcttgtacgaattaaaggtgcgattagggagcggggtctgcaactgggtagggaccagacaggaccgggctgagataacgcacagggcctaactcggtgatggggcctccggagagatgctaagcagctccttctccaagaaaggcaggtcctggggaatgagaaggttgagaggaggccgagatagggctgcccgagctccaagcgtgtaggaaaaggatgcgccagggctgggatcggtggctaatgcttgtaaccccagcactttgggagaccgagacaggtggatcgcttcagtctaggagttcgagaccagcctgggcaacatagggaggctccctctctaccaaaaaaaaaaaaaaaaagtttgtttttttttaagtaagcacaagaagcgggcggggcctaaggcaatttggttcaaagttaagtgatgggagcggccagcagggcgtcttgatacagctgaactggaacttcaggccaggaataaagcgcagggccacctgggggcggagcctctgatgggcagggctgaccaggggcgggtcttgggatgctgggcggagcctcaggggcggggcctggggtgctgagattgaccgcggagggatgggggcttgggttgctggatccggccgcgaaggggcggggctgtaaagggccgctggtttcctggagcgggtggaaccaggactgcagaggttgttagcgggtggggagacggctgcatcagttcacgttaaggaggatctctggagagccagacctggggaaccgggaggcccgcgccttgggaaatggagtccaagcgggcatctctcctgccttcaggtggagctggaggagacagtggtgcggcgccaggctgcggtgcggacgctgggccagcaagccagggtttggttggtgcgggtgctgctcaacctgctggtggtcgcgctcctgggggcagccttctatggcgtctactgggctacggggtgcaccgtggagctgcaggtgcggacggtcttggaagaggaagccagggggtcctggaacctacatttccaacggtggagggaggggacggaagtttgggatgccagagatcttagagaggaagtatgggagagggtatgttcggaccctggacttagggattttaaaggaaaaagagaggctgggcgcggtggcttacacctgtaatcccagcactttgggaggctgaggcgggcggatcacgatgtcaggagttccagaccagcctgaccaacatggtgaaaaacagtctctactaaaaatacaaaaattagacgggcgtggtggtgggcgcctgtaatcccagctactcaggaggctgaggcaggagaatcacttgaacccgggaggcagaggttgcagcgagccgagatcgcaccgctgcattctaggctgggcaacagagcgagactctgtctcaaaaaaaaaaaaaaaaagaagaagaagaagaagaggccggggggaggaccttaagcttggctcctccaggaccccaagcctctactcatggtccatcccgctcccaggagatgccccttgtccaggagttgccactgctgaagcttggggtgaattaccttccgtccatcttcatcgctggggtcaattttgtgctgccgcccgtgttcaagctcattgctccactggagggctacactcggagtcgccagatcgtttttatcctgctcaggttccagcctcacggggatggctgggaatgatgaagggtgggggcggtcagagggatgttggcgctgacaggtaagacacggaaatcctgctgataccgaatccagggattcaaatcctgactctgttggccaggtgcagtggctcacacctgtaatcccagcactttgggaggccgaggctgaggtcaggagttcgagaccagcctgacaaacatgatgaaaccccgtctgtagtaaaaatacgaatattagcccggcggtagtggcttctgtagtcccagctactcgggaggctgaggcaggagaatggctcgagcctgggaggtggaggttgcagtgagctgagatcgcgccactgcactccagtccgggtgacagagtgagaccctgtctcaaaaaaaaaaaaaaaaaaagaaagaaagaaagaaagaaatcctgattctgtcactgggcctcagcttcatctgtgagatgggttgaatgcgggcgcgttccactgagaagggaactgccacatggtgggtaccgggtcagggcccattctctgccttccccccttcaggaccgtgtttcttcgcctcgcctccctggtggtcctgctcttctctctctggaatcagatcacttgtgggggcgactccgaggctgaggactgcaaaacctgtggctacaattacaaacaacttccggtgagaacggcatgggtgtgcgtgggactcttgggtccctgaaggaaagatggagctgggtgggtccagactcttggtttgggcggagaggggagcttggggtgctggaacactctcccaagggtatgaaagtttgaaaaacgaggacccccagagaaagtattgacagggtctcataggcttgcgatgtggagactcggacgcgtgggcctccaggtgcccgggtcccgagttctttctgatatatttcttccttcttcagtgctgggagactgtcctgggccaggaaatgtacaaacttctgctctttgatctgctgactgtcttggcagtcgcgctgctcatccagtttcctagaaagtgagagccccgccccttgctgtggccccgcccctctaggacgaggccgtgccccatcgcgctgttcttttcaccgcgcacctttttaccattcccgcctctgcctgctccctttgcttgccctaggtccgcagatctccccgctccccgcccttgttttagtgggttacttccctctggccccgacggcggcgacatctgggtcccttctagtcctcaggacccgccctctggacacaccccctccacgtggagtcctgaaagtcccgcccccccccccccaaccaatacgcatgcttcctattggcgggcggggcggtggaggcggggaaactccaggccgccactcccctgactccggcccggccccgccccgtccttcaggctcctctgtggcctctgtcctggggcgctgggtcgtctggcggggacccaggagttccaggtgcccgacgaggtgctggggctcatctacgcgcagacggtggtctgggtggggagttttttctgccctttactgcccctgcttaacacggtcaagttcctgctgcttttctacctgaagaaggtaaggggtaggggggacccttgggtctgaggcaggaggtattggggcccgcactcctgggtcaagggcaaggaagatcctgggggcctggattactcggtcctgagagaggagggggttggaggacagactactgcatctgagaggaggggtctagggcattctgacttatatgtctgaggatctggggactcagactccggggtcctagatgaggaaggggctcagactcctggttcggaaaaaaggagaggcaggtaggccgggtgcagtggctcacgcctgtaatcccagcacttcgggagactaaggcgggtggatcacctgaggtcaggagtttgagaccagcctggctaacatggcaaaaccccgtctctactaaaaatacaaaaaaaattagccgggcttagtggcaggcgcctgtaatcccagctactcaggaggctgaggcaggggaattgcttgaaccagggaggtgaaggtcgaagtgagccaagatcgtgccactgcactccagcctgggcgacagagcgagactccgtctcaaaaagagaaaacaaacaaacaacaacaacagcaaaacaaattagccgggagtggtggtgcacacctgtaatcccagctactcgggaggctgagacacgagaatagcttgaacccgggaggggaggctgcagtgagagccactgcactccagcctgggcgacagagcgagactctgtctcaaaaaaaaaagcctgggcgacagagcgagactctgtctcaaaaaaaaaaaaaaaaaaaatggaggcacagactcttgtgtttcagagcccttttctccgtgccttcccccaccagcttaccctcttctccacctgctccccggctgcccgcaccttccgggcctccgcggcgaatttctttttccccttggtccttctcctgggtctggccatctccagcgttcccctgctttacagcatcttcctgtaagtgcgagaggctcccgcctctctccctccctctctccccattcagtgttcagactcctggcactatgtgagcccagcctgtcttgacttcaggatcccgccttctaagctttgtggtccattccgggggcagtcgtccatctgggcccagatccctgagtctatttccagcctccctgagaccacccagaatttcctcttcttcctggggacccaggcttttgctgtgccccttctgctgatctccaggtgagacggcccagacttctgggtctgggtttgaatgcgtgtgatctgggggccaccacctgcgtccaagagaggagaggcttgggcgtgggagcaggcaacgtactgagtctgagggaggaggcctaggctcctggactgctgggtccgaaggaggaggtgggcgggacgtaggactcctggatctgaaggcggaggggctgggagactgaactccttgagcccagacgaggaggggcttaggcgtccacatccctggcttcgaaggagccagacgtttggatataatggaagagcgtgtcaggagtggcttccgttcctgtctccttcagcatcctgatggcgtacactgtggctctggctaactcctacggacgcctcatctctgagctcaaacgtcagagacagacggtgagccaggcgggtccctgagagggcccctggggaacatggaaaggggttggggaagaggattgtctcacctccacctctctttgccccaggaggcgcagaataaagtcttcctggcacggcgcgctgtggcgctgacctccaccaaaccggctctttgacccccgcagcccacgtcccgctttcagaccccaggcccattgtaagcctaggtcacaacatctgtaaactaggagaactggagaagactccacgcccttccagctttggtatctggagatttccagggcccctcgccgccacgtcctgactctcgggtgatcttccttgtatcaataaatacagccgaggttgctgagcgcgctttgaaa

SEQ ID NO: 860 - DNA, 5360 bp, Homo sapiens
gtccacgtgcggctgcgccagcgcatcatcttgtacgaattaaaggtgcgattagggagcggggtctgcaactgggtagggaccagacaggaccgggctgagataacgcacagggcctaactcggtgatggggcctccggagagatgctaagcagctccttctccaagaaaggcaggtcctggggaatgagaaggttgagaggaggccgagatagggctccccgagctccaagcgtgtaggaaaaggatgcgccagggctgggatcggtggctaatgcttgtaaccccagcactttgggagcccgagacaggtggatcgcttcagtctaggagttcgagaccagcctgggcaacataggggggctccctctctcccaaaaaaaaaaaaaaaaagtttgtttttttttaagtaagcacaagaagcgggcggggcctaaggcaatttggttcaaagttaagtgatgggagcggccagcagggcgtcttgatacagctgaactggaacttcaggccaggaataaagcgcagggccacctgggggcggactctgatgggcagggctgaccaggggcgggtcttgggatgctgggcggactcaggggcggggcctggggtgctgagattgaccgcggagggatgggggcttgggttgctggatccggccgcgaaggggcggggctgtaaagggccgctggtttcctggagcaggtggaaccaggactgcagaggttgttagcgggtggggagacggctgcatcagttcacgttaaggaggatctctggagagccagacctggggaaccgggaggcccgcgccttgggaaatggagtccaagcgggcatctctcctgccttcaggtggagctggaggagacagtggtgcggcgccaggctgcggtgcggacgctgggccagcaagccagggtttggttggtgcgggtgctgctcaacctgctggtggtcgcgctcctgggggcagccttctatggcgtctactgggctacggggtgcaccgtggagctgcaggtgcggacggtcttggaagaggaagccagggggtcctggaacctacatttccaacggtggagggaggggacggaagtttgggatgccagagatcttagagaggaagtatgggagagggtatgttcggaccctggacttagggattttaaaggaaaaagagaggctgggcgcggtggcttacacctgtaatcccagcactttgggaggctgaggcgggcggatcacgatgtcaggagttccagaccagcctgaccaacatggtgaaaaacagtctctactaaaaatacaaaaattagacgggcgtggtggtgggcgcctgtaatcccagctactcaggaggctgaggcaggagaatcacttgaacccgggaggcagaggttgcagcgagccgagatcgcaccgctgcattctaggctgggtaacagagcgagactctgtctcaaaaaaaaaaaaaaagaagaagaagaagaagaggccggggggaggaccttaagcttggctcctccaggaccccaagcctctactcatggtccatcccgctcccaggagatgccccttgtccaggagttgccactgctgaagcttggggtgaattaccttccgtccatcttcatcgctggggtcaattttgtgctgccgcccgtgttcaagctcattgctccactggagggctacactcggagtcgccagatcgtttttatcctgctcaggttccagcctcacggggatggctgggaatgatgaagggtgggggcggtcagagggatgttggcgctgacaggtaagacacggaaatcctgctgataccgaatccagggattcaaatcctgactctgttggccaggtgcagtggctcacacctgtaatcccagcactttgggaggccgaggctgaggtcaggagttcgagaccagcctgacaaacatgatgaaaccccgtctgtagtaaaaatacgaatattagcccggcggtagtggcttctgtagtcccagctactcgggaggctgaggcaggagaatggctcgagcctgggaggtggaggttgcagtgagctgagatcgcgccactgcactccagtccgggtgacagagtgagaccctgtctcaaaaaaaaaaaaaaaaaaagaaagaaagaaagaaagaaatcctgattctgtcactgggcctcagcttcatctgtgagatgggttgaatgcgggcgcgttccactgagaagggaactgccacatggtgggtaccgggtcagggcccattctctgccttccccccttcaggaccgtgtttcttcgcctcgcctccctggtggtcctgctcttctctctctggaatcagatcacttgtgggggcgactccgaggctgaggactgcaaaacctgtggctacaattacaaacaacttccggtgagaacggcatgggtgtgcgtgggactcttgggtccctgaaggaaagatggagctgggtgggtccagactcttggtttgggcggagaggggagcttggggtgctggaacactctcccaagggtatgaaagtttgaaaaacgaggacccccagagaaagtattgacagggtctcataggcttgcgatgtggagactcggacgcgtgggcctccaggtgcccgggtcccgagttctttctgatatatttcttccttcttcagtgctgggagactgtcctgggccaggaaatgtacaaacttctgctctttgatctgctgactgtcttggcagtcgcgctgctcatccagtttcctagaaagtgagagccccgccccttgctgtggccccgcccctctaggacgaggccgtgccccatcgcgctgttcttttcaccgcgcacctttttaccattcccgcctctgcctgctccctttgcttgccctaggtccgcagatctccccgctccccgcccttgttttagtgggttacttccctctggccccgacggcggcgacatctgggtcccttctagtcctcaggacccgccctctggacacaccccctccacgtggagtcctgaaagtcccgcccccccccccccaccaccaatacgcatgcttcctattggcgggcggggcggtggaggcgtggaaatccaggccgccactcccctgactccggcccgccccgccccgtccttcaggctcctctgtggcctctgtcctggggcgctgggtcgtctggcggggacccaagagttccaggtgcccgacgaggtgctggggctcatctacgcgcagacggtggtctgggtggggagttttttctgccctttactgcccctgcttaacacggtcaagttcctgctgcttttctacctgaagaaggtaaggggtaggggggacccttgggtctgaggcaggaggtattggggcccgcactcctgggtcaagggcaaggaagatcctgggggcctggattactcggtcctgagagaggagggggttggaggacagactactgcatctgagaggaggggtctagggcattctgacttatatgtctgaggatctggggactcagactccggggtcctagatgaggaaggggctcagactcctggttcggaaaaaaggagaggcaggtaggccgggtgcagtcgtcacgcctgtaatcccagcacttcgggagactaaggcgggtggatcacctgaggtcaggagtttgagaccagcctggctaacatggcaaaaccccgtctctactaaaaatacaaaaaaaattagccgggcttagtggcaggcgcctgtaatcccagctactcaggaggctgaggcaggggaattgcttgaaccagggaggtgaaggtcgaagtgagccaagatcgtgccactgcactccagcctgggcgacagagcgagactccgtctcaaaaagagaaaacaaacaaacaacaacaacagcaaaacaaattagccgggagtggtggtgcacacctgtaatcccagctactcgggaggctgagacacgagaatagcttgaacccgggaggggaggctgcagtgagagccactgcactccagcctgggcgacagagcgagactctgtctcaaaaaaaaaagcctgggcgacagagcgagactctgtctcaaaaaaaaaaaaaaaaaaaaatggaggcacagactcttgtgtttcagagcccttttctccgtgccttcccccaccagcttaccctcttctccacctgctccccggctgcccgcaccttccgggcctccgcggcgaatttctttttccccttggtccttctcctgggtctggccatctccagcgttcccctgctttacagcatcttcctgtaagtgcgagaggctcccgcctctctccctccctctctccccattcagtgttcagactcctggcactatgtgagcccagcctgtcttgacttcaggatcccgccttctaagctgtgtggtccattccgggggcagtcgtccatctgggcccagatccctgagtctatttccagcctccctgagaccacccagaatttcctcttcttcctggggacccaggcttttgctgtgccccttctgctgatctccaggtgagacggcccagacttctgggtctgggtttgaatgcgtgtgatctgggggccaccacctgcgtccaagagaggagaggcttgggcgtgggagcaggcaacgtactgagtctgagggaggaggcctaggctcctggactgctgggtccgaaggaggaggtgggcgggacgtaggactcctggatctgaaggcggaggggctgggagactgaactccttgagcccagacgaggaggggcttaggcgtccacatccctggcttcgaaggagccagacgtttggatataatggaagagcgtgtcaggagtggcttccgttcctgtctccttcagcatcctgatggcgtacactgtggctctggctaactcctacggacgcctcatctctgagctcaaacgtcagagagagacggtgagccaggcgggtccctgagagggcccctggggaacatggaaaggggttggggaagaggattgtctcacctccacctctctttgccccaggaggcgcagaataaagtcttcctggcacggcgcgctgtggcgctgacctccaccaaaccggctctttgacccccgcagcccacgtcccgctttcagaccccaggcccattgtaagcctaggtcacaacatctgtaaactaggagaactggagaagactccacgcccttccagctttggtatctggagatttccagggcccctcgccgccacgtccctgactctcgggtgatcttccttgtatcaataaatacagccgaggttgctgagcgcgctttgaaa

SEQ ID NO: 861 - DNA, 2811 bp, Homo sapiens
gttcaccttgtcatcaaaagccagaaccgacctcagggccagtccacgcagcctagcaatgccgcgggaactaacactacctcggcgtcgactcccaggagtaactccacacctatttccacaaatagcaacccgtttgggttggggagcctgggaggacttgcaggccttagcagcctgggcttgagctcgaccaacttctctgagctccagagccagatgcagcagcagcttatggccagccctgagatgatgatccaaataatggaaaatccctttgttcagagcatgctttcgaatcccgatctgatgaggcagctcattatggctaatccacagatgcagcaattgattcagagaaacccagaaatcagtcacctgctcaacaacccagacataatgaggcagacactcgaaattgccaggaatccagccatgatgcaagagatgatgagaaatcaagacctggctcttagcaatctagaaagcatcccaggtggctataatgctttacggcgcatgtacactgacattcaagagccgatgctgaatgccgcacaagagcagtttgggggtaatccatttgcctccgtggggagtagttcctcctctggggaaggtacgcagccttcccgcacagaaaatcgcgatccactacccaatccatgggcaccaccgccagctacccagagttctgcaactaccagcacgaccacaagcactggtagtgggtctggcaatagttccagcaatgctactgggaacaccgttgctgccgctaattatgtcgccagcatctttagtaccccaggcatgcagagcctgctgcaacagataactgaaaacccccagctgattcagaatatgctgtcggcgccctacatgagaagcatgatgcagtcgctgagccagaatccagatttggctgcacagatgatgctgaatagcccgctgtttactgcaaatcctcagctgcaggagcagatgcggccacagctcccagccttcctgcagcagatgcagaatccagacacactatcagccatgtcaaacccaagagcaatgcaggctttaatgcagatccagcaggggctacagacattagccactgaagcacctggcctgattccgagcttcactccaggtgtgggggtgggggtgctgggaaccgctataggccctgtaggcccagtcacccccataggccccataggccctatagtcccttttacccccataggccccattgggcccataggacccactggccctgcagccccccctggctccaccggctctggtggccccacggggcctactgtgtccagcgctgcacctagtgaaaccacgagtcctacatcagaatctggacccaaccagcagttcattcagcaaatggtgcaggccctggctggagcaaatgctccacagctgccgaatccagaagtcagatttcagcaacaactggaacagctcaacgcaatggggttcttaaaccgtgaagcaaacttgcaggccctaatagcaacaggaggcgacatcaatgcagccattgaaaggctgctgggctcccagccatcgtaatcacatttctgtacctggaaaaaaaatgtatcttatttttgataatggctcttaaatctttaaacacacacacaaaatcgttctttactttcattttgattcttttaaatctgtctagttgtaagtctaatatgatgcattttaagatggagtccctccctcctacttccctcactccctttctcctttgcttatttttcctaccttcccttcctcttgtctccccactccctccctctttgtttccttccttccttatttcctttagtttccttccttagccgttttgagtggtgggaatcaatgctgtttcactcaaaagtgttgcatgcaaacacttctctttattctgcatttattgtgatttttggaaacaggtatcaaccttcacagttgggtgaacaagtgttgtcctacagatgtccaatttatttgcatttttaaacattagcctatgatagtaatttaatgtagaatgaagatattaaaaacagaagcaaattatttgaagctctctaatttgtggtacgatattgcttattgtgactttggcatgtatttttgctagcaaaatgctgtaagatttataccattgatcttttttgctatatttgtatacagtacagtaagcacaattggcactgtacatctaaaaatattacagtagaatctgagtgtaatatgtgtaaccaaaatgagaaagaatacaagaaatgtttctggagctagttatgtctcacaattttgtagaatcttacagcatctttgataaacttctcagtgaaaatgttggctaggcaagttcagttaaaatatagtagaaatgtttatcctggtatctctaagtatacatttaattgtacagaaaatttacagtgtaacattgtgtcaacatttgcagattgactgtatatgaccttaatctttgtgcagcctgaaggatcagtgtagtaatgccaggaaagtgctttttacctaagacttccttctcagcttctcccataaagagaccctaatatgcattttgatttgtaattggaaatgtaactttcactgaaagtgtcatgtgatgtttgcattacttttaactgctatgtataaaggaaagtgtgtcttttgacttcatcagttatttctcttgtgcacagagaaaaatgcattaaaaatgactaaaaaaataaaaaataaaaaatggataaatcttttctttttgcctttttgccctag

SEQ ID NO: 862 - DNA, 4723 bp, Homo sapiens
gggatctgttcgattcaggctttcacccttttactgccttacagattgctaatatacattctccattggtcttttaatgtcgtttacagaagctgactctctaccgcctccttctctccgtctcaccctctctgcctcgcctgctctgtactgttctgttctcttctctctctccctttgtttctctctctcccttttttcttttcagtgcagaagtttttaattttgaccgagccaaatctatcaatctaggcctggcgccgcgtcagcagagggggcggggaggcgagcgcggaactgggggaggggaaggggcggggatcagcaggcggagcggctgccagagttgctgggagtgcgcgcggtcggatcacaaggcggcggcggaggaggcccagagaccggagcgcggagacctcagccagcggcctacgcccaggcctttctccaccggaggaccagggaaccgcagtcttcatcacagaggtaccgtgctccgcgctccccgcctgacccggcccagcccgctgcggcggtgcctccttccttcctccttccctcgcgctctctctttcgcccgcccgcgccttccctgcccgcctgcgtcaccgcggccgccatggctgagaatggcgagagcagcggccccccgcgcccctcccgcggccctgctgcggcccaaggctcggctgctgccccggctgagcctaaaatcatcaaagtcacggtgaagactcccaaagagaaagaggagttcgcggtgcccgagaacagctcggttcagcagtttaaggaagcgatttcgaaacgcttcaaatcccaaaccgatcagctagtgctgatttttgccggaaaaatcttaaaagatcaagataccttgatccagcatggcatccatgatgggctgactgttcaccttgtcatcaaaagccagaaccgacctcagggccagtccacgcagcctagcaatgccgcgggaactaacactacctcggcgtcgactcccaggagtaactccacacctatttccacaaatagcaacccgtttgggttggggagcctgggaggacttgcaggccttagcagcctgggcttgagctcgaccaacttctctgagctccagagccagatgcagcagcagcttatggccagccctgagatgatgatccaaataatggaaaatccctttgttcagagcatgctttcgaatcccgatctgatgaggcagctcattatggctaatccacagatgcagcaattgattcagagaaacccagaaatcagtcacctgctcaacaacccagacataatgaggcagacactcgaaattgccaggaatccagccatgatgcaagagatgatgagaaatcaagacctggctcttagcaatctagaaagcatcccaggtggctataatgctttacggcgcatgtacactgacattcaagagccgatgctgaatgccgcacaagagcagtttgggggtaatccatttgcctccgtggggagtagttcctcctctggggaaggtacgcagccttcccgcacagaaaatcgcgatccactacccaatccatgggcaccaccgccagctacccagagttctgcaactaccagcacgaccacaagcactggtagtgggtctggcaatagttccagcaatgctactgggaacaccgttgctgccgctaattatgtcgccagcatctttagtaccccaggcatgcagagcctgctgcaacagataactgaaaacccccagctgattcagaatatgctgtcggcgccctacatgagaagcatgatgcagtcgctgagccagaatccagatttggctgcacagatgatgctgaatagcccgctgtttactgcaaatcctcagctgcaggagcagatgcggccacagctcccagccttcctgcagcagatgcagaatccagacacactatcagccatgtcaaacccaagagcaatgcaggctttaatgcagatccagcaggggctacagacattagccactgaagcacctggcctgattccgagcttcactccaggtgtgggggtgggggtgctgggaaccgctataggccctgtaggcccagtcacccccataggccccataggccctatagtcccttttacccccataggccccattgggcccataggacccactggccctgcagccccccctggctccaccggctctggtggccccacggggcctactgtgtccagcgctgcacctagtgaaaccacgagtcctacatcagaatctggacccaaccagcagttcattcagcaaatggtgcaggccctggctggagcaaatgctccacagctgccgaatccagaagtcagatttcagcaacaactggaacagctcaacgcaatggggttcttaaaccgtgaagcaaacttgcaggccctaatagcaacaggaggcgacatcaatgcagccattgaaaggctgctgggctcccagccatcgtaatcacatttctgtacctggaaaaaaaatgtatcttatttttgataatggctcttaaatctttaaacacacacacaaaatcgttctttactttcattttgattcttttaaatctgtctagttgtaagtctaatatgatgcattttaagatggagtccctccctcctacttccctcactccctttctcctttgcttatttttcctaccttcccttcctcttgtctccccactccctccctctttgtttccttccttccttatttcctttagtttccttccttagccgttttgagtggtgggaatcaatgctgtttcactcaaaagtgttgcatgcaaacacttctctttattctgcatttattgtgatttttggaaacaggtatcaaccttcacagttgggtgaacaagtgttgtcctacagatgtccaatttatttgcatttttaaacattagcctatgatagtaatttaatgtagaatgaagatattaaaaacagaagcaaattatttgaagctctctaatttgtggtacgatattgcttattgtgactttggcatgtatttttgctagcaaaatgctgtaagatttataccattgatcttttttgctatatttgtatacagtacagtaagcacaattggcactgtacatctaaaaatattacagtagaatctgagtgtaatatgtgtaaccaaaatgagaaagaatacaagaaatgtttctggagctagttatgtctcacaattttgtagaatcttacagcatctttgataaacttctcagtgaaaatgttggctaggcaagttcagttaaaatatagtagaaatgtttatcctggtatctctaagtatacatttaattgtacagaaaatttacagtgtaacattgtgtcaacatttgcagattgactgtatatgaccttaatctttgtgcagcctgaaggatcagtgtagtaatgccaggaaagtgctttttacctaagacttccttctcagcttctcccataaagagaccctaatatgcattttgatttgtaattggaaatgtaactttcactgaaagtgtcatgtgatgtttgcattacttttaactgctatgtataaaggaaagtgtgtcttttgacttcatcagttatttctcttgtgcacagagaaaaatgcattaaaaatgactaaaaaaaataaaaaattaaaaaatggataaatcttttctttttgccttttggccctaggatcgtgtttaggaggattatcccaccccgagattatataaatcttatcctatatttctctaacttatatggttttatttagaaaatgttttgtcctgtctggaattatcttgatgtatggatttaggtattctaacttttttgccccaaagggttagccagttgttaacatatttaccttttcccccaacatatgaaatgtcatacatgtatatactttattctgtgtttggattccctttagttccattgaacattgtggcaccagtacaccagcctgtagatgagttagaaatgggactttgtatcttttaatgtgagacctcctcttgatcttttttattttttacaatattctgacgattctgacatgtttattttaccagatgaattttacagttaatagattcttcccccaaaaatatattgagaatttggttgggattctcttaaattgatatgactgtgaggactacagaattgcattgctttccagaaacatgttgccttgtttctgaaaaactttatatatccttcaagagagttttacttaaatcctatataatttgtaataaatatgttcctaggtaatacagacatacagggaacacgttgatactgcttattggagcttttaatatgttacctatgtggtcatttttgctatataggagaagaatttatttgcatcgattattttaaattggcaatttattgaaatctattaattttagagatattcatttgatccttttgagtttttccaggtgagaaatcctatcaattatgttataattatatgttttccttttcaaaatttataacataatttctgactgcatgggttaaacattttcataacagtgctaaataataaaggtggcaggggcatttttgtcttgtttctcattttagccagaatgtgtttgctacagcaattccaaattgtgttttgtgaaaaaaaaatattcttctgggagacaaggaaatacatttgcaa

SEQ ID NO: 863 - DNA, 4045 bp, Homo sapiens
cggcccaaggctcggctgctgccccggctgagcctaaaatcatcaaagtcacggtgaagactcccaaagagaaagaggagttcgcggtgcccgagaacagctcggttcagcagtttaaggaagcgatttcgaaacgcttcaaatcccaaaccgatcagctagtgctgatttttgccggaaaaatcttaaaagatcaagataccttgatccagcatggcatccatgatgggctgactgttcaccttgtcatcaaaagccagaaccgacctcagggccagtccacgcagcctagcaatgccgcgggaactaacactacctcggcgtcgactcccaggagtaactccacacctatttccacaaatagcaacccgtttgggttggggagcctgggaggacttgcaggccttagcagcctgggcttgagctcgaccaacttctctgagctccagagccagatgcagcagcagcttatggccagccctgagatgatgatccaaataatggaaaatccctttgttcagagcatgctttcgaatcccgatctgatgaggcagctcattatggctaatccacagatgcagcaattgattcagagaaacccagaaatcagtcacctgctcaacaacccagacataatgaggcagacactcgaaattgccaggaatccagccatgatgcaagagatgatgagaaatcaagacctggctcttagcaatctagaaagcatcccaggtggctataatgctttacggcgcatgtacactgacattcaagagccgatgctgaatgccgcacaagagcagtttgggggtaatccatttgcctccgtggggagtagttcctcctctggggaaggtacgcagccttcccgcacagaaaatcgcgatccactacccaatccatgggcaccaccgccagctacccagagttctgcaactaccagcacgaccacaagcactggtagtgggtctggcaatagttccagcaatgctactgggaacaccgttgctgccgctaattatgtcgccagcatctttagtaccccaggcatgcagagcctgctgcaacagataactgaaaacccccagctgattcagaatatgctgtcggcgccctacatgagaagcatgatgcagtcgctgagccagaatccagatttggctgcacagatgatgctgaatagcccgctgtttactgcaaatcctcagctgcaggagcagatgcggccacagctcccagccttcctgcagcagatgcagaatccagacacactatcagccatgtcaaacccaagagcaatgcaggctttaatgcagatccagcaggggctacagacattagccactgaagcacctggcctgattccgagcttcactccaggtgtgggggtgggggtgctgggaaccgctataggccctgtaggcccagtcacccccataggccccataggccctatagtcccttttacccccataggccccattgggcccataggacccactggccctgcagccccccctggctccaccggctctggtggccccacggggcctactgtgtccagcgctgcacctagtgaaaccacgagtcctacatcagaatctggacccaaccagcagttcattcagcaaatggtgcaggccctggctggagcaaatgctccacagctgccgaatccagaagtcagatttcagcaacaactggaacagctcaacgcaatggggttcttaaaccgtgaagcaaacttgcaggccctaatagcaacaggaggcgacatcaatgcagccattgaaaggctgctgggctcccagccatcgtaatcacatttctgtacctggaaaaaaaatgtatcttatttttgataatggctcttaaatctttaaacacacacacaaaatcgttctttactttcattttgattcttttaaatctgtctagttgtaagtctaatatgatgcattttaagatggagtccctccctcctacttccctcactccctttctcctttgcttatttttcctaccttcccttcctcttgtctccccactccctccctctttgtttccttccttccttatttcctttagtttccttccttagccgttttgagtggtgggaatcaatgctgtttcactcaaaagtgttgcatgcaaacacttctctttattctgcatttattgtgatttttggaaacaggtatcaaccttcacagttgggtgaacaagtgttgtcctacagatgtccaatttatttgcatttttaaacattagcctatgatagtaatttaatgtagaatgaagatattaaaaacagaagcaaattatttgaagctctctaatttgtggtacgatattgcttattgtgactttggcatgtatttttgctagcaaaatgctgtaagatttataccattgatcttttttgctatatttgtatacagtacagtaagcacaattggcactgtacatctaaaaatattacagtagaatctgagtgtaatatgtgtaaccaaaatgagaaagaatacaagaaatgtttctggagctagttatgtctcacaattttgtagaatcttacagcatctttgataaacttctcagtgaaaatgttggctaggcaagttcagttaaaatatagtagaaatgtttatcctggtatctctaagtatacatttaattgtacagaaaatttacagtgtaacattgtgtcaacatttgcagattgactgtatatgaccttaatctttgtgcagcctgaaggatcagtgtagtaatgccaggaaagtgctttttacctaagacttccttctcagcttctcccataaagagaccctaatatgcattttgatttgtaattggaaatgtaactttcactgaaagtgtcatgtgatgtttgcattacttttaactgctatgtataaaggaaagtgtgtcttttgacttcatcagttatttctcttgtgcacagagaaaaatgcattaaaaatgactaaaaaaaataaaaaattaaaaaatggataatcttttctttttgcttttggcctaggatcgtgttaggaggattatcccacccgacgataatataaatcttatcctatatttctctaacttatattgttttatttagaaaatgttttgtcctgtctggaattatcttgatgtatggatttaggtattctaacttttttgccccaaagggttagccagttgttaacatatttaccttttcccccaacatatgaaatgtcatacatgtatatactttattctgtgtttggattccctttagttccattgaacattgtggcaccagtacaccagcctgtagatgagttagaaatgggactttgtatcttttaatgtgagacctcctcttgatcttttttattttttacaatattctgacgattctgacatgtttattttaccagatgaattttacagttaatagattcttcccccaaaaatatattgagaatttggttgggattctcttaaattgatatgactgtgaggactacagaattgcattgctttccagaaacatgttgccttgtttctgaaaaactttatatatccttcaagagagttttacttaaatcctatataatttgtaataaatatgttcctaggtaatacagacatacagggaacacgttgatactgcttattggagcttttaatatgttacctatgtggtcatttttgctatataggagaagaatttatttgcatcgattattttaaattggcaatttattgaaatctattaattttagagatattcatttgatccttttgagtttttccaggtgagaaatcctatcaattatgttataattatatgttttccttttcaaaatttataacataatttctgactgcatgggttaaacattttcataacagtgctaaataataaaggtggcagtggcatttttgtcttgtttctcattttagccagaatgtgtttgctacagcaattccaaattgtgttttgtgaaaaaaaaatattcttctgggagacaaggaaatacatttgcaa

SEQ ID NO: 864 - DNA, 27968 bp, Homo sapiens
caggagaacctcatgctttccatcctgcccaagcacgtggctgacgagatgctgaaagacatgaagaaagacgagagccagaaggaccagcagcagttcaacaccatgtacatgtaccgtcacgagaacgtcaggtacgccggcccggggcgcgggctctgatggcagagcaggctgtggagggctgcatctttgtgggacccgctaggtgctgtgggcttcaagaggttttccagggactagaagcaaggcctcccacagcattcatcagcctggcggaggaagctgccagcagatgttgaagctacagtgtgctctaggctgcttggtccaaccccatcatagaacagatatcacctggagcggggaagggactcctgtgaggtcacccagctgttgagggccagcactggggctagagccctgacctgtgattctaggaagaaggatgagttcagcctgggcaggagtgggcagtgtggggtggtccccaggcaccacagggagggaggcctgcaggggaagtctgctaggacaagtgcaaggtcagagccctgactttacctggaagggtcagggtctcactgtctgggggtcgtgagggaggaccttctcctgccctgatcctggctgccctgtgggttggagagggagctggcagtggggtcgggtacacctggctgcctggagcgtcacccccacggttccttcctcatgcagcatcctctttgccgacatcgtgggctttacccagctgtcttctgcctgcagtgcccaggagcttgtgaagctgctcaacgagctctttgcccgctttgacaagctggcagctgtaagtccctggccccgcctggctctccagcggggcctgccctcatggcctctgcctggcccccatccccggccccatgattttctcccactgtccttcctctgctttcttggccactcctccctcactgaggaggggctggagcacaggccaggccctcccctttcagaaataccaccagctgcggattaagatcctgggcgactgctactactgcatctgcggcttgcccgactaccgggaggaccacgccgtctgctccatcctcatggggctggccatggtggaggccatctcgtaagtgggatgcctctgggagggaggctcccagagcaagggccccggccctggacccagggagaagcaggtcttccgcgctggccatggcccctgggtgggggatctgctggaagcagagactgggacacagcactggttgatgggtggcgcaggctcccgctctagaagctgggatgtggcttaccttcctcacagcccaggggacctgcgaggctcccccagcctgtggggcacacttttccagccttagtccacgtattctctttttgccagaagttgcagttgtgaattttctcacgcctcctcacacttgctgggacccccacaggggctccccatctctcctcagtgttttctcaccgtgacccccgaaggcactgccctctccatctcgtgatgcagtgactgtaagaccctggcagaggggctcagggatgaggctggatcccaccccggcctctgtgctccagccttaggctgtgagggaggcaaactctcctgccctcactgtcccctactcttgcccctgctccaagtgggcttgcagctctcggatgggcagtccctctggttgacttccagcctctgcgggacccggggtgacatcaggcaccaacacggaaagggaagctcctgccgaggcccctcccccatgggatggagtccaggaagttgcctgctctttacccccttctccgagggggcggctttgcatttttaccatcttccaggttaaagcccgtctagtattgccctggaaagaaagcagtgtggcctttaccccaggggtggtagtccaggaactctaacattctctccctgccctgtcagacacgttcaggcagggggctgttcacggctattttcttcacctctgtgtctgcagcaccttgaacgtgcctggcacatacttgatgctcagtgaaatattaactgcacgaatgaataaaagagtaattggcagagagaaactgaggcccctcgggaagtggggatagggaggaaagtcgcttggtgccctcgtcctgctggcctgtgatgcctgactctgggctggccctggcctgccttaccccccacccaacaccaagctgtggggaccttgccaggccccctcttgtggaggggaagaggcccacaatgaatttctcctgcaggagcaggggcagctggctgcctcgtgaaggccacaccctgaccctcctttctgtgtgtacctggcaggtatgtgcgggagaagaccaagactggggtggacatgcgtgtgggggtgcacacgggcaccgtgctggggggcgtcctgggccagaagcgctggcagtacgacgtgtggtcgactgatgtcactgtagccaacaagatggaggccggcggcatccctgggtgagtgccattccaagggggcaggtttgaggactggggaggggaccgtcccctccatcccccagggctgtgaccctgatgagggacagggggcctcagagaaggcctccctacaaccccggaacagcattcctcctgtctcgccctggtcctggccctggctaaggccgttctgacctgccttggggtgaggcctctttgggcctgatattggatgtggcttttccttcctggaccctgcagtagcctgtcctcctgtcccctttaccgacttagggggctgcctcccctttacccactaagggggctgccccagctctccttatgtcagagcccaggtctccccaaagggagagtaatgagcagtcatcagctagcgggctcgcaggcagcgttttgcaggtcgcagtgcgattacacgccttacttgagctcccttacaggataatggaggccctgcctttagcagggcgaggctgagggaggatcagcccagccttccccatctgggccagggagcttccttcagtggcatttaggattcttggcctcagtggtgactcctcagaaacaggttttattatctcttggcagcaggggttgcaactgagaaacgtgcaaggtgggggataattggatcttgtggctcacgcctgtaatcccagcactttgggaggccgaggtgggtagatcacctgaggtcaagagtttgagaccagcctgaccaacatgacgaaaccccatctctactaaaaatacagaattagtcgggtgtggtggtgtgcacctgtaattccagctactctggaggctgaggcaggagaattgcttgaacccgggaggcagaggttgcactgagccaagatcaagccactgcactccatcctgggcgacagaacaagactctgtctcaaaaaaaaaaaaaaaaaaattccttatcgcatttgatctgctttacagcggatcaaagattgaagaaagattgtactcctgtgtcgtggctccaacactgaggctgagatgggagtaagtgccatacggcccacacagctagttagcggcccacacagctagttagcggcccacacagctagttagtggcagaactgcctccacttggcctctgccccacatgcccgagagacacggggccgagcagcagccggtgcagccgtggtccgtggactgtcccctgggggtgtgagggccacctctggccgacgctcagggcctctctctctgcaatccaggcgcgtgcacatctcccagagcaccatggactgcctgaaaggggagtttgatgtggagccaggcgatgggggcagccgctgtgattacctagaagagaagggtattgaaacctacctcatcattgcctccaagccagaggtgaagaaaacagccacccagaatggcctcaatggctcggtgagttccccaccccaccccacccaccccacccaccccacccctggattagggggttggaaaggaggagattaaggaaagattgcagaagaggtggcaggacccagcagtggctggctgtgagaggtgagtggcaggctggcacccttcccaagggagagctggtttctgggggagatggtgagtgtaattcatggcaggttgcaatggaggtgactgaagcatatcccaagaccacatccaggagggggccgctggagatgtgtcggtggcgcccaggagagcagctgggttggggctcagggtctcctgcatggaggaagtgagtgaagccacaggagtgacgtggatgctcagggagaggctcagagaggagggtgggggtggggtgactggtcatgggggaggaggaccaaggccaggaaggtttcctgagtgggaaatgagggaggaatgagatagaagtaatagagcaggggtgtctaatctttcggcttccctgggccacattggaagaagaagaattgtctcgggccaaacaaaaaatactgtgggttgaacaagcttgcaatcgtgcatcctgtgggcctgccctctggtctttttgtgggatcccccgaatatctacagacctgaagcactcagcagcttccccaggtctgtccaccaacccccaaacacctcctgtcagtctgattagaaaccaccagcagctgttgcagaaatggatccctttaccatcccctgctgaatctggaggttgtcttattttttgtaatctcatgtcaaaaccctttcctccagttatgagagtccatctaacaagacttggaattaaggagcttggtgactgtcagggaagtcgtgtcatttgagactgctctatggctgaggctttgcctaattatggctaaagcaaagcccactctggtgaggctgccggagtgaaggctgatactccccgctgattctaacctcgatgtcagtctcatccagtgtcattttaaaggctgtctctgacaactcccaaatttgtatctccacccccagtgtcttccctgcactcaacatacagccacttgtacgtctccatttgtacatataataggtatcttaaatgccacctgcccaaagctcctgccctccttcccactccataacctgctctccctcggtcttcccatctcagttaatggcagttccatccttttattaacaactgctcagaccaaaaagtttgaaatcatccttgacgcctcactttgcaatccacaagcaagttctgtggcctcagattgctctctaatcccaccgcctcccacgcccttgtcacttccagacctgtccacgccactctcatcccatgcccagatcatggctgagctctcctttcctctaggccctgcccaatggagcaccagcttcctcaaagtccagctcccctgccctcattgagaccaaggagcccaacgggagtgcccacagcagtgggtccacgtcggagaagcccgaggagcaggatgcccaggtatgtgcagggctcagggcagggggtcactgagggccagatgcgggcaggcaccaggaagcaatacgttcctgcagcaggagtcctgtgctggggagacctggccaccacccaggacctgctcctgcttagcactgtaaccatggacaggtcacccctccagccccgcaaaaccccactgtctcctcatcagttacatgccggggtgagtaaggtcaaaagaggtgcttagctcggaggcctttgtagctctgatggcccggaatcctgtagatttgagatcagtgaggacatccatggaaaattatataggatctgagaccattttggaagtgagatatcagacctggactcacccctctggctaggttcaagccccacaagttccatgcaagatgggatatttccttagcccccaaaggcgaggaattagcatgctgtcccagagtgcagggtgcctcttggggagcacccagaactggtccctgaccgcagggcgtctggagcacgttcactgatggaggtcagtgctgcagagatgggatgtctgccctgctcgggctcaccgcgtgagggggacaggagagctggccctggtgccattagagcagatgccgtagaacaagagggtagatggggctcagggtaaattaggtttttcttgagtcccccaacattcagtaacttttccttgttgcagttttcttgatagaaagtgggggtccagactcagggcactcactagcaaggaggacacagatgcagctttagcagcctgatttttcgggccctgaccctcagccagggccacgctgctcccggatctgcttcaggaacaggttcccgctgctgccacagaccatccacgtgattttacagaaggggaagatgtggctggggaaacattatctggggtcaaactgtcaaccagtggcacacctgtgcctgtgcttaagaccagggagtcttttttttttttttttgagatggagtcacgctgtcacccaggctggagtgcagtggcgcgatcttggctcactgcaacctctgcctcccgggtgcaagagattctcctgcctcagcctcccaagtagctgtgattacaggcgtgtaccaccatgcctggctaatttttgtatttttagtaaagatggagtttcactatgttggccagtctggtctcaaactcctgacctcaagtgatccacccacctcagcctcccagagtgctgggatgacaggcgtgagtcaccgtgcccggccccagggagtcgtgactgtggctcccagatgcactgttgaacccgttcagacagctctcagcccgtctcagtgactattcagactgatggctgtgtcatcacagccaggattcctgtttttggagttgatgctttttctttggaactgggaataaaagggtagtgggtgccccagctccacctacccgccccttgtcagccctctagtgatgaggacattcttctctctcccatcactttccccctcagatcttcctttccaaatgagccagatgtgagttcctttaacagttccctgaagccctagagttgggagccattcatgtccccaggctgccaatgtatatggcccccacatcaatacagcaggaagtgccaggactgcctcagcccagcagctgtctccgattacaggtctcctgctcaggagccaggggctgctccctacaatgctgtcattagcggaccctccctgcagagctctgggtggggggcccggggagccaggaaagactggagctttgggtgtagatccaggccacatggagccacgtgggagcatggggaagacttcccggaaagggattttagagctggagggattggtcctccgagtatgccctcttttgttcctttcctcctccacctctgtctttcccagctcttccccaccactctgtcccatctgccccactcacgctgcctccctggctcacaggccgacaacccctcattccccaacccacgccggaggctgcgcctgcaggacctggctgaccgagtggtggatgcctctgaagatgagcacgagctcaaccagctgctcaacgaggccctgcttgagcgagagtccgcccaagtgtaagcgccacccggaagcgtccaggcccaccactcctcccgggccctgacaagggattcaggaaactgagcatcccaaatacggcccccctgctaggccaaggcagatgtggcatttgggattcatggggcttgttcccactgcagagtaaagaagagaaacaccttcctcttgtccatgcggttcatggaccccgagatggaaacccgctactcggtggagaaggagaagcagagtggggctgccttcagctgctcctgcgtcgtcctgctctgcacggccctggtcgagatactcatcgacccctggtgagggaggggccggggagggccacgagtttcctcggctgcggtggtgccgggcggggggcgggggcaggtgtctcagcgggagcctgacattggggagcaagccagtctctgctccctgacccccactgggacggcccccacaggccccaggagtgctagacggcaccctgggcatccttccttttccctgccccgcgttttggagcagtcctagcgtcagaatggggatctggccaggatcaagagagctgagggacagaggcctccagaaggctggagaccttggctagatgggcccacactgattcttgggacaaagatggggacactgcgtcagtctcagtcaccaaggctgacctggcccctctcttggctcatcttggtaaagatagattttaggctgtgggcacagactgacgccctctctaacgcagcagtaggtcctccagggcaaggtgtggcctcctggagtccccagctggtgaagccctgtctgagggtgacgaccactctcttgttctccctttctcccctcggccaatcggggattccccgtcacagaggaggggtctggaaccctgctgggattacagtttgtcaggagccttgggctgggtcacactatctaaggttgcgggtgtgtgaccacgtgcaggccactgcaggctccggcagcatctgtttcctcatctgtgaaatgaggagaacaacccctgccctagcggacactcacgactgtggtgaggctcaaattcactcattccataagtattgattggttgtctgcttcatgcgtggggatcaagggctggggctatggcagcgatgcggcacacagaaacccctgctctcgtgaaacttgggttctggtaggggaagctacaggcaaaagcaattaaacaattaaaatatgcatccatgcgagagtaagtactgcagacacagggaaggcaaggaagggaggcgggtatgctgctggggagctttgttttgttttgtttgcattttgatgtgggatggtcagagcaggacttgctggcaggataatatttcagtaacgcctggaagcgggtgaggggcgagccttctcctatctgggggacacctgcttcggatagaggtgctgaggctggagtggcctggcccctggaggcacagtgaggaggcatcgcattgggaacgggccacaggaagagtagcaggagtccagcacagacgtggggcctcctacacgccactgcagggtgccagcttccactcttaacacaggaggccgccagaacaagggagcagaggagtcccctgttgtgacatatgcctggagaggctcactcctgctgagaacagcgcttagtgagcacagcgggagcagtgagaccaaatagcggcccagacaagccactgtggtggccaggccaggccgaggatagaggaggatcagtggttggattccgtcgatagatgctgaatgtattttggagacagagctgacaggatttgctggcagattggttgtggggcgtgagtgtggagttgaggatgtctcctgggcttctgatctgagcaactggcaggacgggggtgccgttaaccaagatggggacaaggtggaaagatgagagtggagaggcaaagatcaggagtttgctttgggacacgtgaagtttgcagtgcccacaagccaaggaggccagcatccatgatctggagtttggagggcgggtggggttggagacgtgaacctggcatcaccagcatgcaggctgtgctgcaacacgagacttgctgagctcaaggcagcgtgtccagatgcagagacagaaaaggactcaagaaaccaagcgagaaaagtgtctcaaggaggggtgagaggtgactgaaaatgggacatggatttagctaccaggaggcttctggggctcttggcaaggacaccttccagggaggggttaaacgggaatgggtgtgagcagagggtatagagaacaggtttccgggagttgtcaggttaaggtggatgtgttgagtgtgtccactgtgaagctgggggtggctgtcacaggcagactcttagcccccggcagcgagggagtgatgctgctccgtgctctgtcctttcagcacagcgacatggcaggggtgcattcctaagatccctgcccaagtttatcctgggctgtgcccaggccacctgtgagttgttccctctctgggaaatgtcccaggcagcagctgcagctggagagtggcccgctcccaggccggcactcagctggcggcccgtctcatcagggcctttgtcctgttctgcacggcaggcagcagcaattccctggcaccgcgtggagctgtacaggctcgtgctgtgctgagaggcctccccgtcccctgcccccggctcctgtcccctgccccctgcccccttcccccggtccttgtctgctggcccctgcccccggtccctgtctgctggcccctgcccccgcccctgcccccagtccctgtccgctgccccctgcccctgcccctgtctgctgtcccctggccactgtccgctgtcccctggcccctgtccgctgtcccctgccccctggcccctgtccactgtcccctgccccctgtccgctgtcccctggcccctgcccccatccccgtcccttcctctcctagcccctcaccccatctcactgtcccctctggcctctcccaattgtcttctctctgtcacaggctaatgacaaactatgtgaccttcatggtgggggagattctgctcctcatcctgaccatctgctccctggctgccatctttccccgggtaagaggcacttttctactgagctcagaagcctctggaagtgagtggcactccctgtaaaactgggcagtgatggagttattctttctgtcaaatctgacaggcagacactcctctgttaggacggtccaggcacttgcccatccattcattcaccatcagcagagcactccctctggctgggccaccaggctgtggcaggctgtggtgggccacggctgggccgtggtgggccttgttgggccgtggcgctgcagcacgtatgagtacggcagagtctgggtaaacaagaacctgggtagagaggaagtggagggccggctggaaggtgggttggccccgatggtgaaggcccttagaagccagactaaagggattaaaactttctcctgtaaggcactgaggtaccaagcagagttttttttttttttaatcagaatgacaaaggtaaagcagtgtttaggaacataaatctgacaggtggctcgccaggtcacttggagccaggataggcaggagtagctggccagagacgagcagccctgaaaactgttcctgccctggcctcacctcgtcaccacgtctgctgtggaaagggctgcgacctggaggctgtgctgttgaacaggcacatcgaggaggtccaacacagcgtcagaactcccacgccctcttctcagctctgccccttggtcagctgtcaggtgactcccaggcagagtccgttttgaggctcctgggactggaatacgggaccagcctgagttgctgtcagtcacgtcgcaggagaaaggactggcaaaggctcatggcccttgaaattctgttccttctaggcctttcctaagaagcttgtggccttctcaacttggattgaccggacccgctgggccaggaacacctgggccatgctcgccatcttcatcctggtgatggcaaatgtcgtggacatggtgagctcctgctgtccttgttgaagggacgcccctgttctcagtggagaagggcttctgtttgggtcacacaagcagtttctcagtccatccctccaccgtcatgtagctttggagtggctcttaggttcccaaacacatcatccccacctagtggaaggagtcttgtccctgtcatccagggagcctctgggatggacttgtttccttgaagctcctctcccagagtccgagagcacagttccatgtgcccaggcctgtgctaggtaccttatgtatgttgattcatttaatctgtgaaaaagtcctgagcagttgtaccagtatctgcagtttcatagggagaaactaactctcaaaaagggtaattggttgggcgcggtacgtcacgcctgtaatcccagcactttgggaggccaaggtgggcggatcacgaggtcaggagttcgaaaccagcctggccaacatggtgaaaccccatctgtactaaaaatacaaaaattagccaggcatggtggtgcacacctgtaatcccagctacttgggaggctgaagcaggagaatcgcttgaacccaggaggcggaggttgcagtgagccgagattgagccgctgcactccagcctaggcgacagcaagactccgtctcaaaaaaaaaaaaaaaaggtaattcacttgctctaggtcacacagccaggaagtgacagagtccagaatggaggcagttctaagtcccagtcctgtgtattcttcctccctgagggggcagccaaatgctttcttggggaaaagggacaggagttgggagcccagatctattggtttagaaccactgggcacgtattgagcactacatgcctggagctgtcatcagtgttctcttgtcagttgtcacggcctcctctaattgtggtagtaccatatacactatcttccttttttttcaaatataatgttattgttgtactttaacaattggagcacacggtgccgggcgcagtggctcacgcctgtaatcccagcactttgggaggccaaggcgggcggatcacgaggtcaggagatcgaaatcatcctggctaacacagttgaaaccccgtctctactaaaaatacaaaaaaattagccgggcgtggtggcaggcgcctgtagtcccagctactcaggaggctgaggcaggagaatggcgtgaacccgggaggtggagcttgcagtgagccgagattgtgcactgcactccagcctggcaacagagtgagactttgtctcaaaaaaaaaaaaaaaaaaaaaaaaaaaattggagcacacaaatacaaccaacatggagacttattctgccagtggtataagtgaaaaagctccagggctgcagctaatcagaagtccagtggggggccgggcgcggtggctcacacttgtaattccagcactttgggaggctgaggcaggcagatcacttgaggtcaggagtttgagaccagcctggccaagatggtgaaaccccgtctctactaaaaatacaaaaattagccagccacaatggcacgagcctgtaattccagctacttgggcagctgaggcaggagaatcgcttgaacctgggaggtggaggttgcagtgagccaagaatgcaccactgcacgccagtctgggcgacagagcgagactccatctcaaaaaaaaaaaagaaaaaaaagaataagtctactgggaatgaggagttaggggctccagagcctaccttggccaggggttgctggtgcccactacccagggaagagaagccccaggccccctgcatgtcacaacatgcctggaacctggcacccaggtgtggaggtcaccactgcatggggtcctggacactgtacaggacacctggagatgctgtcactcatggaggggtaaaaagctagggaggtgtaacaactgctcatgctagaatgacatggcgggaatcgcgcaagcaagacaaggttgccctgtgggtgaaagttacaaaaagggggggttgattccggttctggatgcgctttctcccggccgcatctgcccagtagcagaaccagtaaagaatccagaaggcagtgaacatccccccaatggaaggatttgggcagagactagctgtcatcacggggaggctgtgagtggggctcatggtcccgtggcccctcctgaagcaacagtgtgatatggggaagaacatgttggatttgaagcctaaagacttggctcctacttttggcttttctgcttgctaattgtgtttgggcaaatctggcccgagttttctgtacaatagggacagtactaaaaatactcgagagagtttttgtgaatgtcaaatgaggcaacggcgaggctcttagctgcagttactaactttcatatgattagtccctggtaaatttccccatctttcccggtatttctgggggagccgcgggaggtggcagctgagcgtgcactaccatgcacagccctctgtgaccagcacctgctgttctcttgaacgtgtgtccctgcccgccgtcctggcctccagctcagctgtctccagtactacacgggacccagcaatgcaacggcagggatggaaacggagggcagctgcctggagaaccccaagtattacaactatgtggccgtgctgtccctcatcgccaccatcatgctggtgcaggtcagccacatggtgaagctcacgctcatgctgctcgtcgcaggcgccgtggccaccatcaacctctatgcctggcgtcccgtctttgatgaatacgaccacaagcgttttcgggagcacgagtaagatgaagcgtgactggggatctgtattgtctccttcctcccgcccgcaaagtcctcagttcaagctcatgggcctgtgctgaggtggctttctgccactaggggtcctcaaaggcttgttcaagaaccagttcctggctgctcacagacgtatcactgtttggctaggacctgagaatagattcttcccattctccccgagtggaggacttgggataccccggtgcctggctgggcatcaggctcttgttcccagatggggcctgactgtgctgttatctgtccaacagcttacctatggtggccttagagcagatgcaaggattcaaccctgggctcaatggcactgacaggtaagggccacggcttcccctcctggcctgcactcacagcccttcttctagagacaggaatataacaggcccaagccccgggatctcaccctcccgggaggcacgtgacctgatacgtgcaggttagagaagctggcatgggttcctccaggagggctgcagcagtgcagtgaggagggaaggaaataccaggtggatggcagctgcatgtaactggctggcaggacagacaggcagcaggaaaatgaggagggaggaagacgctttggatttggacctggcttctgagcctgcagcaggcagtaattctctgtgggtcacaggcaggtccgtttccatgagttgcaatttcatctcttgaggaggatactgaaccagaagttctctaaggtccctgccagtgccaaggttttaaaattttatgattccatgacttgaacagaccttcaaggaagtttagaaataaaaagatgacctaatagaagaggggtaaaacctgcatagcccttagcaaaagaagaactctaaatggccactaataaatggcactcaagtaatcaaggaaatgccagttacaccctagtgagataccatcacacacgtaccggtccagataactctgacaatatcaagtacaatagtaactcttacactcctggtgggagtatgagttagtacaaccgtgttagaaaatattttgatctatttagtaaggttgaaaataaacctgtgtcccagcaattccactcctacatacacacccacgcagacgtgtgtatatgtgtatatatatatatacacacatcttagagaaattcatgcacatactcatgtcccaggatatatgtatgagaatgtccaaagtggcactgttcgtaatagacataccccctcccccaaaacaaatgaaaacaacccaaatgacatcaacaggaaatggatacataactggtatattcatgcagtgaaataccatacggtaatggaaactaaccacagctccacataaaaatatgtatgaacaaggtaaaaagccatggtgagattgtaccccagtcccatggctatgaaatcccatcactgatgtctcttgcttctccaaattcctgcatggttgtagctacctctgtgatcagtcaggcaatgcagtgtttcttaaatacctggggagcagccctgatgtgaataccaggtgcagccaggaggggccaggggttgcctggctgttggagaggagcccagtgagttaagaaaattttactgcccgggggagcccgacttgatgtgaaagggcctaaggagccggggtgagctctagggctggggtggcaggaagcagcaccatctagttggagggaatcaggccccctccaggaggcagatgacagccctttcagttgcacacgctctgcccagcaggctgcccctggtgccttccaagtactctatgacggtgatggtgttcctcatgatgctcagcttctactacttctcccgccacgtgagtgccgcctgcacgatccccgctctgtgcccacagcccacagcgctcctgagaagcagccctgggacctaagagcccaagctcctaaggaatggggcttcccttcacccagccccacacgtgagcctggtcaggccaccgccttctctattcaggctccttcctcagtcacacaggaagacagttcctcacctcttccgtccgaccccctccaggatggtgaaggaagcatgggagtgaaggtgggaggggatagagtgaaggcacaaacatcttgaatcaaatcaatatcccctaggccaggggctcatggcccccgcactccccgtggcgctgagggacattaacacaactgaccacagagccagaagagaaagagaagggagctgatggactttctgttgggttaaaaggaaaagagaaggccggtgcagtggctcattttgggaggctgagggtggaggatcacttgagtccaggagtctgagaccagcctgggcaatatggtgaaaccctgtctctactaaaaaatacaaaaattagccaggcatggtggcccgcacctgtaatcccagctacttgagaggctgaggcaggaggattgcttgaatctaggaggttgaggctgtagtaagctgagatcacaccactgcactccagcctgggtgacaaagtgagacaccccccccgcaccccccccccccccgccacaaccaccgcactcaaccggacaaaaaaggaaaagagaaggaagagagggaagagaaagatcctctgtacttagggcccaatgttagttcaagtgccccctactggctttccagggaagtacagccttcccaagccacttcttacccaaatggcgcctgctagaaagggggactccaccctgagttgggagatccccactgctgccacctccacgagacagacctgcagctgaaattaggtcccaagaggccccctacacacggaaggcctcctggatctctgctgtaattacggaggctgggaaccgcaccactattgggtggccttttgatgaggtgcaatctttgcagggtcttacttcccttgccatttagccatcttccttccagcctttccaaggggagttcctccattcacgttcctgtttttcttctttttttgagactgagtctcactcttttgcccaggctggagtgcagtggtgcgatctcggctcactgcaacctctgcctcctgggttcaagttgattctcctgcctcagcctcccgagtagctgggattacaggtgcccgccaccatgcccggctaatttttgtatttttagtagagacagggtttcaccatgttggtcaggctggtctcgaactcctgacctcaggtgatccgcctgcctcggcctcccaaagtgctgggattacaggcatgaaccgccacgcctggccattcctgtttttcatccttctatccagtggccagcttagagcacatgcctcgccttgtctgtgtctgtaggtagaaaaactggcacggacacttttcttgtggaagattgaggtccacgaccagaaggaacgtgtctatgagatgcgacgctggaacgaggccttggtcaccaacatgttgcctgagcacgtggcacgccatttcctggggtccaagaagagagatgaggtgaggggtgtggtctcagcccggaaccatgaggccatttgtctccatctgttctttctttcaggcagcccccgctgggcccaggccttctcagggacaggggactggggcctaggtagggctgaacctaaacagcaaacacaaataagcaaaagaggaatttctccggcctcttataaagtgcactgctgtaggcatcgtgatgtgggccgtacagctctgaggccatgtgtcagaagacaagactttggctagagcccacctttctgttgcctgtgaacttctccaaacagagtggttcccagctctacggtaccctcgtcttcacagctggggctgttagaggaactagagaagctgttttaaaatttattcaaagtagtggccgggcacagtggctcatgcctgtaatcccggcactttgggaggccgaggcgggtggatcatctgaggtcaggagtttgagaccagcctgggcaacaaatagtgaaaccctgtctctactaaaaaatacaaaaattaactggacgcggtggtgcacacctgtcgtcccagctactcgggaaactgagacaggagactcacttgaacccgggaggtggaggttgcagtgagctgagattgtgccactcaactccagcctgggtgacacagcaagactccatctctcaaaaaaaaaaaaaaaaagtagcgatgagctatttttaaattattcagagttggaataatctacagccgggcatggtgacatgtgtctgtggtcccagatacctggtgttcaaggccgcagtgtgcttcgatcatacctaattgtgcttgtttactgccactgcactccagcctgggaaacacagcaagacccactcttaaaaaaaaaaaaaaaaatgctggaataatctgactgatgtgtgagtccaaaaagctgagtgcacatgtcatgcatggaagatagatgcatttctccaacacatcatccagtcagtcggacatgctttgagcacgttgtccgcacctctttttaggagctgtatagccagacgtatgatgagattggagtcatgtttgcctccctgcccaactttgctgacttctacacagaggagagcatcaacaatggtggtattgagtgtctgcgtttcctcaatgaaatcatctcagattttgactctgtgagtgcccatcccaccctgcactctggccatgaagccggcccattccacatcacatcctacaataggctgcagaggccagagaaactggcttcattttcccagataagccccttccgcaatacatggacttctgcagccacctggaactgctgggctggggaaggggaggtgaggtgggagcccgggaaatcacccacagggtcacaggataaggataaggactggccaagcaacatctcgagacctctctgtcctgggactgtctcctcaaattcagagccggtcagcattgactgggtgacctgtataccagggagaatgcttttacacacgcgcggagcccccctaggagactgccgattttatgtcagtgttgaggttgtggaaacaggcccagaaagttaggaagttctcccaggatcatgtggcagataagcggtagactaagtaacaactttgataggaaagtgtctcttgggtttagtggggtccttgtaaacaggtacatctgtcactgggttgggtcattcctctcccttgactgctgacaattctttcctgaatcctggcctcagctcctggacaatcccaagttccgggtgatcaccaagatcaaaaccattggcagcacgtatatggcggcttcaggagtcacccccgatgtcaacaccaatggctttgccagctccaacaaggtagctaaccccagtagccagagagatgaggctctgcccccaaggcaagagattggcagcccagacctagcatgggggaaataagaactgctgtgcaaagtggtcccagacacacaccaccagcaccacgtaaatataaataagaaatagggtttattgagaaagttcggcaagcagagaaacagaacagacacacaaccccctgctgttcacagctcaggcctaagatggttgtgttctgtggccaggccccctaaggctctgtgctttcataggaactggagagcaattgtcaacaagggaaactgaaagcatggccttcagaactctggctgacggcagcctgttcttttgttaagctaatttagacctttgttcagctaccaggagagaaaattaggtgtaggagccctggtcccaagctctggtcttaaaacaccatcatcctgctttacctctacaaccatcccacggccctattatatggatgaggttaaagaaacacgtccaaggcgggtcatccccctccagtgcttatcacctagttgagggatccaaacaaggacaacctgacaaaacctaaggaccaggaccaggcccagccaaggtgaaggggtccgcctcgtggtcagactcacaggtccgtctcctctgctcaattgcccagtctttgcctagacctgctacgtgaactttgtcacagtggcaagtcagagctagcgtggctgcgactcctttgtgggaggaaaagtaaggccttgaacatctaggtgtagggaatccacccccagaacactgccagggaaggcagcagagcaggctgctgcagtgagcggcccctgacactttctccacggtcccctggcacaggaagacaagtccgagagagagcgctggcagcacctggctgacctggccgacttcgcgctggccatgaaggatacgctcaccaacatcaacaaccagtccttcaataacttcatgctgcgcataggtgagcacccccagctggcctgccccgcagcaggctcccttcccatgcaggggcctggcccaccaccaggagagacatgaggctcaggacaactgaggcaattcgggtggggaggttcacgcactcacagggcaaggagacctgaaagacctttagtccagacgactctagatgactaaaccaaaaacccagctgatgtgatgatccgactatactgtgcctactgttacaatagaagcttggcctgcctggctgagaagtgagtttgtgatccatttccagaggggttgctgtgcctgctgaggacatggcttcccagacaggcctgctctttgaaaggagttaagatcacctgctgcttctactgagggggtatcattcctgagtgaggtcccaggagacttgaaataccagctgtgttagaagctggccactaccatgccgagtaaatctgcatatggggggggggtggcggctgacacctaacaagcacacggataaacaggagatgtgatttccaccctccaatagcatacagccaagttgaatgaggacaatgatgtgttacattaggagctttgtggtacaggtctggagaggagatggcttctgaggcccataacaaggtgtggcctgtggctgtgctgaactttatgcctctaccctaggcatgaacaaaggcggggttctggctggggtcatcggagcccggaaaccacactacgacatctggggcaatacagtcaatgtagccagcaggatggagtccacgggggtcatgggcaacattcaggtatgtccagtggcacagctggcacgtgctcagactcggcatgagaacaaaaccggaacagtgctttcccacgtgcccctgcctcccaccctggccctgaacagtaagtccagaggcagagacgtggggcaagtggaaaagaatctctgcaatagctagcctcagcacaggaagaaacacttccacccatccacaaaatctgggctgaagttctagatgcatatggcctacctttgggtatgaaccttctaataccttgtgatctgtctcagtggcgtctggcagaaaagctccacgaaaggggcaaagggacagaagagcaggcagtggcagtttccaggtaacagtgctgccacccaggtgaccatggccatcctaggagagaagtctctggatgagaggaggcccccagccagtcactccagggttctccttcccacccgctgctcgccacgggtggaagggcttggccctgggaggtttggggagtgtcccgtactgcttgggacccatggatcagtgctcggctccaaccacccaaagcccccacccgccctcagtctaggctccccccgtaacgccacgttcttgctccccctccctctccaggtggtagaagaaacccaagtcatcctccgagagtacggcttccgctttgtgaggcgaggccccatctttgtgaaggggaagggggagctgctgaccttcttcttgaaggggcgggataagctagccaccttccccaatggcccctctgtcacactgccccaccaggtggtggacaactcctgaatggcctcgagcctgcaacagtccaaaccggaagggagaatttattttttgaaactgaaggaagtcccgaccttcctggattgaagtgcacactcatggactttaggtttagaaacctcctcagccttcatttgttcgtggatgtgtgagctctgagggtggccctgctattcctgtgtgtgcctgtagtgtccccagcataggggtcttaggcatagggctgaacagtccttccagagccctcgttccaatccctgccgtccttgcccctgaggggccctgaccactgtgagcaggagggtggcagagctgggacaaagctgcctttgccgctgggctttccgggactgtggagggagcacaggcggggaagctccacttcagacagggcttggtggggcaggacatggctcccattttgaagggaggtctccatgtggtccgagtgaggtgagacggccctcgtcctggtgttcctgatcatcttgaaaggttcttctggaactcctgtccccttagtcatgagaacagaaagtgcaatatttcctttcacctggcaggggaggggggatttatttctgaaagaaaaatatataaacagatcttctacatttatatttttaatcttctgttaaatacactttccgatattgccttgccttttgagctcttgctacagtcgcctttgctactgctttaagagaatttacaggtattgataaagaacaagactgttttattaaaagctttattcaacttgaaagtgattgtggaaattctgttaatatcacttatctgaggagtgctggtactttgctgactcatgccactggtccccaccacaggcctggaaggcaagagcttgaaggtctcatcatagctcactgtaccccggaacgcctgctgcctggccctgtctcttttattcttaaactttcttctaaagggtactccaagctggctttaatcccctgcactgttcctggagctctcccacacggaggttacttcgtggccattgcagggttaagtctgaacgtggccttgggccagtcatgactcctatctgtgcctgggcaagggagggctacaggagaacctggtcagccagacacaggttttcatatctgtgagtgacccacacgccaaggaaccagaggtgccagcaggtcagaggcccgtggttacggcaaatcaggacactaaccggagagcctgcaggagagggaagacccggggggcgcctgagtccccctgagttaatgggcagatttctaactaactaactgtgctttttcagaggggacttcctagtacattcacagctctactaaacttttaggaaacaaaatatgagacacactgaactctgattattttatcctactgctttctcacaccatatttataaagcagtggcctagaatacactgcgcctaaccaaacaaacactgaagaacttccttttcaaaagtttcaaacaggaaaatgaggaaaaattacttaaagctttcataaaagctaaaaatactttccttttaaaaaaaaaaaaatattgggtcttccttattatcttcattagtgaatgtgggttatttttccatttatttagatcagtgtttctcaacagaatcaagctattgcagtttgagtggagtgctacatttctgtgagagccctttctgaaaattttaggatttttggcatctctattcctggcattaaattagtagcagttactgtgacaacttaattgcctggtctttcccagagttaatgccctcaataatttgatatttttccataagtacttcttgagtgatacacctttttcaaaaaatggcttttattgccccacaaatgattttcaactaaaatgtatgatcaactaatacctttaaaaaacatcttgagcattttaagaagggaccaggtgatcatgggaattgttcaaaaatgccagtgtctatactcaaacctgctcttccatccagatgaacaggtaggtgtctgttttcatcagaagggtgatgtacccttcatcagacagtactacccacctggtactgtcttcagtactggttacttacctctgatgtgctcccagtgcagtgaaaacaatctattaggagaccagactcatatccaacttttctccttttcttgtaaatgaggcaaacacttgatgcaagggcttcgtacagaacagagtttcatgagatgctcgttgctcctcccatgaagtggataatacttccactcctaaaaagaaagattccatcaatctcattcagtgcagctgggggaatcggagcctggatcactgatattcaatctcattcagtgcagctgggggaatcggagcctggatcactgacattcaatctcactcagtgcagctgggggaatcggaacctggatcactgatattctggacccactggacccatacagcttttttttttggtctggactaaggctgccccttactggaccaatgcaatctagagactggggactggaatctaactgcgcagagaaatcaaagaccgatggtgtgaaatctggggcagcttcaaaatttctgcctcctaaaaacatttcacccaatttttcattattgcccatgtcacatttaactgaaacaggttcaccaaaaaatctctctctcagccagtctggaaggatttccatttagagactgctccgtagggaggagtaagtgtgtgctgacgtgtcatgtccatttgtcttcacagtgaaatgagtcttctggctccatccaccataactgacccatgactcagccttatcattaggtgtctttcctgaagcagggcccccagtgaaaacaaatcataggctgcgagaacactgctgaggtgggtgggcaaaggagaagggaaaatggggacaatcatgtttaccatttacaaagaggaaggaaaagactggtagaaacaagaatgttctatcttaccggtctgagtaatgtacagtatataaacagagaaagtgtctcaagaggtctacttcatggattctacctattttccctgtttcactcaaataaactgggatatgagaatttctgcactgaggcacccttcttaccttgacatgtcacggtgacgtcagtgggaagagttgctgtgaggtccttatacagcaatctagcacagaacgggaaggactgaccccctggatccagtttgtaagtaaatgacagcaagttacacagtgggtttctctgcaagggcccagtcaggagggctgcaaagtcactctaagaggggtgaggaacaaaacgaagtagaggatgactgcagttccaaaggtggtgtttactgacccttcaattacgtcaaccaaaaagaggcccatcgattacatttcagagaaataaatgagggacagaaaaaggtctgaaaaaaggactaatgaaaaagatgcctaagataactaagagtcactggcagcctggaaaggcctataggcctaaatggccaggggtacagcttcgcaagagactgtttctgcagaaacttcactgacgttacacggctaagatgcttcatgactgcatccacatttcaatttaagttaaatctacagctgagagcttcagagttactccaaatccatagagggggaaatgctaagcttgtaggaggcacttacagcctatttgcattaatttcctatctacttttttcacccaaccttagctcaactgcaacccaaaaaggtaggctagagtttaggggaagatggacagcattgttccatggcactgcagaaacctttcttctctaatgagatctatacccaaggttcagcaaggcactcggtatggtacatagtaggcacgccataaatccctgatggatcaaaagtatagcaactgcactctgtacaatcttacgataaaagcttgaagaccaccattcaggggtgcataatcctttaaccagtacccaggcttcaacgccatccagagtttcaaaagaaaagagggtgggatagtgcttttatataaataagaaacaagcatcggaaaggtaacggtcaaacttctaactcacagttaggaaacactgaaaatacaaaaaacatcccccttttaagttgatcttgggcccacggatgaggcatataacatcccagagagatacctgaagccggtctgcctggtacttcctcccagagtaagcattcaggtactcgcagagactgaacaggaagtgctggatgttggtctgtaaatattttgcagctatctcttccaggggaatgaagactgggactgaatggtgatgtatccggagtggtttctgtatgacaaggtccacaaaataggaatccaataggttcccctcaaaagcagtactgatgcagacacaaactcctcggctggtcagtttaccactgaggcctgaggcaaacaagaagacacctcaatagacagcaggccaaggtgatgtcttactcatctgtgcctccagtagcttccacagtgcctagaatatgtacactttgtacacaaatgtttgttcaatgagtatcataggctcattcttccccttggctccggctcactttgagactgagttgttaaaaccatggaagaatggtaaaaatgaaaaaacaacctaaatgtcaaactattgagaaatttttttttttttttttttgagatagggtttcactctgtcacccaggctggagtgcggtggcacgatctcagctcactgcaacctcaacttcctgggcttaaatgatcctcccatctcagcctcccaaacagctgggaccacaagcgcatgccacctcacctggctcatttttaaatttttagtagagatgaggtcttgctatgttgcccaggctggtctcgaactcctggactcaagtaatcctgcctcagcctcccaaagtgatgggattacaggcataagcaaggccaaaaatttaatttatagctattctttatttctgagtgtgaagtaatttgtcagagtccccagttcttcccacaactatcttgtggcatagatgggagaataaatccctatttacggtgaaacggagacttggaaagttcaaactatttcactagtggcagaaaacaagccagcagtaaagacagttctagtacaaggtctggcacatgacgaactgttaagatgagtggaataagccagccaccaactgagctgctgtacaaaggggccagtcaatcttgtaggtgaagataggcctacaaatagcacgtcagctgtgtgtgtgtctgtgtgtgtgtgtgtgtgtgagtgatgagggcagagggtgtaaaatactataaattatgaaataattccaggactgataacacatctagcaaactaactcactagaggcagacccagactaaattaggttaaaaaaacaaacaaaacctgtaaaatgatatgcctgcagaatggctttcacattttccaatttctcttccaatgcttcttgctcattgatctcc

SEQ ID NO: 865 - DNA, 545 bp, Homo sapiens
gggctccaaggcttacgctgctagctatggcccagcagaaggtaccaggctgacccgccctctgagaacaactatgcaagctggataaaataccaaaaagaaacaagcaagcaaagagagcaaatggtttgaaggcattccagaaggatccaaatagccaggattggagagtactgacaaatgctctgagctggcttccctgcagcctctggcctcagagcatttccttattcatatgcaaggcacactgggccacatagaaaggcataaactagactccgcagcagtctcatccggaacaaacactggacattaatggtatcaaagcagactttctacgggccaagattccatagaaacaggaactcaacgttctgcttgcaatcttccctcccggcatttgctaattcctaagctgcacaggtgtgactggggactgagaaaccaaacggaaagaagctgctaaaggggaaaaagccaagcagagattttgctagaacaaaatgtggatttcagggcctgccagggaacaggagccttaatag

SEQ ID NO: 866 - DNA, 3350 bp, Homo sapiens
tattaatatgacatttgtcattgtcactgatttttttaaaaaagcaatgcacatgttggttgtggctgttttccgcatgctatcttcatatctaaatgcttcattaattatccgagcctccggagaattaactctattacgtttgtatagtaagtttgtaaactgcttggcaaactgattaagaaataatttgcaataccgtgctactaaagtggcaggtttctggtagaaattgtgcgagtccaatttggagttttaagttccttgattgatgaaactaaaaaggcaattttggaaaaagagagggggaaaagtagatcacttatcttagcaaacggttgaaaatatgtctgtcctctgtggccccaaatccagtgaaagaaattctcccagtaaaagttgcttcctaactctgtttttctcagaatacctcttacctttctcaaagaaagcttcaaccaccatcatcagaaagaaggtggcctaaaaactgacacatggccagtgcccggaggggtctggaggcataagtctagatgcccagagagcatccaggcactgaactgctcagagcttgagatgaaatgacatacaagcttcagggtaaaactgtctactagcaagattacctccctcaattctaccattgcagatttcttctgaccccaaatgcaaccttacagagaatgctgaatgaggaaggccaattccttacaatgatggcagaacccccaagcgaatgccctattgaggagaaggacatcactgtatttggaattctgcctgctagtgatagctcacacatcacatcccagaatcccactcccaatgcattatttcctgaggcaagaacttaaggtcctcacctaattcctccatcacaaccattaactcttattggacaagctcctcctgtgagtagggcctgtactcacttcctcttagatcataattccatcttcaagagactgatttccagaatagtaatctttttccagcgttctctcttctccaatgccctggttgttatttttcccacctctcctaatattgatcttcttgtcttttggttagaactgcaacttcggagttgagttcatttcctattgctgctcaattcagtagcaacatagctggcttgttcccagacccaggaagtataagtcattgacagtttcctgagtggctctgccaatccataccacccttggtactgtgaaaaggcttcttggcagccaggtggcattgaggatggtattcagggcgctttccttctgtcatatagttgtgggatctctaccaagtgtgaaggtgaatgaggtaagggagatcagaaccatgcttcctggtttttcatacatccaaggaagaagtcctggtgtgggttgtttgacaccttctttccactttcaccttttattttttattccttcctttctacccccaaccagtcgagcaaatgagcaattttgtgtttctaatacaggatctggaagtagtgctttctaatcctcatttcctgtaggatgttcctgcactataacaagattatgttttcttccttctgcagcagctttctgcttcttgggtactactagctattgttcaattcaggtgaggcctgtgatgacatatatgtagcatgtgctctgcgctccctgcaagctgagcagatacaaccaatgcatcactgtatactcttgctgagaatgtggatgcagcctcacagatctttgcaacactccaaccagccaggaccagttgatcagaactgatcttattggtctgataaccaatcttatttgtgaactgattcatatctgtctttccactcttggttctcttgccgtagaacaaaaacagtttaggaagcataattacgaacatttaggaaccaatatgtataagtaattcggagactccaattcacctgcccctcccccatcccaggttgtggaggctcgaggaagctgacttcttaggctaaaggacaaaaaaatctctttacctccttggccattttcatgttctctgccaattactataggcagtcttcattttgcagaggtgaggtaagacttcatcttattcttcatgtaatcccaccttctaacaaaaaataaataaatatttaaattccaaggagaagtgttctttgtgtatttctagcagaaaacagatgcttaagcctaagaaggaagatccgtccatgacaaaggaaagtggaaaactgaaccagttatctgaatacttcatgccaggacagttgctattagcaactgttttgcaccttcagggctttaaaatgggctctgcagacagcatttgcatatgcaagactcagtagccaagcctccactgccaattgttgaaggcagtttcagatcgccaccttttgaggtacatttctttaagcacaagagaagtagaaatggcctttgccttgtctccagtggtttgtccctctggtgcctcagcagataccagagcttattcttatgaccatttggaagtagtcctcaaagtaaagatcaagaaaaaattggattctttttccattttctcataatagtagcctagtcaacacaagactcccataaaatatgactcactattgggagccatactattttataagcttacttcctgctgacaaaactagctttcctcaaggaaatataaaggaggggaaagtcacatagtgttaggaaaacattcctgtgttttgaatacgatgaatccataggatagagaaaaatctgcttgttctattctgagagttctctgagatatcccttcactctgcttggcatttggccattgatattcaacaggtcactgaccaagcttttctaaatttttcagagagagttacttaccagtaaggtctgttcttaaacctacctagttgattttcatatctttccataaagtgtcatgattctgtcatagaccctgacttaacattgtaaggactatgagtcctccattttttaattaatttttttttagcaaattaggacttcggcaggttttcctctcctaaactcattctttcctccacaggattgctttgtccatctcctgctttcatttcaagtgcataaacaaaacctcaaagggcctgggaaggtgaggcaggccagagtctgtgttctgtgttgagtgtcaagctatttgttaagaaggtctgcaacaggcctttggtgtgggctctgccagagactgttctgaacactttgcttgagatccgtgccctgtaaaatggatatgatgttttactgatgtctgtaatacatttgtaaacttccaataaaatttgaataaaagaaatgttgccattcttctca

SEQ ID NO: 867 - DNA, 3349 bp, Homo sapiens
tattaatatgacatttgtcattgtcactgatttttttaaaaaagcaatgcacatgttggttgtggctgttttccgcatgctatcttcatatctaaatgcttcattaattatccgagcctccggagaattaactctattacgtttgtatagtaagtttgtaaactgcttggcaaactgattaagaaataatttgcaataccgtgctactaaagtggcaggtttctggtagaaattgtgcgagtccaatttggagttttaagttccttgattgatgaaactaaaaaggcaattttggaaaaagagagggggaaaagtagatcacttatcttagcaaacggttgaaaatatgtctgtcctctgtggccccaaatccagtgaaagaaattctcccagtaaaagttgcttcctaactctgtttttctcagaatacctcttacctttctcaaagaaagcttcaaccaccatcatcagaaagaaggtggcctaaaaactgacacatggccagtgcccggaggggtctggaggcataagtctagatgcccagagagcatccaggcactgaactgctcagagcttgagatgaaatgacatacaagcttcagggtaaaactgtctactagcaagattacctccctcaattctaccattgcagatttcttctgaccccaaatgcaaccttacagagaatgctgaatgaggaaggccaattccttacaatgatggcagaacccccaagcgaatgccctattgaggagaaggacatcactgtatttggaattctgcctgctagtgatagctcacacatcacatcccagaatcccactcccaatgcattatttcctgaggcaagaacttaaggtcctcacctaattcctccatcacaaccattaactcttattggacaagctcctcctgtgagtggggcctgtactcacttcctcttagatcataattccatcttcaagagactgatttccagaatagtaatctttttccagcgttctctcttctccaatgccctggttgttatttttcccacctctcctaatattgatcttcttgtcttttggttagaactgcaacttcggagttgagttcatttcctattgctgctcaattcagtagcaacatagctggcttgttcccagacccaggaagtataagtcattgacagtttcctgagtggctctgccaatccataccacccttggtactgtgaaaaggcttcttggcagccaggtggcattgaggatggtattcagggcgctttccttctgtcatatagttgtgggatctctaccaagtgtgaaggtgaatgaggtaagggagatcagaaccatgcttcctggtttttcatacatccaaggaagaagtcctggtgtgggttgtttgacaccttctttccactttcaccttttattttttattccttcctttctacccccaaccagtcgagcaaatgagcaattttgtgtttctaatacaggatctggaagtagtgctttctaatcctcatttcctgtaggatgttcctgcactataacaagattatgttttcttccttctgcagcagctttctgcttcttgggtactactagctattgttcaattcaggtgaggcctgtgatgacatatatgtggcatgtgctctgcgctccctgcaagctgagcagatacaaccaatgcatcactgtatactcttgctgagaatgtggatgcagcctcacagatctttgcaacactccaaccagccaggaccagttgatcagaactgatcttattggtctgataaccaatcttatttgtgaactgattcatatctgtctttccactcttggttctcttgccgtagaacaaaaacagtttaggaagcataattacgaacatttaggaaccaatatgtataagtaattcggagactccaattcacctgcccctcccccatcccaggttgtggaggctcgaggaagctgacttcttaggctaaaggacaaaaaaatatctttacctccttggccattttcatgttctctgccaattactataggcagtcttcattttgcagaggtgaggtaagacttcatcttattcttcatgtaatcccaccttctaacaaaaaataaataaatatttaaattccaaggagaagtgttctttgtgtatttctagcagaaaacagatgcttaagcctaagaaggaagatccgtccatgacaaaggaaagtggaaaactgaaccagttatctgaatacttcatgccaggacagttgctattagcaactgttttgcaccttcagggctttaaaatgggctctgcagacagcattagcatatgcaagactcagtagccaagcctccactgccaattgttgaaggcagtttcagatcgccacctttgaggtacatttctttaagcacaagagaagtagaaatggcctttgccttgtctccagtggtttgtccctctggtgcctcagcagataccagagcttattcttatgaccatttggaagtagtcctcaaagtaaagatcaagaaaaaattggattctttttccattttctcataatagtagcctagtcaacacaagactcccataaaatatgactcactattgggagccatactattttataagcttacttcctgctgacaaaactagctttcctcaaggaaatataaaggaggggaaagtcacatagtgttaggaaaacattcctgtgttttgaatacgatgaatccataggatagagaaaaatctgcttgttctattctgagagttctctgagatatcccttcactctgcttggcatttggccattgatattcaacaggtcactgaccaagcttttctaaatttttcagagagagttacttaccaataaggtctgttcttaaacctacctagttgattttcatatctttccataaagtgtcatgattctatcatagaccctgacttaacattgtaaggactatgagtcctccattttttaattaatttttttttagcaaattaggacttcggcaggttttcctctcctaaactcattctttcctccacaggattgctttgtccatctcctgctttcatttcaagtgcataaacaaaacctcaaagggcctgggaaggtgaggcaggccagagtctgtgttctgtgttgagtgtcaagctatttgttaagaaggtctgcaacaggcctttggtgtgggctctgccagagactgttctgaacactttgcttgagatccgtgccctgtaaaatggatatgatgttttactgatgtctgtaatacatttgtaaacttccaataaaatttgaataaaagaaatgttgccattcttctca

SEQ ID NO: 868 - DNA, 6438 bp, Homo sapiens
tattaatatgacatttgtcattgtcactgatttttttaaaaaagcaatgcacatgttggttgtggctgttttccgcatgctatcttcatatctaaatgcttcattaattatccgagcctccggagaattaactctattacgtttgtatagtaagtttgtaaactgcttggcaaactgattaagaaataatttgcaataccgtgctactaaagtggcaggtttctggtagaaattgtgcgagtccaatttggagttttaagttccttgattgatgaaactaaaaaggcaattttggaaaaagagagggggaaaagtagatcacttatcttagcaaacggttgaaaatatgtctgtcctctgtggccccaaatccagtgaaagaaattctcccagtaaaagttgcttcctaactctgtttttctcagaatacctcttacctttctcaaagaaagcttcaaccaccatcatcagaaagaaggtggcctaaaactgacacatggccagtgcccggaggggtctggaggcataagtctagatgcccagagagcatccaggcactgaactgctcagagcttgagatgaaatgacatacaagcttcagggtaaaactgtctactagcaagattacctccctcaattctaccattgcagatttcttctgaccccaaatgcaaccttacagagaatgctgaatgaggaaggccaattccttacaatgatggcagaacccccaagcgaatgccctattgaggagaaggacatcactgtatttggaattctgcctgctagtgatagctcacacatcacatcccagaatcccactcccaatgcattatttcctgaggcaagaacttaaggtcctcacctaattcctccatcacaaccattaactcttattggacaagctcctcctgtgagtagggcctgtactcacttcctcttagatcataattccatcttcaagagactgatttccagaatagtaatctttttccagcgttctctcttctccaatgccctggttgttatttttcccacctctcctaatattgatcttcttgtcttttggttagaactgcaacttcggagttgagttcatttcctattgctgctcaattcagtagcaacatagctggcttgttcccagacccaggaagtataagtcattgacagtttcctgagtggctctgccaatccataccacccttggtactgtgaaaaggcttcttggcagccaggtggcattgaggatggtattcagggcgctttccttctgtcatatagttgtgggatctctaccaagtgtgaaggtgaatgaggtaagggagatcagaaccatgcttcctggtttttcatacatccaaggaagaagtcctggtgtgggttgtttgacaccttcttttcccactttcaccttttattttttattccttcctttctacccccaaccagtcgagcaaatgagcaattttgtgtttctaatacaggatctggaagtagtgctttctaatcctcatttcctgtaggatgttcctgcactataacaagattatgttttcttccttctgcagcagctttctgcttcttgggtactactagctattgttcaattcaggtgaggcctgtgatgacatatatgtagcatgtgctctgcgctccctgcaagctgagcagatacattcaatgcatcactgtatactcttgctgagaatgtggatgcagcctcacagatctttgcaacactccaaccagccaggaccagttgatcagaactgatcttattggtctgataaccaatcttatttgtgaactgattcatatctgtctttccactcttggttctcttgccgtagaacaaaaacagtttaggaagcataattacgaacatttaggaaccaatatgtataagtaattcggagactccaattcacctgcccctcccccatcccaggttgtggaggctcgaggaagctgacttcttaggctaaaggacaaaaaaatctctttacctccttggccattttcatgttctctgccaattactataggcagtcttcattttgcagaggtgaggtaagacttcatcttattcttcatgtaatcccaccttctaacaaaaaataaataaatatttaaattccaaggagaagtgttctttgtgtatttctagcagaaaacagatgcttaagcctaagaaggaagatccgtccatgacaaaggaaagtggaaaactgaaccagttatctgaatacttcatgccaggacagttgctattagcaactgttttgcaccttcagggctttaaaatgggctctgcagacagcatttgcatatgcaagactcagtagccaagcctccactgccaattgttgaaggcagtttcagatcgccaccttttgaggtacatttctttaagcacaagagaagtagaaatggcctttgccttgtctccagtggtttgtccctctggtgcctcagcagataccagagcttattcttatgaccatttggaagtagtcctcaaagtaaagatcaagaaaaaattggattctttttccattttctcataatagtagcctagtcaacacaagactcccataaaatatgactcactattgggagccatactattttataagcttacttcctgctgacaaaactagctttcctcaaggaaatataaaggaggggaaagtcacatagtgttaggaaaacattcctgtgttttgaatacgatgaatccataggatagagaaaaatctgcttgttctattctgagagttctctgagatatcccttcactctgcttggcatttggccattgatattcaacaggtcactgaccaagcttttctaaatttttcagagagagttacttaccagtaaggtctgttcttaaacctacctagttgattttcatatctttccataaagtgtcatgattctgtcatagaccctgacttaacattgtaaggactatgagtcctccattttttaattaatttttttttagcaaattaggacttcggcaggttttcctctcctaaactcattctttcctccacaggattgctttgtccatctcctgctttcatttcaagtgcataaacaaaacctcaaagggcctgggaaggtgaggcaggccagagtctgtgttctgtgttgagtgtcaagctatttgttaagaaggtctgcaacaggcctttggtgtgggctctgccagagactgttctgaacactttgcttgagatccgtgccctgtaaaatggatatgatgttttactgatgtctgtaatacatttgtaaacttccaataaaatttgaataaaagaaatgttgccattcttctcagccctccctcactttccagattttaggggtggtctctgcctttgagcatttcaacaaagaaaagaaaggacacaggtatggagggatgagttttactatgaaatattaacctgattgtttaaatcagggtttctaagcctcagcaatattgacgtcttgtgctagttaattctcggttgcagagggctgtcctgtgcattgtaggatgtttagcaacatcgctgacttctactcactagatgccagtagcagcccccagaaactgtgacaactaaaaatgtctcccatcacaaccattaggatggcagttattaaaaataacaacaaatgtgggtgaggatgtggagcaattggaacacttgtacactgttggtgggaatgtaaaatgatgtagtgctgtggaaaacagtatggcagttcctcaaaaaaaattaaaaatagaattactaccatatgctacttctgggctatacccaaaagaattgacagcagggtctccaaagagatacttgtacacccatattcataaaagcagcattcacaatatccaaaaagtgggagcaacccaaatgtccactgatggatgaatgtgtaaacaaggtgtggtgtatacatacaatggaatattattcagccttaaaacggaaggaaattctgacacatgctacaacatggatgaaccttgaggacattttgctaagtgagataagccagtcacaaaaagacaagtgtatgattccatttatctgaggcacctagagtcaaattcatagagacagaatgtagaagagtggttggttgtcagggactgaagggaggagggaatggggagttactatttaatgggtatagagtttcattatggcaagatgaaaagagttctggagacgggttgcagaacaatgcagatgaacttaatactactgaactgtacacttaaaagtggttaagatggtaaattttatattatgtttatttaaccacaattaaaaatgtctccacacattgtcaatgtctccctgttgagaaccactggtttcaatgcattgccttcttagtgtctttgttccttgagaattcttgaaactgattcctacccaggccacacagttaattttcagttattagcaagaattgaaagcagcagatgacccaaaaatatttgtgtttgcttttaagcaaataataagtggtctgtctggagaattacatccatgtctgtgttctggttagggcagcattaacactgactgggagccaggaccaaggcagcatgtaaattcaatttccccgtgtctgatccacaacattagggacttgctggatgctataatatcatctattcattcattcaacaaatatttatcaaaaggctttctctagccaggaaccgttctaggtgcttggaatacaataatgtgcaaaacaaacaaaaatccctaccttaaaggagtttacaaactttactttcaactaggcaagacattcggaatagtaagtagtcttacccaccctagctaatcacaaggacttgggagtggcagacaacaagagttgtttcattgtaagacattctaagagcttttgaataaaaacttgaactggaaatggcaattgtgcctgttctgcttacagacatgccatagagcatggcctgcaggcaaccatggtttttaatatacagcctccctgtttcccctcttcagccaaaatgattgtagtcaggtatagcaccctaccagcaatcttataagcatgataagctggacttatcagattcgctctctcaagaatacaggctgggcacagtggttcatgtctataatcccagcactttgggaggctgaggtgggaggatcacttgaggccaggagttcaagaccagcctgagcaacatagcaagacccgcccccgcccccatcgcctccgtctctatggaaaaagaacaaaaacaaaaaccagtagctggcataatggtgcaaacctgtagtcccaggtactgaggaggctgaagcaggaagataacttgaggccgcaatgacttatgactgtgccactgcactccagtttgggtgacacagtaagagactttgtctctaataagattaaataagattataaaccaagaaattctgagagaatgaggcagctggcagtgggagtggaagctaagagaatgtatggggaggaaccaggaggtggagtccagcacaggagcaacaaggtaagaggaaggatgaggaagcagatgcaacaaataagcaaaagtctaggctgagagcagatctaagagcaaagacaagagatcagaatggacccagaggagctggtcctcaggacttcctcacctccaaacagatcctagttcctgccctggaggtacccctctagggttaccatttgattttggtccttcacatacccctccccactgtgcctatgtattgtgacaatacatacctatgtaacctctttgggctcaagagttccttgcaatcccaattaaaacatatgaaggatcccatatgcactaaatgccagttgtgcaccttttattttggccccatgttcctttaacattttaaatgtcatctcagccacttgctacttgttgatcttgggaaatgtccatatcctctttgagcctcagttcttaatctattaaatgagataataacagaagagtcattattgggttattgtgtggatgtactggaataatacgtgtaaagctcttagtgctacctgtcattataaaagctcaggccgggcgcggtggctcacgcctgtaatcccagcactttgggaggccgaggcgggcggatcacgaggtcaggagatcgagaccatcctggctaacacggtgaaaccccgtctctaataaaaatacaaaaaattagccgggcgtggtggcgggcgcctgtagtcccagctactcgggaggctgaggcaggagaatggcgtgaacccgggaggcggagcttgcagtgagccgagatggtgccactgcactccagcctgggcagcagaacgagactccgtctcaagaagaaaaaaaaaaaaaaaaaaaaaaaaaaaaaaaaaaag

SEQ ID NO: 869 - DNA, 941 bp, Homo sapiens
ttttttctatacaaatttgttacatgtcagtgagacctttttcaaaggaacatattcaatttggctttttgtggctgaaaaaacataactgttagacccaaagcattttatgctccgttccatcttaaggagccatccttaagtctgctcccaccctcagtagaatttattttctacaaagtggtagtaatttttttttaaattgcaaatgtaatttttgccaattagagaaaccaaccggtgtcagtaaaattctgtgagaaatgccatccctgctgggaatgttgaagttacttaatgttgatctatcccttggggaaagtaaaagtgactgtgagtggtgccattgtgtgatgtcagcatgacgttgttttgaatgtggcattatgttctggtgctcatgtttcctggattgtattatctgctttcctttaccaaggcagacagaactgctgccttagcctgacaaccggttgtcctcaaagcaaatgaacttaagcatttgggattgagggacagaaggattctgagggggctctgcgagggacggtgtgtgacatgtcatgcctggagaaggaacaaggctatttgaaaacagaaggcaggtcaagggtagaagttaaaggagaatctgaaggcaggtcagggaaaagaagaactggaaatgaaacagaggacaggtgacaaccacctcgaagagctcccagagattgtagaaagagtccagtgtaaccagcttagtaaccagagtatctggattacccaggaaggttgagctgctgagatttcagtggtgcaatgtctttaaaaaaacaggctttgttgggagggtatttccattttgaactttgaggactgttggtcagaaaatgggctcaaaagtgagtttgcttaatgaagacatttaacggttgtgctgtttatagtaaaataaaactccc

SEQ ID NO: 870 - DNA, 432 bp, Homo sapiens
agcaaataataagtggtctgtctggagaattacatccatgtctgtgttctggttagggcagcattaacactgactgggagccaggaccaaggcagcatgtaaattcaatttccccgtgtctgatccacaacattagggacttgctggatgctataatatcatctattcattcattcaacaaatatttatcaaaagggctttctctagccaggaaccgttctaggtgcttggaatacaataatgtgcaaaacaaacaaaaatccctaccttaaaggagtttacaaactttactttcaactaggcaagacattcggaatagtaagtagtcttacccaccctaactaatcacaaggacttgggagtggcagacaacaagagttgtttcattgtaagacattctaagagcttttgaataaaaacttgaactggaaa

SEQ ID NO: 871 - DNA, 941 bp, Homo sapiens
ttttttctatacaaatttgttacatgtcagtgagacctttttcaaaggaacatattcaatttggctttttgtggctgaaaaaacataactgttagacccaaagcattttatgctccgttccctcttaaggagccatccttaagtctgctcccaccctcagtagaatttattttctacaaagtggtagtaatttttttttaaattgcaaatgtaatttttgccaattagagaaaccaaccggtgtcagtaaaattctgtgagaaatgccatccctgctgggaatgttgaagttacttaatgttgatctatcccttggggaaagtaaaagtgactgtgagtggtgccattgtgtgatgtcagcatgacgttgttttgaatgtggcattatgttctggtgctcatgtttcctggattgtattatctgctttcctttaccaaggcagacagaactgctgccttagcctgacaaccggttgtcctcaaagcaaatgaacttaagcatttgggattgagggacagaaggattctgagggggctctgcgagggacggtgtgtgacatgtcatgcctggagaaggaacaaggctatttgaaaacagaaggcaggtcaagggtagaagttaaaggagaatctgaaggcaggtcagggaaaagaagaactggaaatgaaacagaggacaggtgacaaccacctcgaagagctcccagagattgtagaaagagtccagtgtaaccagcttagtaaccagagtatctggattacccaggaaggttgagctgctgagatttcagtggtgcaatgtctttaaaaaaacaggctttgttgggagggtatttccattttgaactttgaggactgttggtcagaaaatgggctcaaaagtgagtttgcttaatgaagacatttaacggttgtgctgtttatagtaaaataaaactccc

SEQ ID NO: 872 - DNA, 780 bp, Homo sapiens
ctttcaagacaatggatgtggatatggccgaggaacatgccagggcccagatgagggctagatgaatatcggggatgaagcgctgattggacggtggagctgggatgacatacaagtcgagctcctgacctgggatgaggacggagattttggcgatgcctgggccaggatcccctttgctttctgggccagataccatcagtacattctgaatagcaaccgtgccaacaggagggccacgtggagagctggcgtcacgagtggcaccaatggaggggccagcaccagcgtcctagatggccccagcaccagctccaccatccggaccagaaatgctgccagagctggcgccacgttcttctcctggatccagtaagagtttcggtagagaaatgagactctgcaggagggctgcggaggggggtgagatgtcagagggagggccggggtgggggcgctgggggcaacggcaacagcatggacggacacttattttgttacgtacacccctccctggttcgcgtgtgtccacggatgttgtcactttggtttcttgtgcttttataggcaccgttgacgaactgcagcgatcttactggccaagccagagcgcctcctctcagattccttctcgacacagcaccctaggcggcttcttcctgtcagtcggaggtggcatgcaagatgaagctctctttgctcttcctgctttcattttgtgcttttccttgtgttttcatgttttgggtatcagtgttacattaaagttgcaaaattaat

SEQ ID NO: 873 - DNA, 1262 bp, Homo sapiens
  misc_feature (395)..(395): n equals a,t,g, or c
gtacctggaatacaagaagatccccaacagcaacccacctgagtatgaattcctctggggcctgcgagccgccatgagaccagcaagatgagggtcctgagattcatcgcccaggtaagggagcgcctctgttgggtgcccggcacgggggtggtgctctccacaccttgcttgtttcttggtcgaggcctccttcccattaccccgtattccagtgagggtacaaacactcacagaggcacctgagcaccctacacaaggtcacagatggggcaaaatcccaggtctggcacaggagagtaggagccccaatccctgtggtcctgatttttgccatcattgcacaaagcacacgggagggggtgaggcgggcgcgggtgctcagccagtgtggngtagctctgtgtctatgcctgccctttttctcctcagaatcagaaccgagacccccgggaatggaaggctcatttcttggaggctgtggatgatgctttcaagacaatggatgtggatatggccgaggaacatgccagggcccagatgagggccagatgaatatcggggatgaagcgctgattggacggtggagctgggatgacatacaagtcgagctcctgacctgggatgaggacggagattttggcgatgcctgggccaggatcccctttgctttctgggccagataccatcagtacattctgaatagcaaccgtgccaacaggagggccacgtggagagctggcgtcagcagtggcaccaatggaggggccagcaccagcgtcctagatggccccagcaccagctccaccatccggaccagaaatgctgccagagctggcgccagcttcttctcctggatccagtaagagtttcggtagagaaatgagactctgcaggagggctgcggaggggggtgagatgtcagagggagggccggggtgggggcgctgggggcaacggcaacagcatggacggacacttattttgttacgtacacccctccctggttcgcgtgtgtccacggatgttgtcactttggtttcttgtgcttttataggcaccgttgacgaactgcagcgatcttactgggcaagccagagcgcctcctctcagattccttctcgacacagcaccctaggcggcttcttcctgtcagtcggaggtggcatgcaagatgaagctctctttgctcttcctgctttcattttgtgcttttccttgtgttttcatgttttgggtatcagtgttacattaaagttgca

SEQ ID NO: 874 - DNA, 1465 bp, Homo sapiens
cacgagggagatcagtgtgaagggcattgccaaagtggaatcagtaaggcttggcagttgaccttgtttgttggagagaagggataagattttaaagctacatgtctgaaagaatgatgctgctgattgaaataaaggaagaaaggatgcatttcgggctccaacctgtcctaggaaggcctagacctcaaacaccatcacctccatgcatttcctctttggctactatgtcttttccctgacttctgcctctccagctctctgggctgctgcttccacctgttcatctgacttagaccctccctgctgggtccttgttcacctactcatttggtgcttcgtctgccatcagtacctccattgcagctggtgggatgtcagtcaccatctcttatatttgcttcccactagaaagatcaagagaagttatttctttcccttgcgctccaatttttctctagacagttggtatccacaattttaaaaaatgttccatgttgtataaacaagcattcgctgagaggggctgttaatacacatcgtgccccttttataaaaattcatgcatggaatcctacattattatgcatcaaaatctccagaaatgtcttaggatttttgcagggagaatattaaatgcattgttttgctttgttttgaagagactagatgtgcagaggaagagaggtggcatggtgggagggtacatttgagttgtcaacagtctctgcagtgtcaggtcaattacatcagcacttggactggaccagggaaaggaatgattctgcttcctgggaatgtcagaaggacctgatgattatatttggcaaagccaggaggagtggctttgaatgtcattgctaagaattacactttgagtagcatttctggatgtctgagcttttcaaatgatacttcttttctgctgtggctttcctttctgttggactggttcccagagggtcctcttgtttgtccttgccctcgcttttatatcagttcatgttttctcttctgtcatcttccttcccagcgctgtttctccaccccctcctgctgcactcacaacagcttcccctctcctgtttagaggtggaagcatgtaagaatgcgtttgagggggatgcttgccaaaggacagcatattcaacatctggtatcaacaaggtaatgtttaaccttagactagccaaactagtgatgacctgcttccatgctgcatctgctgctttttgtgttgatgggactcagaaatcatgagaaaggtcttcagtgatccatgactgcaacaaattcttttcctaattgtgccgtatattatgcccctcaatacaacttactaatctctgcctcagtttctccatctgtgaaagtggtgtaatacttatctacctcccttgaatgttgtgaagattagtatatgttggtaaagcacttttaaaataaagaatgatataaagcattg

SEQ ID NO: 875 - DNA, 1465 bp, Homo sapiens
cacgagggagatcagtgtgaagggcattgccaaagtggaatcagtaaggcttggcagttgaccttgtttgttggagagaagggataagattttaaagctacatgtctgaaagaatgatgctgctgattgaaataaaggaagaaaggatgcatttcgggctccaacctgtcctaggaaggcctagacctcaaacaccatcacctccatgcattttctctttggctactatgtcttttccctgacttctgcctctccagctctctgggctgctgcttccacctgttcatctgacttagaccctccctgctgggtccttgttcacctactcatttggtgcttcgtctgccatcagtacctccattgcagctggtgggatgtcagtcaccatctcttatatttgcttcccactagaaagatcaagagaagttatttctttcccttgcgctccaatttttctctagacagttggtatccacaattttaaaaaatgttccatgttgtataaacaagcattcgctgagaggggctgttaatacacatcgtgccccttttataaaaattcatgcatggaatcctacattattatgcatcaaaatctccagaaatgtcttaggatttttgcagggagaatattaaatgcattgttttgctttgttttgaagagactagatgtgcagaggaagagaggtggcatggtgggagggtacatttgagttgtcaacagtctctgcagtgtcaggtcaattacatcagcacttggactggaccagggaaaggaatgattctgcttcctgggaatgtcagaaggacctgatgattatatttggcaaagccaggaggagtggctttgaatgtcattgctaagaattacactttgagtagcatttctggatgtctgagcttttcaaatgatacttcttttctgctgtggctttcctttctgttggactggttcccagagggtcctcttgtttgtccttgccctcgcttttatatcagttcatgttttctcttctgtcatcttccttcccagcgctgtttctccaccccctcctgctgcactcacaacagcttcccctctcctgtttagaggtggaagcatgtaagaatgcgtttgagggggatgcttgccaaaggacagcatattcaacatctggtatcaacaaggtaatgtttaaccttagactagccaaactagtgatgacctgcttccatgctgcatctgctgctttttgtgttgatgggactcagaaatcatgagaaaggtcttcagtgatccatgactgcaacaaattcttttcctaattgtgccgtatattatgcccctcaatacaacttactaatctctgcctcagtttctccatctgtgaaagtggtgtaatacttatctacctcccttgaatgttgtgaagattagtatatgttggtaaagcacttttaaaataaagaatgatataaagcattg

SEQ ID NO: 876 - DNA, 1464 bp, Homo sapiens
cacgagggagatcagtgtgaagggcattgccaaagtggaatcagtaaggcttggcagttgaccttgtttgttggagagaagggataagattttaaagctacatgtctgaaagaatgatgctgctgattgaaataaaggaagaaaggatgcatttcgggctccaacctgtctaggaaggcttagacctcaaacaccatcacctccatgcatttcctctttggctactatgtcttttccctgacttctgcctctccagctctctgggctgctgcttccacctgttcatctgacttagaccctccctgctgggtccttgttcacctactcatttggtgcttcgtctgccatcagtacctccattgcagctggtgggatgtcagtcaccatctcttatatttgcttcccactagaaagatcaagagaagttatttctttcccttgcgctccaatttttctctagacagttggtatccacaattttaaaaaatgttccatgttgtataaacaagcattcgctgagaggggctgttaatacacatcgtgccccttttataaaaattcatgcatggaatcctacattattatgcatcaaaatctccagaaatgtcttaggatttttgcagggagaatattaaatgcattgttttgctttgttttgaagagactagatgtgcagaggaagagaggtggcatggtgggagggtacatttgagttgtcaacagtctctgcagtgtcaggtcaattacatcagcacttggactggaccagggtaaggaatgattctgcttcctgggaatgtcagaaggacctgatgattatatttggcaaagccaggaggagtggctttgaatgtcattgctaagaattacactttgagtagcatttctggatgtctgagcttttcaaatgatacttcttttctgctgtggctttcctttctgttggactggttcccagagggtcctcttgtttgtccttgccctcgcttttatatcagttcatgttttctcttctgtcatcttccttcccagcgctgtttctccaccccctcctgctgcactcacaacagcttcccctctcctgtttagaggtggaagcatgtaagaatgcgtttgagggggatgcttgccaaaggacagcatattcaacatctggtatcaacaaggtaatgtttaaccttagactagccaaactagtgatgacctgcttccatgctgcatctgctgctttttgtgttgatgggactcagaaatcatgagaaaggtcttcagtgatccatgactgcaacaaattcttttcctaattgtgccgtatattatgcccctcaatacaacttactaatctctgcctcagtttctccatctgtgaaagtggtgtaatacttatctacctcccttgaatgttgtgaagattagtatatgttggtaaagcacttttaaaataaagaatgatataaagcattg

SEQ ID NO: 877 - DNA, 565 bp, Homo sapiens
agcctgtgaagactagtcttctttgaaagaaaagatccttttgtaaggatttatgttcttaatttagtttttaccaaatggacccttttagagaaagaagcatcaggataaagtcccaatcttcagtggtttgtggaagagagaatctgatgattcatgccctcctaccctgttagaattaggacagggaatggcagaccctaaacatacatgtgaactgagcaaagattgcctttgcttcacctattgacacatttaagaacctcgttttatagagagtacggagtggggtctgagattctacatttcttacaagttcctggtttatgccagttctgtttgtctggtcaccacacttctgaatagcaaggtttcagaggactctatgaagtttttatttctcaaaaatttggcttaggtacatctttacatacagtggtgctagatattattctttcagaacttaaccatgcaacaatgcagaagaatacaaaaaatgcttgcacacagtagtgtattttaatggaactataaaagcattgaactgattcctaactttacatat

SEQ ID NO: 878 - DNA, 565 bp, Homo sapiens; identical to SEQ ID NO: 877

SEQ ID NO: 879 - DNA, 24079 bp, Homo sapiens
ggagatttaacatgagaatgctcgtccctggaaggcctgtaaaagatgctaccccaccaccggtgcctgcagaaagaccatcttacaaagaaaaatttattcctcccgaacttagtatgtgggattattttgttgcaaaggtaaggagtgtgaggaatgcaagctttaagagaagtctatcatctattttattaactcttgcatgtgtctcacataggaatgatggggtagcttttggattgaatcaccatagtttagacgtttaatttattaagtccagaaactgaatagtcatagtaaattcgaggatgatcagttacctgatgatgtaggagacaaattaaaatcacatgggagttatgtataaattagaagtcagcttattacataatcagcaccatctttttcgagtgactggaatacttgtatctaccacctagacacccctcttctaattatcagtggctcccttggtaagcatggaattagaatagaaggagatggatggacatttggcggttttatcaggccatgatgaggccccatgatacatctctgttttcccagcgcaaaggaaacttctcaggggatcagaatactcatggtgactagatctggtatagccccatttcataccatgctgggtgcatgctaatgtttgcttttctgcactttgctcttttgagctcatgattctccttctgttggtatgtttccctctttacatgtgttaactctgttgttaccttgctgtgcatacacatgagggaatacatctccagagtcatgcctcttcccatttttagatttttattagatctcagagttattgaggcgctgatcccgctccgtttttttgtatgctaagctgatccttaaaaagtctttcaacatgagtttggaagctttgttttgttatctaaagactctgaggccaggtgcagtggctcatacctgtaacctcagcactttgggaggttgaggtggaaggattgcttacatccaggagtttgagaccagcctggacaacatagaccatgtctctgccaaaaaaattttaaaacgtaggtgcagtgctgtttgcctgtagttctagctgcttgaaaggctgaggtgagaggattgcttgagtccaggaggtcagcgtggcagtgagccatgattgtgccactgcacaccagcctgggtgtcggactgagacagtgtctcaaaaaaaaagactttggttacgtcagtggttctcaaagtgtggtctcagaaccggcagcatcggcattccttgggaacttgtttgaaatgcagattcttgggtcttccctcagacccctcaatcagaaactctgggagtgagaaccaacaatctatgtcttaacaagctctccagatggttctaatgtgtgctgaagtttgagaactatgagcttaggcacattgtgagtgcagatttccaggtttacactctatcagggtccgagttatacttccagagtcattctggcctatcccttaaggctgccaattgagttgcacttagttgtatttagctaataaaccagggaaataataaagtactcttaaaaatgtataggcagttcccactcctacctttttaaaatttttatttgccacgaatgaaagctcattgcatcattaatgtgagtgataacaacattaagatttgtaaatggtaatgtgctaaatttttgtttttcaaaaatgtttcctcctgatatatgttctgaaaatttggaaaatgcaaaatattataaagaagggaaatagcactcatctgtgcaacaaagataactgttaccattgtggccaatttactattaatcttttttcctcagattaaaaaaatgtataattggatcagtatatgtagttttttttctgttaacattaacaaggtaaacagtttttatgccattaaaaacttatatagctgtcattttaaaaacttcagtgtagaaaacttccaacatacacaaaaggagagataatagcatatgaatcttttatctaccatcatgtagcttcaaaaattatctactcatggacagtcttgtttcatttatacctctccccactactttgtttggaagcaaatccaaacatcatgaaatttcattcaaaaatatttcattatttatttttgaaaaaaaaaaaggattttaaatagatctacattagtgttacacccacagaagcacacccacaattctttaatattatcacatattcagacagtattcacatttcaccagttgcatcttaaatgtttttatatagttgatttgttcaaatcaggatctaaaatatgattcataccttgcaagtggttgctatatcttcagtctcttttaatctataggctccacctctctctctctctctctctctttttttaacttaactcccacctttttcgtttgccctgaaagaattttgacctttagaatttttcaatggattttgctgatggcatcaccatattttgttcctctgaatcttgtcaagtgaaaattaaatccaatttcattctgattggataggaagagggagtacaggattaacttcataggtggttttgtatatttctgtcaggaagctttttatgattttagttgatctttgcctacatttattatttcagtgaaagttttaaattatgataatataatcctgtcattcatttttcatgtatttgctggaatgtctcttcatcaacctattcaattaccctgaagtacattttgagtcggaaagacaggataaatgctttattcttttgcttttgtgtaccagttttcaaaatgatgagttggttcccaagcatccttcagaggaggccagtgagttttgttttgctttcagctttgttatgaacttatagatttaaacatattttatatgttttaatctattgcagttatttttttctcatggggactcagattatccatctttgccagtgagagcctcttccacaattggctccgaatctttttgagattattccactagtgtttgagtttgcctgctttctagttttattctaggctaatcatgtatatttcctgcccgtgactgagaacaatcacttttttgaaataacctggttcctttttgtgagaaattatatttagaaactacagacagatgctggggtgctcgctcttacttggttgatcattgtttctagataagcatcaattatagtgaccatgtaacttttcactttgttagtgatttgatgtttaaaatgccaagaatagtatcttttaaaatatgtcttgttcatgagcagattatttccttaagaagtactaggtcaggcccggcatggtggctcacgcctgtaatcccagcactttgggaggccaaggtgggcagatcatgaggtcaggagattgggaccatcctggctaacacggtgaaaccccgtctctactaaaaatacaaaaaattagccgggcgtggtggcaggtgcctgtagtcccagctactcgggaggctgaggcaggagaatggcgtgaacccgggaggcggagcttgcagtgagccaagatcgtgccactgcgctctagcctgggcaacagagtgagactccgtctcaaaaaaaaaaaaaaagaagtactaggtccaaggctataaacttaaataaggcttttaatacatattgccagattattttccacattactaatttgtactctcttgagaatagtgagaggatgcatctaactttacccccttattagcattaagtattcctttttcatttttgttaatttgatagattaaatgatttttattttctgttagtgacattaaaattttaatgatcttattgccatttgattttccagtttgaggtattgactgttcatattcttacctaaattatctgttgagattatggtatttttcctttttctggatactttatctagagatattattaatttatcttgttaagctttttctagtttatttgctttaaaattttgtttattatgcatttgaagttttaaaaagtttatcatgcacagaaattttaaaaagtttaaaaattagatctatccatacatttccttattgattacattgtttttcagcagaagtcttttccactaataaatgtgtacatttattttaccttccttctctgtttcctcctgttctttttctttctcctcctccttaacttttaattctcttatttatctagaataaagtgaggaacagactggatcagacttcatctcccattcccacacttagctaactagttgttccattattatttattaaataatctttctttttctcccactgacttaagatgttacctttgtcagattaacttcttatacgtgtatgatttttgtattatatttttgcatcaatctagactacatttttcttacttagtttaatatccactaaaaaaaatgggattttttttatttaaaaaaaattccccagctaatctcatctattttttcttctctacgaacttcagaatcattttaaagttccaaaacaggaagagaaattcacagggagatttttattgaaattacttaaagcctgtgtaaattaacttataaagaattacagtttttacacatttcagtccttcccttcatataattttataaagatttataatttccttcacaatagctctctcacagctttcatagtttgtccttttgtatttctttagacttttctaactatttattgctgatctataagaagaaaactattgattaaaaaaaatttcacatctagctattcagttattgaatatgagagttttaccttgtcatcttgacttttgtagatgtagcattatctgcaaaagaaaatttttacttatgctgacaccatttaaaatgtttacttttatgttagaacaaaaataattatatactaaaaatattttctatattaaatatataatacatgttatataaaatatattttatatgtttatgaaattataatctttaaaaaaataattttaccttttattgcagccatttcttcctttgtctgatagtggtgttatatatgattctgatgaaagcattcatagtgatgaagaagatgatgcctttttttcagatacacaaatacaggagcaccaagatccaaattcctataggtaaataagacttttctttctctcattttttttttggcttttctttttgtagaaaatatcaatgttattaattttaaataacattattatcctgaatttatataagaaatgacttatgtttccaggttacaaattctacacctttgaggtcaatgtctacatagtgttttctccacctccaaagactagcttttatggagagtgcaaacacaagcatctttagtgaggaaaaaatatgtaactcatggatatactattagagtttaatatataaattattggtatactattaggtttcatgtgactatgtggttaatctttttccacgaggtaattttcagcaagtgtaatatagtattgcaagttttttgtattcagtgaccacagaggtgccatttttgcatagtaaatttcaatgacagctttttttctgggttggagagtgggctaaacagttggcagggaacaccactctgtttctcccatgattttatttttcacttaaagactctttttgcccctccttgaacagctgggctcttctacatttgacaatggttaaactagcacttcacaatgtcaagaatttctttcctattgctggactggaattctctggtgagtttggaatttaaaaattaatgttattaagtataataaattgccgtcaagtttctctttacaaaatctatatataaggtcatttggtacttaaaaaatagtgcattagatattttataaagtcttgtttattttaggctccaatctgtgactttatttttatttttttagatagagtctcgctctgttgcccagactgtagtgcagtggtgtgatcagagctcactgcaaactccgcctcgtaggctcaagccatcctcccacctcagtctcctgagtagctgggactatagatgtgctaccatgctgggctaatttttgtattttttgtaagagacaaagttacatcatgttacccaggctggtcttgaactcctgggctcaaacgatccacctgccttggcctcctaaagtgctgagattacaagtgtgagccaccacacctggcttcagtctaatactttagtttatatcaagaatcactctctacacagaagattgagaaagagcagaaacccacttctgttttgttgaaagcattaagaatctaaactgtattacattaacatttgcagatttatttgtattttcagaagtattatctctgagaattcagattctataaatatttgggtgatgatcgatattttttattaaaataaataacatattctgtcaccttgtagagctgcctgtaacatcaccattaggtattgctgtgattaaaaacttggagaactgggaacagatcttgcaagagaaaatggatcagtttgaaggtccaccccctaactatatcaacacatatccaactgacctttcagtgggagctggaccagctattcttcgaaataaagcaatgctagaacctgaaaataccccattcaagtaagaaagctcttataatgctgataaagagcgtagcttaacttttctggaagacagtttggctaaatatgccaatatactttaaaacattcataattttgaacctgcagtcctatttttagcagaatacgcttaagaaaaatatcagaaatttgaatagaatttttcccagtattatctgtaattcatagacattccatttacataaaggaaaaagtctttattgtattaatttccggtgtggtgttttttgtttgtttgtttgtttgagacaagagacaaggtctcactctgtcacccaggatggagagcagtggtgcaatctcagctcactgcagcctcaacctcctgggctcaacccatctttttcacctctgcctcctgagtagctggaacaacaggcgagcgccatcggctaattttttttgtattttttgtagagacagggtttcaccatgttgcccacactggtctcaaactcctaggctcaagcagtccctggtcttggcctcccaaagtgctgggattacaggcatgtgccactgcgtatggcatatttatgttcttattgtcagaactcttacagaatttttttctaacaatctatatatgcaaataaggtgcttctgacttttgtcagtaatttaacagtaaacacattacaggtttttaactgatgttttgatcttttacctgccaatctaggtcccttttgataagcagcatgcttttttttttgaggtagtggaccctgattaatagtttttactattaaaataagcttgaaagaacaaagctttttagcttgttaggctgttagaatcggtatctatgacttgtattcattgttgatatgctttaaccaagagaaccaatataaagtataatttaaaaagagaataataagagattcatttgactctcagcttaactggttcattcagtgtaattagagaattagttgctagatgaaatgatttttaggagaactaaaaattaaaagtaaactgtacagttttgttgagcttaatgctgtgtcttctttgcaatagattatgaaggttttaaaaataaatatctttgcaatagattgtgaaggttttaaaaataaatatctgcaaatataaacatattttctatagactaaagtagtgtgatatgttaattttttttaataggtcccgggattcttctgcatttccagtcaaacgactttggcatttccttgttaaacaagaggtccttcaagagacatttattagatatattttcactaagaaaagaaagcagagtgaggtattttgagaaaaatattttctattgtaatttttctttagttttctttaacatttctaaggaaatcagtgcttgatttattctgaaattttctttctggttgggtaatagtcaaagttcactaaactaccgtgaactacttttaagataaaaccttataattttcatttcatagcaatgaaacaacataggtactttgataaattacatatattcaagtgaaagttggtactttacagtatttgtcattaggtttttacacataataaacattgtgatggatggcttgaggaatttaatatataagcttactctataatattctccaaatatgtacttaaaatataaaatagccctttaaaagcattttctttacttagcacttagaaatgaacagaatgatgatttgaagcaacaaattcaggatacttttgtgagagaataaactacagaaatagcaaatacaagatgaaggaagattgctcttacaaagcaagacagaggttctgcattgcatggttatttttaagctaatacaattagtaatgtaatagcagacatggttcaagaagaattagcagtttgggagattggcaagtgacctcttccttataaaagtgggaccttttatatgagcatttcagtctgtttggctatttagtgaggtaattagtgagggaatgagcagtttgaagagtattcagagttgagcgtctgatgtaattaaagatttggcaaacatggccgggcacggtggctcacacctgtaatcccagcactttgggaggccgaggcgggcagatcacctgaagtcaggagttcatgaccagcctgaccaacatggagaaaccccatctctactaaaaatacaaaagattagccgggcgtggtggcgcatgtctgtaatcccagctgctcgggaggttgaggtaagagaattgcttgaacccgagaggcagaggttgcagtaagccaagattgtgccattgcactccagcctgggcaacaagagcgaaactctgtctcaaaaaaaataaagatttggcaaacacaatcaatgagaagagaagaaatgaattatatttcgcttagaaaagtgaaaacagagagagtccatacggctcaatttcccgagataaagtataaaattgcttctcagtttttcctcatgcccagggcagtggaacctaccatacttgttctttttcccactcacccacttacctgaatggtaattgtggtcagcccttatgaacagtcatttgttttctctatggatttaaaaattatatacttaaatgaggaagtagaagaatgaactgtagagaccttttgagtcctagttataagctttttcataacaaaagacccttatggcattgaaattattgatgtgactttgttagggaaatcagaggcaaattatttgcctctgtcatttaaaccactgtgtatagcatttcctatagtgatgctgagtccaaattccataaactaaaatataggaatctaagatagtgatttaaaataaaagattttagccaggcatagtggctcacacctgtaatcctagcactaggtgggggatctcctgagctcaggggtttgagaccagcttggcaacatggtgaaaccccgtctctacaaaagatacaaaacaattatccaggtgtgatggtgtatgcttgtaatcccagctacttgcagggctgaggcaggaggattgcttgagcccaggaggtggaggttgtagtgagctgagatcacacaccactgcactccatcctgggtaacaaagtgagaccctgtcttaatcaataagatttctggtcaattaggggctctgttattcacagaaaaccagttcattgagtgatcaattttctgagtgttttgttcttcaaattattaaaattaatgatttatcacaagtatgttttaagtattggtaaggttgatagcagcttgactggttgacttgtcagagtgtagagtgctgtgggaagccaggtgtctgggtttcttggaccctcccattctcgtcttgcccttccccacgagtttgcttcttccttaactaattctccccctctccgccccttagtctcccttccattatgcccctcagtctctgtgtgttctatttttcttccagcagtgggtccccatgaacagggaagtaggacagagataaacggaatgtttcttaaagtgctatataagcatcagttggctccaaggaagggaagtacatggctgggagttaggatggaagaatttttatcatgtacccttttaattttaaaacattgaatggaattactgtcttgtccagtactgtcccatagaactttctgtgatgatggaaatctgtatctgcatagtccaacatagtagtcaccagccacatgtggttactgagtacttgaaatgtggctagcatgattgagaaactgaattttaattttaattgatctaaatttaaatagttacatatggttagtgattgctgttttgaatagctcagatctgaaaaaaaaggtgttttattaagaaaaaaattatgaataaaacattaaggctgttaggacaaaataaaaactcgtcgttaggctcagaaatatgcaaaacttactaaaactctacccaatccagtaagagtgcttacatctttaaaattgtcaaataggattttggtaatcactaaatttggcaaattcagaaaattgaccaataaaattggcaggctaatcctaaaaatgctgggtgcatttaaaaaaaatccctgagaaatgctgaagttatatatttataagaataagatcttttattcactgaagatattacaggaaaatatttcacaaaacaagtttttgggaaacagattggtgaattcagctagttaagacaaatagattcttcagcagtttggccttcactgagttagctgtgccacacattgaccattccttggaagttttcttggatgcatctttatcagctgcagcagccataggggagtccctggaggcatgggcagaaaatttgaatggcccttcgtgatgaaaggaaggcagtcacctgaaaaggtatgaggaagagtttgtttctctgatcaaaccttcagagtttccacagcagagcagaaatataacttctgattgcagccatccttaggaccctgcatcaacccgggagcaaattactgagttatttctttttccgtgcctgattttattaaacatttatttacttagagaaaaatcatcatattccttataagagtgaaataattatcaatattttgaatctatgtttagaaataaatattttaatttgtattttaaatcaacccctatagggcaggaatttatgtagcatcttctgcatctgcttatacaaatgggctttaattttatagattaccagttatgtaacttagatttcttaaaactgtatacagataactaatttttattttgaaatagcttttatgttcttgtgtttatgtaatagtcacattaattttgctcttttggctttgtgttgtgtttatttgatgactgttttattcggtttaattttttcttgattttgcaaattcatttttatcatctttaagtggtggagtggccatttcagcttgaaatatttcactgtctttataatttcattccatgcatgtgttttgtgtttgtgacggtgtggtggtatttagtctatagaagaacatgtggagcaggtcaaccaaaactgcatagcagaagattgccacatcaaggtagtattccaagatcttgtatttagctcattctttaaagttcaaggagctaacgcctcatctctgatactaaccatgacctgcccaactggctaactactcagagaactcatagtactcccataccacttcagtggcacaggggaggagatgcttcactgtatctggcttgctctgtcttgcccttggttcttctctttcttgctccctgtcccatcttcacttgtcactttttctgttttaagcatggctgtttcatcttcttgattctgccttttctttccttcccatcaccaaccctaagccattgcatcttcctctcatcagtctcttttattcctttcgaagtatccctctttacaacttttccttatttctgtctcaccacccttacttcaaagggtggtttctttgcggttttctatggctttttactccactctgtgcctcttaatgtatacacattcttattgcagaatatttatgcacttttggaagagctaagagagacatactactgtataaattactaataaaaatatattagccatgttttataattaatcagtatcttaccatcacagtggaaattggggtgattacaggacatcagagaatttaagcaaattttccaaagctagttttcaacacattaaagttactcttacccttttttcttgctgctgctgctgctgctgctgctacattttcttcttatcctacatttaaatcttatgggatgtgcataactctaaatagagctgtgctgcagcaactaaaactgctgatgaatgttttctaggttgaagctgatctgggctatccaggtggaaaggcgaaagtcatccataaggaatctgatatgatcatggcattttctgttaataaggtaaaagctctcatcattatacacagtgtatttctccttagtgaaattgcttaaatcatcgattctgcctttgctttataggcaaattgtaatgaaattgttttggcttcaacacatgatgttcaagaacttgatgttacttctctactggcctgtcagtcatacatatggatcggagaagaatatgacagagaatccaaaaggtttgtctcatagtcacttttacatatagttttctgtaagaagtacccaccaaatggttatgcacatgatttgaattatttcaaaaggtatacgtgtatctccttcatttgggtaggtgacaaatataattggtttagctgccagtgaaagtctttgtctacattaactgaatgaattacacttccattaaaccctacactattgataatatttcaataaggataatccctaacacttggcttcatgatattcagtaaattaatctgatctggataattaaaacagtagacacaaatatgttaattacactgagtcacatttaccgagtaattttgcagtgtttcttcttatcacctgataagcataccttttcttaaacataaaaatgtagacggctttacttttcattgaagctatggacactgcaccaagagtgttttgccattcttacctattttgaggtttcttctttgtggtttgccttccctcctgcttttctccagactcttagaaattgttcatgcttgaggatggtgccatgatagtttctctcctcattttgttgaattcttttttttgttagtatgtgatataactaggatttaatatcacatttcagagtagatataaccatgtactatgatacaatccatcccaacaattactttcacattttatatgtcttactccaagaaatctttaaactcaaatttctttaaacgtgttaatttgatactgagctatctgtacttgaagagaacataatatttttccatagataacaacaaacttttgtttcaacttgtgcagcaataaagttgtccccaaacaacattagactaaatttacattttgccaaaagggaaaaaagttaaccagtattaacattggcgattaggacttgtacctaagtttttctcatggctacttagtttttaaaataaagattgtcctatgggtacataagaagatttttagttggaatttgtgttaagagaaaagggaatgttcacagtaacacatgaatgtttttcacagttcagatgatgttgattatcgtggttccactacaactctttatcaacccagtgcaacatcctattcagcaagtcaggtgcatccaccttcatctctgccatggctgggcactggacagactagcactggagctagtgtggtatgttatttacttataggtatcatttctggatttggactctgaaaaatcagttggaatctctttgacataggaatgatcctaaatttcagggacaaacaccagtagataggccatgataatgacagctgacatttattgtggcttttttatttggtgacagggtctggctctgtcgcgcaggctggagtgcagtggtgcaatttcggctcactgcagccttgacctcctgggctcaattgatccttccatctcaacctcccaagtagctgggactacaggtgcatgccagcgtgcctggctaatttttgtattttttgtagggatggggtttcaccacgctgcccaggctgttctcgaactcctgggctcaagtgatctacccgcttcagcctcccaaggtgctaggattacaggcatgagccaccacactggcctcatatgactttcttagtgtcagatacatgctttttctcacaacaatcctaggtggtaggtgctattattaccctccattatcattttacagatgaataaacagatacaaaatggtaaagcaaagttaaaggggaattcatgtctacttctaagtgcttgaaagcatgtcagtaacattcttgtcactgtagctggaggggtcccattcttatgttctgctctgaagcatctggaggtgctcctgaatatcctcagggaggggcacttgaagaagagttcctttattatgagatgaagctccttggtaacctcacaggccagggctataccagcaagtgactgtgcttcctcaccctcttcagacaagtgttctatgtagtggttcagaacatccataacaggctttatctcagtaataagcaaggtgtaagagaataaatgtcagaatttatcctgaagcatatccttcctcatcttttctgcatacacaaaataaaatttttaaaattttcttttaaagcttatgaaaaggaatctacataatgttaagagaatgacttcacacccagtccatcaatactgtaagtatttatgacctaataattgtaagtgtcctcatttggaggttgatttatagaatagaaaatattggaactctttaatttcttatttcctgctttttctcttgtgtttcagatcttacaggtgctcaggacggcagtgtacgaatgtttgaatggacgcggcctcagcaacttgtctgctttcgtcaagctggcaatgcaagagttactagattatattttaattcacaaggcaacaaggttagtttctgggggctactgctgaattcatctgaaaatagttgtggatatttaggagtaagtgataaaagtgcatcgaaaaatgaattcagtgaccctggatttaaactgagtagacagtttgttggagtctattcatacactctcttttcttccaatagaagcaaaaatctacaaaatttagtatggattaatcatctatttaaagatactaaatatactgtgagagtaaaaaaactgcctgtgttgagtgtgttggtgattcctgtaagcacagtaaagttcttgagagaaacctagtttcttactaaatttcatcagtaagaggttagaggaaaacagtgaaacaggtaagcagttaagaagtaatggaagggccagtcacagtggttcacacctgtaattacaacactttaggagcccaaggcaggaggattgcttgaactccagcatttgagacaacctgaacaacaaagggagaccacatccctacaaaaatttttttaaaaagcccaggcatgtgcctctagtcctagctactcagaaggttgaggctggaggatcccttgaacccaggagtttgaggttatagtaagttataattgcactactgcactccagcctgggtaacagaatgagaccctgtctctaaaaaaatttaaaaaaaaagtgacagggaattttttagcacttggactttttgggaatgacagcaacagaaacatagttagaggcagaatgtttatttagtagggccttagtgaatcttccttccatgtttttacctttgctgtggatgctaagaacatgtgtttagtagttatactgttcttacagtgtggtgttgcggatggagagggttttctgagtatctggcaagttaaccaaactgcatcaaatcctaaaccttatatggtaagtatcactaaatgttcccagggcgcatatacacaacactttgttcatgaagtgtctgtttcagacagtgaatctcattggtggtcctattgggaaaaggatgatttttttcagcaatcccagcctgacagcagcacccatccttaccctagttttagactgaaatgacctgaaaaacaaaaagccttgcttttcaccttgaagtacagtttatattttaaaaattttgggggctttccctgtgtgtggtacaacttgggttttttttcattattattatactttcatccattttgaaaactctatcttcttaatatacacatgataaaattctgtcattaagaatcaggttctgccgggcacggtggctcacgcctgtaatcccagcactttgggaggccgaggcgggcagatcacaaggtcaggagttcgagaccagcctgaccaacctggtgaaaccccctctctactaaaaatacaaaaattagccaggcatggtgacacgtgcatgaagtcccagctactcgggaggctgaggcaggagaatcgcttgaacccaggaggcggaggttgcagtgagctgagattgtgccactgcgctctagcttgggcaacagagtgagacttcgtctcagaaaaaaaaagaatcaggttccaaacatctgttccaatttgttccagaattgtgcttaccagattataaaataaccaatcccaatgagccaccttaatccaaattggattacaaaatagttggtgatgaagataagtagatctttacctgatggagatatggtgggggaaaggaacatgggggagggtggaaggtgatgctgtcctgtgtgaaacttcaggcttcacatatatggagggaggttcagaacgccttgaacctcctgggaccagatagattacccaaatactttttaaaatttttctaaactatacatatgttcttaattatgtgtataagataattctcttaaattaggacactatagactgtaccttgtctatgcagaaatggaagtaatcttgaatttatacttttgtcttcagtcagatctgtaccactataattccagacagaaaaacatgcattatattttaaaataccttgacatcctaagactagttgggtctgtaagcatttcctttgtgactgttaaagtttattacatgtatttgagatcattagcactaaaattgacgggtcttaggtaggttcatgtactttgatgtcctattcttacataatctgaaaaacatgacctttaattctgtttttaccaactccagttattaaaaattattggacagtagccaaataatatacacatgacagttaagcctcatactatcacttattcttttatcctagaccgagtttttaaaaactatttttagctcatgcatatagtatgttattagcagacatgtatgttggtactgtatcaaattttatccaatggtaaaataacatcagttgcactttgtttttcgtagagttggcagtgccacagtaaagccacaagtgactttgcatttattacctcttcaagtctagttgccacatctggacactccaatgacaataggtaggttgacagaaaagcaaagtaagaaatataaaaacgttagaaatccatacctttagcaagaatacttttctattagtagggtttttccactctaggcattaaaaaaaaaaactttgttacataattcttatttcagagtgttttttcttaccaaaaagagaaaagcaaaaatgaaagttattcctaatatatgtaatttttattttaaagctattcagtcttttttaaactactactgttaacactgttagtttctctaggactaacaggcatctgatattgtctccatcattctcaacatttttattttattgcagtaggtttgggggaataggtagtgtttggttacatggataagttctttagtggtgattgctgagattttggtgcacccatcacctgagcagtgtacactgtacccagtgtgtagtcttttattcttcaccctcctcccacccctcccaagcccccagagtccattatatatcattctgatcctttgcatcctcatagcttagctcccacttacaagtgagaacatacgacatatgattttctactcctgagttacttcacttagaataatggcctctaactccatctgggttgctgcaaaatgtgattatctcattcctttttatgaagtattccatggtgtatatgtaccacattttctttatccatttgttggttgatggacatttaggttggttccatagttttgcaattgtgaattgtgctgctctaaacaggcatgtgcaagtgtctttttcatataatgacttcttttcctctgggtagatacccagtagtgggattgctggattgaatggtagttctgcttatagttctttaaggaatctccgtatactgtttttcatggtggttttactagtttacattcccaccagcagtgaggtgtccccttttcaccacctccatgccagcgtctattgttttttggttttttaattatggccattcttgcaggaataaggtggtatcgtattggagttttaatttgcattttcctggtaattagtggttttgagcattttttcctgtttgttggccatttgtattttgagaattatctgttcatgtcctttgctcgcttttgatgggattgttttttcttgttaagttccttgtagattctagatataagtcccttgtcagatatatacattgtattttctcccactctgcaggttgcctttttactcttgctgtgcagaagtgttttagtttaattaggtcccatttatttatttttgttgcatttgcctttgggttcttggtcatgaattctttaagtcaatgtctagagtagttttttttgatgttatcttctagaatttttatggtttcaagtgttagatttaagtttgacccatcttgagttaatttttgtataaggtgagagatgaggattcagggactaacaggtatttgacactgtccccatcattctcaacatttattttgacctcacatggttttcattagcaacacatgcccatgaataacatcttgtttccctgcagtggctaccacctggggatataaaagcattccttatactcaggaagtcatatcagtttcctggagtggcaatggaaaggagatggggtagaggatgcagagacgggcaggaccatgtgagatggaactgtgtagtttgaccctacccccatcctagttgggaatcactactctctataggtgtgagtgaacaaaaaagataagaatgaataagcaaaatatttgactgaaagacaggttgtccctgatgacgacttataacaatcatttatgatgtatttttgttattgtgtttctttaaaagaaatgtttgcctctgggacacattaatatcacccggaaacagcctcattcatggtgagttaaggtctatgatttttaaaaatataccatgaaggaataatacaccatgaaggaatgctttcttggttttaattagtgaatccagtgagtgtttattgacaggttgaaaatggagaaatatttagaatgaatgactaaaaatttggaaagttaattagcatatctggcttccttgctgagttaaagatatatggtctcagaaatccaaaatagtctttatattctattcagaaaatatggtatggatagtggtactactaacaaggctatttaagaaattagttgcaaagtattcattgagcttaatagaaaataacatattttaaagaattaaacctcatcataaaatactttttgtctttttttcctttttgtggagatcaaggtcatgctgtattgctcaggcaggtctcaagctcctagggtcaagctatcctcccacctctacctccctaagtactgggattacaagcatgagccaccacacctggccctaaccataaaataaaacaaaggttaaccttattataatgactagaaatgtaaacagtgccatttaaatattattccttttaagacaatacttgccaaattagtgtcctaactctgtcttccacatagtaccacccaaaaagtgctccatgctcaagtaagtttggttaaatgaagtagattgtcagaaagacagaaagattctcagtcttttaatacactgatatgcattttgaaatatgtagttaattctcaattttattgcagaattctgcaaacagtggttaacattgcttacagattttctgcatgttaatttgaatctttaatcatattaaaatgcaaatactcctgggaaggataatgaacttcttaacttgtaactgaaaacattcacacattttctcatagtgtcgttgtttcaattacttacctgaaaagaactttttgtacggtacagcacttggctgggttaatactcaccaactttgagaaggttggtctctgctcttctgtatactttttatgaggcagtatcacttagggcttaaggtttaaactttctttttctctctgtgttcatttcatattgagattatggataaaaagtttgttctgacattgcttaacatttttctttaatcatgtgattacagaaattcaatgacttacaaaacaataaatgtaccttagaatgaaaaatgcatcagtaaggtctgtatttaaatgtggatgtagacatcataattaccaagacaagaaattgttttgagaaattctctgatgtttttcttcttcaggtttcacgtgccacgatcatggtgccacggtactgcagtatgcacccaaacagcaactcctaatctcggggggtaggaaaggacacgtctgcatttttgacatcaggcaaaggcagctcattcacacgttccaggcccatgactcagctattaaggctctggccttggatccctatgaggaatattttaccacaggttcagcagaaggtaacataaaggtgagtcagtacaagaggttggaatgtgctaaagactgattggaaagagaaaaaacaaaaactccacattctttgaaataaagcttcactttatttcacttgggctactgcatggagatactgcatatctcaacactctgccgcctccccatgctcctgtatggttctttctaaactgttatggtcaatgagattatcaaactcattggactcaggccattagaaagctttaaagcattctattttgagtaaagtgtatgagtttaatgcatgaaattttttgatgacattagtttggctccttagaagcttctcccctctccctcagtactcttgtgtgtggtggaggtgacgtttccagtaagtgagctagtgcagatgctccttgactttatggtgggattatgtcccaacaaacccattataagttaaaaatattgttaaagttgaaaaacatactttcaacttaatattttcaacttactatgagtttattgagactaacctcaggataagccaaggagcgtgctgaatgcgtattgctttcacactgtcataaagtcaaaaagtcttgtcaaaccatcgtaagtaggggactgtctgtaccacactacttttacatagccttaggacctagctcagcatgaggaacacatttaactgaattaactcaaatagttaattgaattagagatgggctacatatggttaatatgaagccacaagaggatgtgaaggaaaatatggaaggaggacagtaaatgaatcgtgggagtggtgttatcatttcccacttagataagctcttaggaaagaggcagtgggtgggaaggttgggctttagtgagatcacttgggccaagggagcagaagggccatgtttttgcttttggtcttttcgtaatatatttttaactccttttgttttgcactaggtttggagattgacaggccatggcctaattcattcatttaaaagtgaacatgctaagcagtccatatttcgaaacattggggctggagtcatgcagattgacatcatccagggcaatcggctcttctcctgtggtgcagatggcacgctgaaaaccagggttttgcccaatgcttttaacatccctaacagaattcttgacattctataaagattggggttttatttttatatacatttcagttaaaaggcacactacagtcatcactaggcaattctgctttctaagcagttgtattgaaaacagagaatctctgtgtagaatttgaatatgacccaagctgagtattatctaaacaggttggtggaatgaatgcgcatgtaccttattatgctgacatactaaaaaaaataaaacctagtattgtatgaaggatagctattctttacagcatttagcaaacctgattcagaaaacatttgagattagcaaattagtaacttgaaataatgaaaaggacgtttataccaaattaaggaagaaaatgttgctgatttgggtttttcttcctgttcttaccactgactgaagcatgcctgcagtctcctcctctgttgaatgaaggataatcataaggtgtttgttaggagcgctagaccacctggaaaactttcttagctgtggagcagtgcgcagtgaccagttctctgctgtgagaggccgtttccattctttcctgctgaatatttttcctgttagtgtttatactgagctagtactgtaacttgcaaatgagtgcaaatttaaatgcaatgttttactcacaatttgcacattcacattttttggactgctagtttttctatttaaatatttgccttcatgttaggaatgtactatgtgaacatgacatatttgtagttaaccaaacacaccttcttagtccagtttagtactttttcttttcgtgtattcaaggttaaacacccaaacatttaaggatatgttgaaactacaccaatagagcatttcatatcataattaaaatgaatgttaggcttcttgtggccagttaatagttgatgagattggtgacattatttattgccacagcctattgtataaactatgcagagttaaatatttgcttgtaaaatattagccaatgttgtcattattttgatgtatttccttggttatgaccaaaaatatgttgagatactgaaactaatgtctgtgtgtttaaatgtttaccagcaaattgtcttatcatgttaatgagaatgttcaatgcctgtgtggtaaatagtaaatacaatggcataaaagtaactttctctgaagatgtgatgttcaggctgtgaaatatatatgtaaaagaaaaataaatgttatttgttagagtttttagtttgatactgtttttgaccattgagatttttaatttgataaaatgtttaactgttagagaatttgcaagctatttggcagtctattcattcataagtaagtatttactgaataccttctataccaaaagccattctaggaaatgggatacagtggagagccagacagagaaagcacacaatgttgagatttagcggggcaagagctaacctcactataccttctccagacagatttgaagtttattgaatgaagtactaacctcgtacccaaaactcaaatctgagtcttggctatttgcttgctcctaagtaagtaagggaagtcagaatatgcccactgataagaagagccaggaaaataagcttgtgagtgacatctcaatgcctaaagcaaaactgattcaaaggagctttcagaaaaaagggaagagaactttctctgtcaggtaaaagcagtaagagactctagattcaccttctagcttgaaacaactaaaa

SEQ ID NO: 880 - DNA, 17595 bp, Homo sapiens
gagctgcctgtaacatcaccattaggtattgctgtgattaaaaacttggagaactgggaacagatcttgcaagagaaaatggatcagtttgaaggtccaccccctaactatatcaacacatatccaactgacctttcagtgggagctggaccagctattcttcgaaataaagcaatgctagaacctgaaaataccccattcaagtaagaaagctcttataatgctgataaagagcgtagcttaacttttctggaagacagtttggctaaatatgccaatatactttaaaacattcataattttgaacctgcagtcctatttttagcagaatacgcttaagaaaaatatcagaaatttgaatagaatttttcccagtattatctgtaattcatagacattccatttacataaaggaaaaagtctttattgtattaatttccggtgtggtgttttttgtttgtttgtttgtttgagacaagagacaaggtctcactctgtcacccaggatggagagcagtggtgcaatctcagctcactgcagcctcaacctcctgggctcaacccatctttttcacctctgcctcctgagtagctggaacaacaggcgagcgccatcggctaattttttttgtattttttgtagagacagggtttcaccatgttgcccacactggtctcaaactcctaggctcaagcagtccctggtcttggcctcccaaagtgctgggattacaggcatgtgccactgcgtatggcatatttatgttcttattgtcagaactcttacagaatttttttctaacaatctatatatgcaaataaggtgcttctgacttttgtcagtaatttaacagtaaacacattacaggtttttaactgatgttttgatcttttacctgccaatctaggtcccttttgataagcagcatgcttttttttttgaggtagtggaccctgattaatagtttttactattaaaataagcttgaaagaacaaagctttttagcttgttaggctgttagaatcggtatctatgacttgtattcattgttgatatgctttaaccaagagaaccaatataaagtataatttaaaaagagaataataagagattcatttgactctcagcttaactggttcattcagtgtaattagagaattagttgctagatgaaatgatttttaggagaactaaaaattaaaagtaaactgtacagttttgttgagcttaatgctgtgtcttctttgcaatagattatgaaggttttaaaaataaatatctttgcaatagattgtgaaggttttaaaaataaatatctgcaaatataaacatattttctatagactaaagtagtgtgatatgttaattttttttaataggtcccgggattcttctgcatttccagtcaaacgactttggcatttccttgttaaacaagaggtccttcaagagacatttattagatatattttcactaagaaaagaaagcagagtgaggtattttgagaaaaatattttctattgtaatttttctttagttttctttaacatttctaaggaaatcagtgcttgatttattctgaaattttctttctggttgggtaatagtcaaagttcactaaactaccgtgaactacttttaagataaaaccttataattttcatttcatagcaatgaaacaacataggtactttgataaattacatatattcaagtgaaagttggtactttacagtatttgtcattaggtttttacacataataaacattgtgatggatggcttgaggaatttaatatataagcttactctataatattctccaaatatgtacttaaaatataaaatagccctttaaaagcattttctttacttagcacttagaaatgaacagaatgatgatttgaagcaacaaattcaggatacttttgtgagagaataaactacagaaatagcaaatacaagatgaaggaagattgctcttacaaagcaagacagaggttctgcattgcatggttatttttaagctaatacaattagtaatgtaatagcagacatggttcaagaagaattagcagtttgggagattggcaagtgacctcttccttataaaagtgggaccttttatatgagcatttcagtctgtttggctatttagtgaggtaattagtgagggaatgagcagtttgaagagtattcagagttgagcgtctgatgtaattaaagatttggcaaacatggccgggcacggtggctcacacctgtaatcccagcactttgggaggccgaggcgggcagatcacctgaagtcaggagttcatgaccagcctgaccaacatggagaaaccccatctctactaaaaatacaaaagattagccgggcgtggtggcgcatgtctgtaatcccagctgctcgggaggttgaggtaagagaattgcttgaacccgagaggcagaggttgcagtaagccaagattgtgccattgcactccagcctgggcaacaagagcgaaactctgtctcaaaaaaaataaagatttggcaaacacaatcaatgagaagagaagaaatgaattatatttcgcttagaaaagtgaaaacagagagagtccatacggctcaatttcccgagataaagtataaaattgcttctcagtttttcctcatgcccagggcagtggaacctaccatacttgttctttttcccactcacccacttacctgaatggtaattgtggtcagcccttatgaacagtcatttgttttctctatggatttaaaaattatatacttaaatgaggaagtagaagaatgaactgtagagaccttttgagtcctagttataagctttttcataacaaaagacccttatggcattgaaattattgatgtgactttgttagggaaatcagaggcaaattatttgcctctgtcatttaaaccactgtgtatagcatttcctatagtgatgctgagtccaaattccataaactaaaatataggaatctaagatagtgatttaaaataaaagattttagccaggcatagtggctcacacctgtaatcctagcactaggtgggggatctcctgagctcaggggtttgagaccagcttggcaacatggtgaaaccccgtctctacaaaagatacaaaacaattatccaggtgtgatggtgtatgcttgtaatcccagctacttgcagggctgaggcaggaggattgcttgagcccaggaggtggaggttgtagtgagctgagatcacacaccactgcactccatcctgggtaacaaagtgagaccctgtcttaatcaataagatttctggtcaattaggggctctgttattcacagaaaaccagttcattgagtgatcaattttctgagtgttttgttcttcaaattattaaaattaatgatttatcacaagtatgttttaagtattggtaaggttgatagcagcttgactggttgacttgtcagagtgtagagtgctgtgggaagccaggtgtctgggtttcttggaccctcccattctcgtcttgcccttccccacgagtttgcttcttccttaactaattctccccctctccgccccttagtctcccttccattatgcccctcagtctctgtgtgttctatttttcttccagcagtgggtccccatgaacagggaagtaggacagagataaacggaatgtttcttaaagtgctatataagcatcagttggctccaaggaagggaagtacatggctgggagttaggatggaagaatttttatcatgtacccttttaattttaaaacattgaatggaattactgtcttgtccagtactgtcccatagaactttctgtgatgatggaaatctgtatctgcatagtccaacatagtagtcaccagccacatgtggttactgagtacttgaaatgtggctagcatgattgagaaactgaattttaattttaattgatctaaatttaaatagttacatatggttagtgattgctgttttgaatagctcagatctgaaaaaaaaggtgttttattaagaaaaaaattatgaataaaacattaaggctgttaggacaaaataaaaactcgtcgttaggctcagaaatatgcaaaacttactaaaactctacccaatccagtaagagtgcttacatctttaaaattgtcaaataggattttggtaatcactaaatttggcaaattcagaaaattgaccaataaaattggcaggctaatcctaaaaatgctgggtgcatttaaaaaaaatccctgagaaatgctgaagttatatatttataagaataagatcttttattcactgaagatattacaggaaaatatttcacaaaacaagtttttgggaaacagattggtgaattcagctagttaagacaaatagattcttcagcagtttggccttcactgagttagctgtgccacacattgaccattccttggaagttttcttggatgcatctttatcagctgcagcagccataggggagtccctggaggcatgggcagaaaatttgaatggcccttcgtgatgaaaggaaggcagtcacctgaaaaggtatgaggaagagtttgtttctctgatcaaaccttcagagtttccacagcagagcagaaatataacttctgattgcagccatccttaggaccctgcatcaacccgggagcaaattactgagttatttctttttccgtgcctgattttattaaacatttatttacttagagaaaaatcatcatattccttataagagtgaaataattatcaatattttgaatctatgtttagaaataaatattttaatttgtattttaaatcaacccctatagggcaggaatttatgtagcatcttctgcatctgcttatacaaatgggctttaattttatagattaccagttatgtaacttagatttcttaaaactgtatacagataactaatttttattttgaaatagcttttatgttcttgtgtttatgtaatagtcacattaattttgctcttttggctttgtgttgtgtttatttgatgactgttttattcggtttaattttttcttgattttgcaaattcatttttatcatctttaagtggtggagtggccatttcagcttgaaatatttcactgtctttataatttcattccatgcatgtgttttgtgtttgtgacggtgtggtggtatttagtctatagaagaacatgtggagcaggtcaaccaaaactgcatagcagaagattgccacatcaaggtagtattccaagatcttgtatttagctcattctttaaagttcaaggagctaacgcctcatctctgatactaaccatgacctgcccaactggctaactactcagagaactcatagtactcccataccacttcagtggcacaggggaggagatgcttcactgtatctggcttgctctgtcttgcccttggttcttctctttcttgctccctgtcccatcttcacttgtcactttttctgttttaagcatggctgtttcatcttcttgattctgccttttctttccttcccatcaccaaccctaagccattgcatcttcctctcatcagtctcttttattcctttcgaagtatccctctttacaacttttccttatttctgtctcaccacccttacttcaaagggtggtttctttgcggttttctatggctttttactccactctgtgcctcttaatgtatacacattcttattgcagaatatttatgcacttttggaagagctaagagagacatactactgtataaattactaataaaaatatattagccatgttttataattaatcagtatcttaccatcacagtggaaattggggtgattacaggacatcagagaatttaagcaaattttccaaagctagttttcaacacattaaagttactcttacccttttttcttgctgctgctgctgctgctgctgctacattttcttcttatcctacatttaaatcttatgggatgtgcataactctaaatagagctgtgctgcagcaactaaaactgctgatgaatgttttctaggttgaagctgatctgggctatccaggtggaaaggcgaaagtcatccataaggaatctgatatgatcatggcattttctgttaataaggtaaaagctctcatcattatacacagtgtatttctccttagtgaaattgcttaaatcatcgattctgcctttgctttataggcaaattgtaatgaaattgttttggcttcaacacatgatgttcaagaacttgatgttacttctctactggcctgtcagtcatacatatggatcggagaagaatatgacagagaatccaaaaggtttgtctcatagtcacttttacatatagttttctgtaagaagtacccaccaaatggttatgcacatgatttgaattatttcaaaaggtatacgtgtatctccttcatttgggtaggtgacaaatataattggtttagctgccagtgaaagtctttgtctacattaactgaatgaattacacttccattaaaccctacactattgataatatttcaataagggataatccctaacacttggcttcatgatattcagtaaattaatctgatctggataattaaacagtagacacaaatatgttaattacactgagtcacatttaccgagtaattttgcagtgtttcttcttatcacctgataagcataccttttcttaaacataaaaatgtagacggctttacttttcattgaagctatggacactgcaccaagagtgttttgccattcttacctattttgaggtttcttctttgtggtttgccttccctcctgcttttctccagactcttagaaattgttcatgcttgaggatggtgccatgatagtttctctcctcattttgttgaattcttttttttgttagtatgtgatataactaggatttaatatcacatttcagagtagatataaccatgtactatgatacaatccatcccaacaattactttcacattttatatgtcttactccaagaaatctttaaactcaaatttctttaaacgtgttaatttgatactgagctatctgtacttgaagagaacataatatttttccatagataacaacaaacttttgtttcaacttgtgcagcaataaagttgtccccaaacaacattagactaaatttacattttgccaaaagggaaaaaagttaaccagtattaacattggcgattaggacttgtacctaagtttttctcatggctacttagtttttaaaataaagattgtcctatgggtacataagaagatttttagttggaatttgtgttaagagaaaagggaatgttcacagtaacacatgaatgtttttcacagttcagatgatgttgattatcgtggttccactacaactctttatcaacccagtgcaacatcctattcagcaagtcaggtgcatccaccttcatctctgccatggctgggcactggacagactagcactggagctagtgtggtatgttatttacttataggtatcatttctggatttggactctgaaaaatcagttggaatctctttgacataggaatgatcctaaatttcagggacaaacaccagtagataggccatgataatgacagctgacatttattgtggcttttttatttggtgacagggtctggctctgtcgcgcaggctggagtgcagtggtgcaatttcggctcactgcagccttgacctcctgggctcaattgatccttccatctcaacctcccaagtagctgggactacaggtgcatgccagcgtgcctggctaatttttgtattttttgtagggatggggtttcaccacgctgcccaggctgttctcgaactcctgggctcaagtgatctacccgcttcagcctcccaaggtgctaggattacaggcatgagccaccacactggcctcatatgactttcttagtgtcagatacatgctttttctcacaacaatcctaggtggtaggtgctattattaccctccattatcattttacagatgaataaacagatacaaaatggtaaagcaaagttaaaggggaattcatgtctacttctaagtgcttgaaagcatgtcagtaacattcttgtcactgtagctggaggggtcccattcttatgttctgctctgaagcatctggaggtgctcctgaatatcctcagggaggggcacttgaagaagagttcctttattatgagatgaagctccttggtaacctcacaggccagggctataccagcaagtgactgtgcttcctcaccctcttcagacaagtgttctatgtagtggttcagaacatccataacaggctttatctcagtaataagcaaggtgtaagagaataaatgtcagaatttatcctgaagcatatccttcctcatcttttctgcatacacaaaataaaatttttaaaattttcttttaaagcttatgaaaaggaatctacataatgttaagagaatgacttcacacccagtccatcaatactgtaagtatttatgacctaataattgtaagtgtcctcatttggaggttgatttatagaatagaaaatattggaactctttaatttcttatttcctgctttttctcttgtgtttcagatcttacaggtgctcaggacggcagtgtacgaatgtttgaatggacgcggcctcagcaacttgtctgctttcgtcaagctggcaatgcaagagttactagattatattttaattcacaaggcaacaaggttagtttctgggggctactgctgaattcatctgaaaatagttgtggatatttaggagtaagtgataaaagtgcatcgaaaaatgaattcagtgaccctggatttaaactgagtagacagtttgttggagtctattcatacactctcttttcttccaatagaagcaaaaatctacaaaatttagtatggattaatcatctatttaaagatactaaatatactgtgagagtaaaaaaactgcctgtgttgagtgtgttggtgattcctgtaagcacagtaaagttcttgagagaaacctagtttcttactaaatttcatcagtaagaggttagaggaaaacagtgaaacaggtaagcagttaagaagtaatggaagggccagtcacagtggttcacacctgtaattacaacactttaggagcccaaggcaggaggattgcttgaactccagcatttgagacaacctgaacaacaaagggagaccacatccctacaaaaatttttttaaaaagcccaggcatgtgcctctagtcctagctactcagaaggttgaggctggaggatcccttgaacccaggagtttgaggttatagtaagttataattgcactactgcactccagcctgggtaacagaatgagaccctgtctctaaaaaaatttaaaaaaaaagtgacagggaattttttagcacttggactttttgggaatgacagcaacagaaacatagttagaggcagaatgtttatttagtagggccttagtgaatcttccttccatgtttttacctttgctgtggatgctaagaacatgtgtttagtagttatactgttcttacagtgtggtgttgcggatggagagggttttctgagtatctggcaagttaaccaaactgcatcaaatcctaaaccttatatggtaagtatcactaaatgttcccagggcgcatatacacaacactttgttcatgaagtgtctgtttcagacagtgaatctcattggtggtcctattgggaaaaggatgatttttttcagcaatcccagcctgacagcagcacccatccttaccctagttttagactgaaatgacctgaaaaacaaaaagccttgcttttcaccttgaagtacagtttatattttaaaaattttgggggctttccctgtgtgtggtacaacttgggttttttttcattattattatactttcatccattttgaaaactctatcttcttaatatacacatgataaaattctgtcattaagaatcaggttctgccgggcacggtggctcacgcctgtaatcccagcactttgggaggccgaggcgggcagatcacaaggtcaggagttcgagaccagcctgaccaacctggtgaaaccccctctctactaaaaatacaaaaattagccaggcatggtgacacgtgcatgaagtcccagctactcgggaggctgaggcaggagaatcgcttgaacccaggaggcggaggttgcagtgagctgagattgtgccactgcgctctagcttgggcaacagagtgagacttcgtctcagaaaaaaaaagaatcaggttccaaacatctgttccaatttgttccagaattgtgcttaccagattataaaataaccaatcccaatgagccaccttaatccaaattggattacaaaatagttggtgatgaagataagtagatctttacctgatggagatatggtgggggaaaggaacatgggggagggtggaaggtgatgctgtcctgtgtgaaacttcaggcttcacatatatggagggaggttcagaacgccttgaacctcctgggaccagatagattacccaaatactttttaaaatttttctaaactatacatatgttcttaattatgtgtataagataattctcttaaattaggacactatagactgtaccttgtctatgcagaaatggaagtaatcttgaatttatacttttgtcttcagtcagatctgtaccactataattccagacagaaaaacatgcattatattttaaaataccttgacatcctaagactagttgggtctgtaagcatttcctttgtgactgttaaagtttattacatgtatttgagatcattagcactaaaattgacgggtcttaggtaggttcatgtactttgatgtcctattcttacataatctgaaaaacatgacctttaattctgtttttaccaactccagttattaaaaattattggacagtagccaaataatatacacatgacagttaagcctcatactatcacttattcttttatcctagaccgagtttttaaaaactatttttagctcatgcatatagtatgttattagcagacatgtatgttggtactgtatcaaattttatccaatggtaaaataacatcagttgcactttgtttttcgtagagttggcagtgccacagtaaagccacaagtgactttgcatttattacctcttcaagtctagttgccacatctggacactccaatgacaataggtaggttgacagaaaagcaaagtaagaaatataaaaacgttagaaatccatacctttagcaagaatacttttctattagtagggtttttccactctaggcattaaaaaaaaaaactttgttacataattcttatttcagagtgttttttcttaccaaaaagagaaaagcaaaaatgaaagttattcctaatatatgtaatttttattttaaagctattcagtcttttttaaactactactgttaacactgttagtttctctaggactaacaggcatctgatattgtctccatcattctcaacatttttattttattgcagtaggtttgggggaataggtagtgtttggttacatggataagttctttagtggtgattgctgagattttggtgcacccatcacctgagcagtgtacactgtacccagtgtgtagtcttttattcttcaccctcctcccacccctcccaagcccccagagtccattatatatcattctgatcctttgcatcctcatagcttagctcccacttacaagtgagaacatacgacatatgattttctactcctgagttacttcacttagaataatggcctctaactccatctgggttgctgcaaaatgtgattatctcattcctttttatgaagtattccatggtgtatatgtaccacattttctttatccatttgttggttgatggacatttaggttggttccatagttttgcaattgtgaattgtgctgctctaaacaggcatgtgcaagtgtctttttcatataatgacttcttttcctctgggtagatacccagtagtgggattgctggattgaatggtagttctgcttatagttctttaaggaatctccgtatactgtttttcatggtggttttactagtttacattcccaccatcagtgaggtgtccccttttcaccacctccatgccagcgtctattgttttttggttttttaattatggccattcttgcaggaataaggtggtatcgtattggagttttaatttgcattttcctggtaattagtggttttgagcattttttcctgtttgttggccatttgtattttgagaattatctgttcatgtcctttgctcgcttttgatgggattgttttttcttgttaagttccttgtagattctagatataagtcccttgtcagatatatacattgtattttctcccactctgcaggttgcctttttactcttgctgtgcagaagtgttttagtttaattaggtcccatttatttatttttgttgcatttgcctttgggttcttggtcatgaattctttaagtcaatgtctagagtagttttttttgatgttatcttctagaatttttatggtttcaagtgttagatttaagtttgacccatcttgagttaatttttgtataaggtgagagatgaggattcagggactaacaggtatttgacactgtccccatcattctcaacatttattttgacctcacatggttttcattagcaacacatgcccatgaataacatcttgtttccctgcagtggctaccacctggggatataaaagcattccttatactcaggaagtcatatcagtttcctggagtggcaatggaaaggagatggggtagaggatgcagagacgggcaggaccatgtgagatggaactgtgtagtttgaccctacccccatcctagttgggaatcactactctctataggtgtgagtgaacaaaaaagataagaatgaataagcaaaatatttgactgaaagacaggttgtccctgatgacgacttataacaatcatttatgatgtatttttgttattgagtttctttaaaagaaatgtttgcctctgggacacattaatatcacccggaaacagcctcattcatggtgagttaaggtctatgatttttaaaaatataccatgaaggaataatacaccatgaaggaatgctttcttggttttaattagtgaatccagtgagtgtttattgacaggttgaaaatggagaaatatttagaatgaatgactaaaaatttggaaagttaattagcatatctggcttccttgctgcagttaaagattatggtctcagaaatccaaaatagtctttatattctattcagaaaatatggtatggatagtggtactactaacaaggctatttaagaaattagttgcaaagtattcattgagcttaatagaaaataacatattttaaagaattaaacctcatcataaaatactttttgtctttttttcctttttgtggagatcaaggtcatgctgtattgctcaggcaggtctcaagctcctagggtcaagctatcctcccacctctacctccctaagtactgggattacaagcatgagccaccacacctggccctaaccataaaataaaacaaaggttaaccttattataatgactagaaatgtaaacagtgccatttaaatattattccttttaagacaatacttgccaaattagtgtcctaactctgtcttccacatagtaccacccaaaaagtgctccatgctcaagtaagtttggttaaatgaagtagattgtcagaaagacagaaagattctcagtcttttaatacactgatatgcattttgaaatatgtagttaattctcaattttattgcagaattctgcaaacagtggttaacattgcttacagattttctgcatgttaatttgaatctttaatcatattaaaatgcaaatactcctgggaaggataatgaacttcttaacttgtaactgaaaacattcacacattttctcatagtgtcgttgtttcaattacttacctgaaaagaactttttgtacggtacagcacttggctgggttaatactcaccaactttgagaaggttggtctctgctcttctgtatactttttatgaggcagtatcacttagggcttaaggtttaaactttctttttctctctgtgttcatttcatattgagattatggataaaaagtttgttctgacattgcttaacatttttctttaatcatgtgattacagaaattcaatgacttacaaaacaataaatgtaccttagaatgaaaaatgcatcagtaaggtctgtatttaaatgtggatgtagacatcataattaccaagacaagaaattgttttgagaaattctctgatgtttttcttcttcaggtttcacgtgccacgatcatggtgccacggtactgcagtatgcacccaaacagcaactcctaatctcggggggtaggaaaggacacgtctgcatttttgacatcaggcaaaggcagctcattcacacgttccaggcccatgactcagctaattaaggctctggccttggatccctatgaggaatattttaccacaggttcagcagaaggtaacataaaggtgagtcagtacaagaggttggaatgtgctaaagactgattggaaagagaaaaaacaaaaactccacattctttgaaataaagcttcactttatttcacttgggctactgcatggagatactgcatatctcaacactctgccgcctccccatgctcctgtatggttctttctaaactgttatggtcaatgagattatcaaactcattggactcaggccattagaaagctttaaagcattctattttgagtaaagtgtatgagtttaatgcatgaaattttttgatgacattagtttggctccttagaagcttctcccctctccctcagtactcttgtgtgtggtggaggtgacgtttccagtaagtgagctagtgcagatgctccttgactttatggtgggattatgtcccaacaaacccattataagttaaaaatattgttaaagttgaaaaacatactttcaacttaatattttcaacttactatgagtttattgagactaacctcaggataagccaaggagcgtgctgaatgcgtattgctttcacactgtcataaagtcaaaaagtcttgtcaaaccatcgtaagtaggggactgtctgtaccacactacttttacatagccttaggacctagctcagcatgaggaacacatttaactgaattaactcaaatagttaattgaattagagatgggctacatatggttaatatgaagccacaagaggatgtgaaggaaaatatggaaggaggacagtaaatgaatcgtgggagtggtgttatcatttcccacttagataagctcttaggaaagaggcagtgggtgggaaggttgggctttagtgagatcacttgggccaagggagcagaagggccatgtttttgcttttggtcttttcgtaatatatttttaactccttttgttttgcactaggtttggagattgacaggccatggcctaattcattcatttaaaagtgaacatgctaagcagtccatatttcgaaacattggggctggagtcatgcagattgacatcatccagggcaatcggctcttctcctgtggtgcagatggcacgctgaaaaccagggttttgcccaatgcttttaacatccctaacagaattcttgacattctataaagattggggttttatttttatatacatttcagttaaaaggcacactacagtcatcactaggcaattctgctttctaagcagttgtattgaaaacagagaatctctgtgtagaatttgaatatgacccaagctgagtattatctaaacaggttggtggaatgaatgcgcatgtaccttattatgctgacatactaaaaaaaataaaacctagtattgtatgaaggatagctattctttacagcatttagcaaacctgattcagaaaacatttgagattagcaaattagtaacttgaaataatgaaaaggacgtttataccaaattaaggaagaaaatgttgctgatttgggtttttcttcctgttcttaccactgactgaagcatgcctgcagtctcctcctctgttgaatgaaggataatcataaggtgtttgttaggagcgctagaccacctggaaaactttcttagctgtggagcagtgcgcagtgaccagttctctgctgtgagaggccgtttccattctttcctgctgaatatttttcctgttagtgtttatactgagctagtactgtaacttgcaaatgagtgcaaatttaaatgcaatgttttactcacaatttgcacattcacattttttggactgctagtttttctatttaaatatttgccttcatgttaggaatgtactatgtgaacatgacatatttgtagttaaccaaacacaccttcttagtccagtttagtactttttcttttcgtgtattcaaggttaaacacccaaacatttaaggatatgttgaaactacaccaatagagcatttcatatcataattaaaatgaatgttaggcttcttgtggccagttaatagttgatgagattggtgacattatttattgccacagcctattgtataaactatgcagagttaaatatttgcttgtaaaatattagccaatgttgtcattattttgatgtatttccttggttatgaccaaaaatatgttgagatactgaaactaatgtctgtgtgtttaaatgtttaccagcaaattgtcttatcatgttaatgagaatgttcaatgcctgtgtggtaaatagtaaatacaatggcataaaagtaactttctctgaagatgtgatgttcaggctgtgaaatatatatgtaaaagaaaaataaatgttatttgttagagtttttagtttgatactgtttttgaccattgagatttttaatttgataaaatgtttaactgttagagaatttgcaagctatttggcagtctattcattcataagtaagtatttactgaataccttctataccaaaagccattctaggaaatgggatacagtggagagccagacagagaaagcacacaatgttgagatttagcggggcaagagctaacctcactataccttctccagacagatttgaagtttattgaatgaagtactaacctcgtacccaaaactcaaatctgagtcttggctatttgcttgctcctaagtaagtaagggaagtcagaatatgcccactgataagaagagccaggaaaataagcttgtgagtgacatctcaatgcctaaagcaaaactgattcaaaggagctttcagaaaaaagggaagagaactttctctgtcaggtaaaagcagtaagagactctagattcaccttctagcttgaaacaactaaaa

SEQ ID NO: 881 - DNA, 2332 bp, Homo sapiens
gaactcctcgatgaggaccatctacagtgcttttttttttctatctctctgtctctcagttctgctttcttctacagtatttgatgactggcatcccatttctataagctgggtccagaactttgggctcacaccttcctttgacgtgcaagtgccacagaccctgagatgtttcttcagatcagggtgccgctggcatccactgaacttgcttcagtttaagctgagcaccttcctgagaatcatttcattttatctttcattctgtagtgagaagaggcttcagcatgaatagtctagggacatgcaagatgtataaaatagaatggagttgtgaattaggttatatgagggagaaatttataaaaaatataaagcattgtaaagacaaatgcatgttacacaaaaccaggagaccacttcattttaagaggtacctgctggtctcagaagctttaagtgatttataatctagtcaacaataagtggcagatgaactgaaaatatatttgcatgaagttcttagttcagaggtaaagctaggatgctatgcatggcaacactggaagggaaagagcttttgaaatccaggtctgggcatttgctctaatcagaggtcaacatcttctctgccctcataacccactccccgccaggggtcctgtctcctagaccacacattagcagatataatatctgtcattctggtttctcattctctttccagaaaaatccagacatgattttattgcaagatggagagaaaaggagacagcatcacatgtcttatattagtcacaaaaactggatgggttttatttcaggcgctaattcttttgagaacacaagggaaactttgatcttaatctatttgatgtggttttaagtaaaggagcatcttgtgcttactttgaaagtgtttttttacttcgggcttggtcaaatattacattttgttccagagaaaaactcatttggaaggcagcatggagtatagaattagacatccctgggcttgaagcccatctcagccatgaactacctttatgactttcagctagttacttttcctcactcagcttcagtttcttcatttataaagcaagtgcctcaacatcgctttttgactctcttaatcttgtctacgcatttacagtagcccttttattactgattttttactactcctggccatggaatgacgagaagcccatgtgtcattctcagacgggggattttgattctaatgacagtcatggttgagaagtccactgtgttaaagtctcttcatttgaagcatctgatgtgaattttattttttgcttaaaccccagacatagatgttaagtttcaaaattatgtcatacattcactcccactacatactcattgaatgcttaccatgtacagactctgtgatagactatggaaatacatagaaagaaattccctgtttttaagaactttacctagtgtttagaaattgcatttaaaactgataattaaaatactatagaccttggcttaaaggatgcaccttgtaatctgtaatcatatttgtagttatatattgctttgaaaatacactgtagacagtaagacaaaaaaggaaataaaaagtacatgaattgcgaaggagaaaataaaattgtctttgttcacagatgacatgattgtctatgtagaaaatcccgaggaactgacaaaacaaacaaacaaacaaatctagaactaattagttctagattatagcaaggttgcaggatacaagcttaatacctgaaagtaaattcctttcctatataccagccatgaacaattggaatttgaaatcaaaatacaacaccattaatattattaccaaaagagagagagggagaaatatgtattatgctaacaaaagaagtaaaaaaggtatgtgagaaaaactacaaatctctgatgaaataaatcaaaggagatctaaattaatggaaagacaaactatgctaatggataagaaaactcaatcttgttatgtgtcagttcattccaatttgatccatagattcaatgcaatcctagaaagctactttgtggacatctgcaaactgattctaaggtttacacgaaaaggcaaaaagatgcaatagtcgaaacaatattgaagaagaacaaagaagtcggactcttcttgacttcaagtctttctataaagctacaataatcaaaatagtgtggcattggtgaaagaatagatagatcaaaaccaattcaatggagaaagggaaaagacagtctttttaacaaatggtgctggaactggagttccttatgaaaaagaaaaggaaag

SEQ ID NO: 882 - DNA, 115 bp, Homo sapiens
tttttgtatattttagtagagacggggtttcaccgtgttagccaggatggtctcgatctcctgaccttgtgatccatccgccttggcctcccaaagtgctgggatgacaggcgtg

SEQ ID NO: 883 - DNA, 115 bp, Homo sapiens
gctgaggcaggagaatcgcttgaatccaggaggcggaggttgcagtgagccaagatcgcgccactgtactccagcctggcaacacagcgagactccatctcaaaaaaaaaaaaaa

SEQ ID NO: 884 - DNA, 2168 bp, Homo sapiens
aaagaaggcccctggctgtggcgccatgtgaaaaggatgaagacctccaggcccttctccctctgagtctccctccccctgatgaccctctggaagcctgctggctcctcctcaccctcactcacacttcaactcccagttggattggcctgtggacctacctgctgcgtctcagtaggagagaaagaatccagacctcaggaacttgacctcacagctccagggaattcaccacgtgggcgaacgggtagagtagaagatgctcagtgaacatgcgcactgaggtgggcgcccaaagagcatgcgcagtgagatgtgtgcttgccttaggggctgtggtgtccctccttgttccccctacccctgctctttcctccatcccttcctaggaccccactaaggactttggaatccatcctcccttgtgtgttttttttatgcctctgagactcaaatatctcaatatcaccgttcaaaactcactctgtgttcacctgaccctcctgccctctatggcccttgttcctcccttgtctgggcccctcaagggagcaagtgcatggtggtgttgctgacttctagtagaaggatgaggatctctatcaggccgtggaccaagtggcccaacccatcgaagtctgctcactttccctcatgttcactcacactcaacttctgggaggactgatctatggacctatctgatgtgttatagttagcaagaaagaagtcacaacatttcctcccacagctctgcagggacagaaggcagagagcatggcccacagggaacaggaatttgcataggaagggacatgcacattgagccagggactttcagggaatgccagagttttccctctgtcaccatgatagcagcagccactgccatcatactggctgcagcagggaagcccagccagagctgcatgctctgtggagccagcaaaagccagggacaagtgggatccccaccttttacaagttggggagggagcccctgggtgcccctgcagccacccaaactgcagttgaagacccagacttctggctctatggagcaggcaggatccctgccctcctgggtgcagctgtagccactggatccatggctgcagacccaggagctggggacaagtgggagccccaacccttcagagttggcgggtcaggagctccttgggtgcagctgcaacttccctccaaggtgcaggacccaggtgtgtctgtagcctgcaatctctgaagcctgggaaggcccccactgtccctggggagcagggaacaggggacactgtccctggggagcaggctcagaggtgtctgctcccactacctggtctctccctgctcccagcacccactatgatttcagagcaggttgtgggctgagcccctgcactctcacagctcagatgggcttgcacatgggcaggtcagccctggaatgccagccccctgccacctcagacccctccagaatttgggtgccaagaaacatgagaggggaagccaagggggtgctgagggcagctgggtagtgctctgcaggtccgagcagcctgggcaccatggactgcagtgggaggcagacagggtccagagcagaagggggtggtcctaggtaaggtcccaccttcaggccagggatgggccaggctgccaatcccagagaccagagtatggacttgtggtgccttttctaggcccacccatggactaatgtacatgcactttctcccctctgaggtccgtaaatgcctgggactcagccagagcagggcagaggatgggagacaatgggacaaccagctgcagagaggagctaccctctccagggcctcctctctgctgagagctgcagatgttggaaagacctgcctgcagagaggagacacactcttcagggcctcctctctgctgagagctgaacacttgacctgacgacctgcctaaagaggagctactgactgtggatctcctctgagctgttctaacactcaataaagctccacttgtttgcataccttattcttcccagatgcattaacaagaacttgaacaaaggtgccaccagacacagaggtttccagccagaaaattgactgcccaaagatcccatataacccgtacccacatccacagggcattttttagtaaaaaaaaaa

SEQ ID NO: 885 - DNA, 1561 bp, Homo sapiens
gtgtccagctgcctactttctgcccggatctctggctcctcatctctccggtctccgcagactaaagccctcgggatatgcagcagccatgcctgtgcacacgctgagccccggagccccgtccgcccccgccctaccttgccgcctgcggaccagggtccctggctacctgctacgggggccggcagatggtggagcccggaaaccgagcgctgtggagcgcctggaggccgacaaggccaagtacgtcaagagcctgcacgtggccaacacccgccaggagcctgtgcagcccctgctgtccaaacagccgctctttagccctgagactcgccgcacagtgctcacgcccagccgccgagccctgcctggcccctgccgacggccccagctggacctggacatcctcagcagcctcatcgacttgtgtgacagccccgtgtcccctgccgaggccagccgcactcctggacgggccgagggagccggccgtcctcccccagccacccctccgcgaccgccgcccagtacctctgcggtccgccgggtggacgtccgccccctgcccgcctcgcctgcccggccctgcccatcacccggccctgccgccgcctccagcccagcccggccgccgggtttgcaacgctccaagtcggacttgagcgagcgcttttctagggcagccgctgatctcgagcgcttttttaacttctgcggcctggacccggaggaggcgagagggttgggtgtggcccacctggcacgggccagctcggatatcgtgtccctggcagggcccagtgctgggccgggcagctctgaagggggctgctcccgccgcagctcggtgactgttgaggagcgggcccgggagcgcgttccctatggcgtgtcggtggtggagcgcaatgcccgcgtgatcaagtggttgtatgggctaaggcaggctcgggagagcccagcagctgaaggctaggcgccactgggcctggaattcgccacaggacggatcttacagaggcaagtggtccctggacctctcttgcatccattctctagacggccgtgtcagaggctccaccctgttgtgaacttggtatggaggcaaaggcttagaggctggaccagcattgttgggcaaggactgactctccaagggttttgttcttggctttggacacctgagaaccccctcctcccctcccccaatacaaggtttttgacatgagtgtactcctgcttagttcctcttgtggggctgcatttgcggtgctttgccctccccactgtgagtgaggggccaagggatctcctcaatcctgtctccccagcggctctgtttcctccttccttccttggcctctgtcctttgctgacttcctcttccttacccagcagaactcaccctggggtcggggcagtggggaggggcctatccactgctcttcctagtccttggcagctggcctaggtgggcagactataggagggactggttaggagtctgcattgctttgacttccctctccttggttaataaacacaaatgcttgtttctcaa

SEQ ID NO: 886 - DNA, 1561 bp, Homo sapiens
gtgtccagctgcctactttctgcccggatctctggctcctcatctctccggtctccgcagactaaagccctcgggatatgcagcagccatgcctgtgcacacgctgagccccggagccccgtccgcccccgccctaccttgccgcctgcggaccagggtccctggctacctgctacgggggccggcagatggtggagcccggaaaccgagcgctgtggagcgcctggaggccgacaaggccaagtacgtcaagagcctgcacgtggccaacacccgccaggagcctgtgcagcccctgctgtccaaacagccgctcttcagccctgagactcgccgcacagtgctcacgcccagccgccgagccctgcctggcccctgccgacggccccagctggacctggacatcctcagcagcctcatcgacttgtgtgacagccccgtgtcccctgccgaggccagccgcactcctggacgggccgagggagccggccgtcctcccccagccacccctccgcgaccgccgcccagtacctctgcggtccgccgggtggacgtccgccccctgcccgcctcgcctgcccggccctgcccatcacccggccctgccgccgcctccagcccagcccggccgccgggtttgcaacgctccaagtcggacttgagcgagcgcttttctagggcagccgctgatctcgagcgcttttttaacttctgcggcctggacccggaggaggcgagagggttgggtgtggcccacctggcacgggccagctcggatatcgtgtccctggcagggcccagtgctgggccgggcagctctgaagggggctgctcccgccgcagctcggtgactgttgaggagcgggcccgggagcgcgttccctatggcgtgtcggtggtggagcgcaatgcccgcgtgatcaagtggttgtatgggctaaggcaggctcgggagagcccagcagctgaaggctaggcgccactgggcctggaattcgccacaggacggatcttacagaggcaagtggtccctggacctctcttgcatccattctctagacggccgtgtcagaggctccaccctgttgtgaacttggtatggaggcaaaggcttagaggctggaccagcattgttgggcaaggactgactctccaagggttttgttcttggctttggacacctgagaaccccctcctcccctcccccaatacaaggtttttgacatgagtgtactcctgcttagttcctcttgtggggctgcatttgcggtgctttgccctccccactgtgagtgaggggccaagggatctcctcaatcctgtctccccagcggctctgtttcctccttccttccttggcctctgtcctttgctgacttcctcttccttacccagcagaactcaccctggggtcggggcagtggggaggggcctatccactgctcttcctagtccttggcagctggcctaggtgggcagactataggagggactggttaggagtctgcattgctttgacttccctctccttggttaataaacacaaatgcttgtttctcaa

SEQ ID NO: 887 - DNA, 1561 bp, Homo sapiens
gtgtccagctgcctactttctgcccggatctctggctcctcatctctccggtctccgcagactaaagccctcgggatatgcagcagccatgcctgtgcacacgctgagccccggagccccgtccgcccccgccctaccttgccgcctgcggaccagggtccctggctacctgctacgggggccggcagatggtggagcccggaaaccgagcgctgtggagcgcctggaggccgacaaggccaagtacgtcaagagcctgcacgtggccaacacccgccaggagcctgtgcagcccctgctgtccaaacagccgctcttcagccctgagactcgccgcacagtgctcacgcccagccgccgagccctgcctggcccctgccgacggccccagctggacctggacatcctcagcagcctcatcgacttgtgtgacagccccgtgtcccctgccgaggccagccgcactcctggacgggccgagggagccggccgtcctcccccagccacccctccgcgaccgccgcccagtacctctgcggtccgccgggtggacgtccgccccctgcccgcctcgcctgcccggccctgcccatcacccggccctgccgccgcctccagcccagcccggccgccgggtttgcaacgctccaagtcggacttgagcgagcgcttttctagggcagccgctgatctcgagcgcttttttaacttctgcggcctggacccggaggaggcgagagggttgggtgtggcccacctggcacgggccagctcggatatcgtgtccctggcagggcccagtgctgggccgggcagctctgaagggggctgctcccgccgcagctcggtgactgttgaggagcgggcccgggagcgcgttccctatggcgtgtcggtggtggagcgcaatgcccgcgtgatcaagtggttgtatgggctaaggcaggctcgggagagcccagcagctgaaggctaggcgccactgggcctggaattcgccacaggacggatcttacagaggcaagtggtccctggacctctcttgcatccattctctagacggccgtgtcagaggctccaccctgttgtgaacttggtatggaggcaaaggcttagaggctggaccagcattgttgggcaaggactgactctccaagggttttgttcttggctttggacacctgagaaccccctcctcccctcccccaatacaaggtttttgacatgagtgtactcctgcttagttcctcttgtggggctgcatttgcggtgctttgccctccccactgtgagtgaggggccaaggtatctcctcaatcctgtctccccagcggctctgtttcctccttccttccttggcctctgtcctttgctgacttcctcttccttacccagcagaactcaccctggggtcggggcagtggggaggggcctatccactgctcttcctagtccttggcagctggcctaggtgggcagactataggagggactggttaggagtctgcattgctttgacttccctctccttggttaataaacacaaatgcttgtttctcaa

SEQ ID NO: 888 - DNA, 161 bp, Homo sapiens
tcctctcttggtctcagctgggcctggttctcccggggcaggagggagggggtgtgggtggggcctgaggccccgcagctgctgccttgtgcctgctgattggctccttgtggaggggcgtggtctctaccttataatagggagggcgtcttatcctctca

SEQ ID NO: 889 - DNA, 285 bp, Homo sapiens
gggagggtctgttggggagagagcagggagggattcttggaagtggggaaggtgccagattgagtcttctccaatggttatggcttggtcttgggagggctccccctgttccaggattctggagcctcccgccttccctgcaggcctctgtggagggagcagggcggggggcttttgcactcctccctcccccaaccctgcagccttggggatctgtggaaacagcccctctattgttctgcctccagttggagtgtgagccctcggagggcctgcagctgctgc

SEQ ID NO: 890 - DNA, 415 bp, Homo sapiens
cgccccggtgccagcaccttcctttttggtggtcaggggcagagccacctactcgctgggttaacttaagcaagttgtttgcctctctgggcttcagtttctccatccaaaaaacggggctgttgagaggacctgaggttgagttgactggtgcgtagcacagagcctggagcctcccttgctccctttagcgcgtgccttgccctgtcttttctgctcaggttgcccaggtcttttttctctagcaccttttttcctctcttggtctcagctgggcctggttctcccggggcaggagggagggggtgtgggtggggcctgaggccccgcagctgctgccttgtgcctgctgattggctccttgtggaggggcgtggtctctaccttataatagggagggcgtcttatcctctca

SEQ ID NO: 891 - DNA, 285 bp, Homo sapiens; identical to SEQ ID NO: 889

SEQ ID NO: 892 - DNA, 285 bp, Homo sapiens; identical to SEQ ID NO: 889

SEQ ID NO: 893 - DNA, 415 bp, Homo sapiens; identical to SEQ ID NO: 890

SEQ ID NO: 894 - DNA, 1237 bp, Homo sapiens
gtagaatgccatggagttaatagcttctgtgatcctacatgttccaagataactgcagcagtccaaaaagccagtttcctttctggtgtttgtgggcatacactttgttctgctcctgagtaagtcacactttgtcttccaggtcctctaggatccctgcaatgttccatttgttgcctgggcattggagtaatagcagtgcttggtgctacagaaatagatggatggaagttgtggttactgtgacaccaaaaacttgtcccctgagctccctactcctctttctcctatattttttggtaattggctctgtcattcacctcactgcaggattcagaatcctggtactgggtcttgtatttctctttttcccttaccctccttatccaaattgtcaccaagttctgcttcatgctctcatgatttctcacctgagttaccctagtagcttccaaatagggccctctgatttcaaccttggacactcccactatcttttatattatggaaagatctaatcatgttaccccccatttaaaatccctcagagagcactgcagatacaattcaagccagttagcttagtgttaaggttttacatgcatttctgcagccatctgcccctattcttgcaccctaataatgccaaacttcttttaggccttaatttcatcatctgcaaaatgaggataataaatagtacctacttcatatgattgtaataaggcccctcaaaactgtttcatgcctcttttgcccactgcattaggctgttctcacattgctataaagaaatgcctgaggctgcgtaatttataaagaaaagaagtttaattgactcacatttctacaggctatacaggaagcatgatggtggcatctgcttggctgctggggagggctcagaaaacttacagtcagccgggcacagtggctcactcctgtaatcccagcacttggggaggccgaggtgggcagatcacctaaggtcagaagttcgagaccagcctgtccaacatggtgaaacctcatccctactaaaaatacaaaaattagccgggtgtggtggggcggcacctgtaactccagctactcagaaggctgaggcaggagaatcacttgaacccaggaggtggaggttgcagtgagccaagattgcgccactgcactccagcctggacaacagagtgggactctgtctcaaaaaaaaaaaaaaaaaaaaaaggaagcaagaaaa

SEQ ID NO: 895 - DNA, 1727 bp, Homo sapiens
aaatagaaaaacagaagagtagtgctttaagtaacccttgacactttacatcaatttacacatagacaataaatatgatcactattatacatatttatctagggtgggtagcgtggaactgtgaaaagagcaatagctttgaaccatgaagaccagcgttcaaatcccggctctccttttttctcattgggtcattttggggaaactacttaatagttaagtataggaagacagtcagaagactgggatctgggcaggatactaagaaggttgcaactgtatctgtaatggtaacttttgttttttcacctgaggaaaataaactaaaaataatgttttctaacatttagatattcaacacatggacaagtgtttaattattctttgtatattcctgttgtttgtaaaacagcttataatttttaaaactattttaaagggaatgaaagtaggaattacagggaggcagttatcaattagatataaggatgaattctctagtagagttagatgtaataaagatattgccacactctatccatatgtttatacatcaaatttttactgagtacatacatcatgagacaaaataaacttcctgtcacaaaaggtgcttgaccaaaactcaagaatcacctttcagggatactgttaaaagttttcccacatcagctaggagttagctctagagggcttttaagatctttggccatcccgaaattctatgcttgaaacacgttttctcatagaaacgctcctaccaaaggccagtgagagaactatcactttgtgaagaatttcagaatgcccactagctctcctgtagccctaaaaggtaatgagagtctacctgttcagactgagagctccagctgccttgtgctacagaagcagtaagtgcatgtaaaggacgccatatttctaagacaaaagcagtaacaatgactcaaggatgatgcccaatagacgatttaacctataactttgctaattgtcatattttcaaaacagccctatgggaagggtacacaaatgtctggggagtatttcctgctttttagcacccagggaactacaaccaggagcccagcttattttggattggggatggggatagacaagaagagatggggcagggagaagagacggctggtttattttacatacacatattttatttataatacatctctgtgtctaggcgtctctatgctgttctcataaaatctgaattatacaaataaaagtttaattcctggctgttttgaatgacttgggcctgtattacaaaattaatcagatacaattatactatcttcacaacaacaatcatctacattggttttgacaatgtacaaagtacttccatgtgtattatttcgtttatctttaccacaacctttgaagtaggaagacatgatgatccccattttactgcctaggacagagagacatcaggaggttaactgacttgttcactgagaaagcggaggagcacagactataactccaacagtttgaccccatactgcatacgcatcaggtccttaatcatgagactgtatgacccttctgagcctgggattcacttgcaactgggtattccctcttctacctcaggccccctataccttttcaaaaagtgtccttcactgtaaataatcttcctggtggtgaccctaaaggatctgacaacctggatctatgtaaaaaaaaaaaaaaaaaaa

SEQ ID NO: 896 - DNA, 1729 bp, Homo sapiens
aaatagaaaaacagaagagtagtgctttaagtaacccttgacactttacatcaatttacacatagacaataaatatgatcactattatacatatttatctagggtgggtagcgtggaactgtgaaaagagcaatagctttgaaccatgaagaccaacgttcaaatcccggctctccttttttctcattgggtcattttggggaaactacttaatagttaagtataggaagacagtcagaagactgggatctgggcaggatactaagaaggttgcaactgtatctgtaatggtaacttttgttttttcacctgaggaaaataaactaaaaataatgttttctaacatttagatattcaacacatggacaagtgtttaattattctttgtatattcctgttgtttgtaaaacagcttataatttttaaaactattttaaagggaatgaaagtaggaattacagggaggcagttatcaattagatataaggatgaattctctagtagagttagatgtaataaagatattgccacactctatccatatgtttatacatcaaatttttactgagtacatacatcatgagacaaaataaacttcctgtcacaaaaggtgcttgaccaaaactcaagaatcgcctttcagggatactgttaaaagttttcccacatcagctaggagttagctctagagggcttttaagatctttggccatcccgaaattctatgcttgaaacacattttctcatagaaacgctcctaccaaaggccagtgagagaactatcactttgcgaagaatttcagaatgcccactagctctcctgtagccctaaaaggtaatgagagtctacctgctcagactgagagctccggctgccttgtgctacagaagcagtaagtgcatgtaaaggacgccatatttctaagacaaaagcagtaacaatgactcaaggatgatgcccaatagacgatttaacctataactttgctaattgtcatattttcaaaacagccctatgggaagggtacacaaatgtctggggagtatttcctgctttttagcacccagggaactacaaccaggagcccagcttattttggattggggatggggatagacaagaagagatggggcaggaagaagagacggctggtttattttacatacacatattttatttataatacatctctgtgtctaggcgtctctatgctgttctcataaaatctgaattatacaaataaaaagtttaattcctggctgttttgaatgacttgggcctgtattacaaaattaatcagatacaattatactatcttcacaacaacaatcatctacattggttttgacaatgtacaaagtacttccatgtgtattatttcgtttatctttaccacaacctttgaagtaggaagacatgatgatccccattttactgcctaggacagagagacatcaggaggttaactgacttgttcactgagaaagcggaggagcacagactataactccaacagttcgaccccatactgcatacgcatcagggccttaatcatgagactgtatgacccttctgagcctgggattcacttgcaactgggtattccctcttctacctcaggccccctataccttttcaaaaagtgtccttcactgtaaataatcttcctggtggtgaccctaaaggatctgacaacctggatctatgtaaaaaaaaaaaaaaaaaaat

SEQ ID NO: 897 - DNA, 1333 bp, Homo sapiens
  misc_feature (36)..(36): n equals a,t,g, or c
gttgtttgtaaaacagcttataatttttaaaactanttttaaagggcaatgaaagtaggaattacagggaggcagttatcaattagatataaggatgaattctctagtagagttagatgtaataaagatattgccacactctatccatatgtttatacatcaaatttttactgagtacatacatcatgagacaaaataaacttcctgtcacaaaaggtgcttgaccaaaactcaagaatcacctttcagggatactgttaaaagttttcccacatcagctaggagttagctctagagggcttttaagatctttggccatcccgaaattctatgcttgaaacacgttttctcatagaaacgctcctaccaaaggccagtgagagaactatcactttgtgaagaatttcagaatgcccactagctctcctgtagccctaaaaggtaatgagagtctacctgttcagactgagagctccagctgccttgtgctacagaagcagtaagtgcatgtaaaggacgccatatttctaagacaaaagcagtaacaatgactcaaggatgatgcccaatagacgatttaacctataactttgctaattgtcatattttcaaaacagccctatgggaagggtacacaaatgtctggggagtatttcctgctttttagcacccatggaactacaaccaggagcccagcttattttggattggggatggggatagacaagaagagatggggcagggagaagagacggctggtttattttacatacacatattttatttataatacatctctgtgtctaggcgtctctatgctgttctcataaaatctgaattatacaaataaaagtttaattcctggctgttttgaatgacttgggcctgtattacaaaattaatcagatacaattatactatcttcacaacaacaatcatctacattggttttgacaatgtacaaagtacttccatgtgtattatttcgtttatctttaccacaacctttgaagtaggaagacatgatgatccccattttactgcctaggacagagagacatcaggaggttaactgacttgttcactgagaaagcggaggagcacagactataactccaacagtttgaccccatactgcatacgcatcaggtccttaatcatgagactgtatgacccttctgagcctgggattcacttgcaactgggtattccctcttctacctcaggccccctataccttttcaaaaagtgtccttcactgtaaataatcttcctggtggtgaccctaaaggatctgacaacctggatctatgtaaaaaaaaaaaaaaaaaaa

SEQ ID NO: 898 - DNA, 646 bp, Homo sapiens
gttaaagctaaatggcttagaatgaatcatgtctaaatattctgtataccaatcctacctatattatagggccctaaaagaagggtcagacgaagtatgctctaagtggctctcagtactgaatattcacagattaagttttacaaaaaggtaaagttttgtgataaccctcagataaaacagaaacatatgacctatgttttgacataaaacatacgtatttggcctgttctgaaaaatatgtataattttcacacaccacattctaccaaggaaaatgtcaaccggagccaaccaacttggtgttccactcatcaactcttttatgccaacatggtgtttctgcccttgtctcagaagccaactactgatacctgcttcagaaaactgactatgaattccacaaagtcctgcttttttcttttggattgtacaatcaacaaacaagtcacccttctaaaactctgtttctgaaattttaacataattcctgaagttccagagtctcttaaatgctaaaatattaacaataccattccattttttcccctaacactcagaagcatactgatacccatcctgtacacagccttttcttgcctgataacaagagcactaatgacagagctattgcatcaggttgatt

SEQ ID NO: 899 - DNA, 766 bp, Homo sapiens
tgtctcaaaggatgagttgagcttggataggcagtggggagaacacaaggcagtccaggcaggtggaacataagcgaaagggcagtgtgcccaccaggccaaagcaaagggcacatactgtcctgaaataggccacagagatgaggggaaataaaaagccgtctcaaggagatcttgaaagccagggtgagaagcctggagtttgcccctccaggatcctggctctcaatctggataagagtgaggggaagggaagtggaggtggggaggagggcagtgggggtggggagggccaggaactgctgactgggaagattattttctttgtgtattgcttaggttttgttttacttatttgttttcttgcagctttaacaaacatcagcgctgcatgtggaaacttggaaaagaaaaaaaaagctttaacaaacaaaaacacacatacctgagatgcacacggcaacctactagctcatggcaaacaggcctatatgttgataacctctgcattgcttaggaaataaaacactgcagattcttgagcaaggggaagtgcttctatctttgttcttcctttttctcctagtacatataacatctttactctggtctcagaatgtttcttccaaaccttaatggctctccccttctttttccttaacttcttcattccacccctggaataacgttctagtccagactagaaatacaacgtaaataaagactcaatcaatgccaacagtaggaggaggattaccacccagct

SEQ ID NO: 900 - DNA, 646 bp, Homo sapiens
gttaaagctaaatggcttagaatgaatcatgtctaaatattctgtataccaatcctacctatattatagggccctaaaagaagggtcagacaaagtatgctctaagtggctctcagtactgaatattcacaaattaagttttacaaaaaggtaaagttttgtgataaccctcagataaaacagaaacacatgacctatgttttgacataaaacatacgtatttggcctgttctgaaaaatatgtgtaattttcacacaccatattctaccaaggaaaatgtcaaccagagccaaccaacttggtgttccactcatcaactcttttatgccaacatggtgtttctgcccttgtctcagaagccaactactgatacctgcttcagaaaactgactatgaattccacaaagtcctgcttttttcttttggattgtacaatcaacaaacaagtcacccttctaaaactctgtttctgaaattttaacataattcctgaagttccagagtctcttaaatgctaaaatattaacaataccattccattttttcccctaacactcagaagcatactgatacccatcctgtacacagccttttcttgcctgataacaagagcactaatgacagagctattgcatcaggttgatt

SEQ ID NO: 901 - DNA, 766 bp, Homo sapiens
tgtctcaaaggatgagttgagcttggataggcagtggggagaacacaaggcagtccaggcaggtggaacataagcgaaagggcagtgtgcccaccaggccaaagcaaagggcacatactgtcctgaaataggccacagagatgaggggaaataaaaagccatctcaaggagatcttgaaagccagggtgagaagcctggagtttgcccctccaggatcctggctctcaatctggataagagtgaggggaagggaagtggaggtggggaggagggcagtgggggtggggagggccaggaactgctgactgggaagattattttctttgtgtattgcttaggtttcgttttacttatttgttttcttgcagctttaacaaacatcagcgctgcatggggaaacttggaaaagaaaaaaaaagctttaacaaacaaaaacacacatacctgagatgcacacggcaacctactagctcatggcaaacaggcctatatgttgataacctctgcattgcttaggaaataaaacactgcagattcttgagcaaggggaagtgcttctatctttgttcttcctttttctcctagtacatataacatctttactctggtctcagaatgtttcttccaaaccttaatggctctccccttctttttccttaatttcttcattccacccctggaataacgttctagtccagactagaaatacaacgtaaataaagactcaatcaatgccaacagtaggaggaggattaccacccagct

SEQ ID NO: 902 - DNA, 1044 bp, Homo sapiens
aggtgcctgtgatcccagctacttgggaggtggagcttgcagtgagccaagatctcgccagtgtatgccagcctgggcaacagtgtgagacttggtctcaaaacaaacaaacaaacaaaaaaacctaagtcccttcgctgtcaaatccttaggggagtaaattctgtcatctctgggtacctgttttcctgacttttcaaggtgttgaaaagagccttatgattcagccaaactttccaacagctctgatgggcagtttatcctcactcccactctacccagctctgttcctttcttctcttccactgtgtctgaatttgacagggtcccagtctcagtggtactgttcaaagtgtttataatgttactcttctgggcaatttttgcttcatacgtctccatccaatcaatgcatttcaggtgttgtggcagagagatttttgggggtgctggtacaagcaagacaggaataacccttaagtcacaataaaggcctctgcagggagtttttacattcacttcattttagacatcctcatttccctttcctacatcatgtaatttgtgtgattttttttttttagatggctattcatatgaaaaggaagcaatggaaaattggatcagcaaaaagaaacgtacaagtcccatgacaaatcttgttcttccttcagcggtacttacaccaaataggactctgaaaatggccatcaatagatggctggagacacaccaaaagtaaaattgttgatattgtattatttatattttcagtgatctcatttgaatgatttataggtaaatactaatcagacattattaaaagcaaaacaggaaaaaggtaaacttcttaaatttagttacctataaaaattgtcaattttcattctttaaaaaacacatggacttactataaaagcctttttgtactagtgaaaagaatcttcagctatatagaaataaagttatactttaaattgcagtgtcctaagttttttaaattcctcttactatcattcccaacagtgcccacatttattcttg

SEQ ID NO: 903 - DNA, 1044 bp, Homo sapiens; identical to SEQ ID NO: 902

SEQ ID NO: 904 - DNA, 318 bp, Homo sapiens
catctctctttataactaaaggttggactactctagaataacagatgtttacattctaggtaatagccattcattcaataactctttggaggccttttaaagagaccattttgtagcaaaatggttgtagattgtttatgattaaatggagaaaaatcacttcagatgttgaagcaatttttttggattttaagtttgcaggataacgatttttttcttattttccaaacctaggtacaagttagatgaaataaattctgagtaagtcaagttgactttgctgaaatatataacgtgacaaactctagcctcccttca

SEQ ID NO: 905 - DNA, 370 bp, Homo sapiens
gttacttatatgggaagggtgggtaacaaggattggacagggttagattagacccctctgaaggtaccttgttttatagttgtaactttttttttttttgagatggagtcttgctctgtcacccaggctggagtgcagtggtgcgatctcagctcactgcaacctctgtctcgcgggctcaagtgattctcctgcctcagcctcctgagtagctggaattacaggcacctgccaccatgcccagctaatttgtgtatttttagtagaggtagggttttgccatgttggccaggctggtctcaaacacctgacctcaagtggctccacccgccttggcctcccagagtgctgggatcacaggtgaaagcca

SEQ ID NO: 906 - DNA, 318 bp, Homo sapiens; identical to SEQ ID NO: 904

SEQ ID NO: 907 - DNA, 111 bp, Homo sapiens
agatggagtcttgctctgtcacccaggctggagtgcagtggtgcgatctcagctcactgcaacctctgtctcgcgggctcaagtgattctcctgcctcagcctcctgagta

SEQ ID NO: 908 - DNA, 9728 bp, Homo sapiens
caaagcagttctttgcaaacctttaacaatgacaaaagctacttactgtaaacctcacatgcagaccaaatcttgtcagacaggtaacttaggacaatgtgacttacatacttccccataccttcatctcacctaatgaaatacatgcttttcttgaatgacacctccaggatagattcatttggtcaatttgtcattttctgttgattttgcttacgtaattttagatattacctggagaatacagcatctcattttaaatcattatgatcaatctctgataaaggcctagaatacaaattatgtcaaaagtgaaaaaatactatctcgaaaatttccttggggataagactactaaaattataatgcttcctctgagaaaatcatctctttgcatgtggtttgtaatggtaacagttctgtttccttcctgtcagaatgaggtgaaattgttcaaatatgtattttttatgaaatttacagtgttacctgtgtattctaattatttgattaaataagcctttggggaggttgttgaggagagtatggtagggtatctggaactacatagtgtttttaaaggatgttttctttcttaaaaaaaaaaaatccctaaattctatttgtattttctgtaagttagaacagctgctgctttcttttttgtcctgttctttttaagttacctaacttaaaaaaactgggaattaaaaaaaaaaaggtactgaggtagttaaatttttctttatcaaattattttaacattgagcacctgtatataagtgttagttaacattgctccttaaatatgttttgtgtttttagatgatacttggaggacagaatatgttccagtgcctatccctgtgcctgtgtatatcccagttcctatgcacatgtacagtcagaatattcctgttcctactacagttcctgttcctgtaagtcacattttaagttctttctcattttgagatttagcagacacagttgggaaaacagtgtacagttgacccttgaacaacaagagtttgaactccatgcatccacatatgtggatgattttttttttttcccaataaatatgggcggccctctatattggcaggttccacatccgtgaccaaacacagactgaaaatacagtattctgcctgtaatcccagcactttgggaggctaaggtaggcgtatcttcagcccaggagttcaagaccagcctgggcaacatggtgacaccctgtctctactaaaaatgtaaaaattagccaggcacagtggcatatacctgtaatcccagctacttgggaggctgaggtaggaagattgcttgagcttgggagatggaggctgcaatgagccgtgattgcaccactgcactgcagcctggtctacaaagcaagtccttatctcaaaaaaaatgaaaataaaaaattatttgaggatgtgaaatctgtgtagaaggctgactgtaggggtgtggaacttgagtatgcatagactttggtatccatccacaggtggtcctggaaccaatcccctagaatactgaggataactctagttgcagttactagtttaatgaagctaataaaaccatctttacctttcttcgacagttaacttagatttggttgaatctctgttgtcatgattgattgctttgtgtatagtatgtatatgttcatcctcgagagtgacatttcgcggatgtctgtgcctgctctgtgcatattaagtttatatttgggttcattttcaaaaggaatatttgtgggccatgtgcagtggctcacgcctgtaatcccagcactttaggaggctgacatgggcagatcacctgaggtcaggagttcaagaccagactggccaacatggtgaaaccccctctctactaaaaatacaaaattagttgggcatggtggcacatgcctgtaatcccagctgctggggaggctgaggcaggagaatcgcttgaacccgggaggcggaggttgcagtgaactgagatagcgccattgcactccagcctgggcaacaagagtgaaattccatctcaaaaaaaaaaaagaaaaatatttgtgaagccataaggtttagaactgaaacatagaatttcatataaaatattattttatcccaaatcacttgcagtacttagaagaacactgtgtcagggcttggctattatagtcccctgggggacagaaatacttcaaaaattctttttctttaatttgaattccaaaaagtagatgcttgtattctaggctttcttatcacagttaacatcttagttttgtatgtgttcttttcaaagcttttatccagtgtgatattacaaagtagatcatgtgtcagagtaatttttaatttggaaaaataccttttaatgtttagtaaacctaactcaaaatgatttggttaattaggtgccagttcctgtttttctgcctgctccattggacagcagtgagaagattcctgcagcaattgaggagctaaaaagcaaggtttcttcagatgctcttgatacagagttgcttacaatgacggatatgatgagtgaagacgaggggaaaacagagacaaccaacatcaacagtgagctacactaaattataccttgcgaataagtgttaacattggttatttataagtattgttacagtactttccagggcatatcattttgtttcaacttatgtgggggtgaggaaagcattgtaacaaaaatgttttttatattaagagatctacactgtatttagccaggtgccctcagacagatatccgaagcaggaatttggtctttggtctctgttttaagcaggatttgacttgtaaaatcaactcaaaattattcttgttaatggagtagtgctgatgcaaaactataataacttgtagtagactctaatgatgatcaaaactcttattttgtaatagttatccctagttttttgttttgttttgtttttttttttagatgaactcttgctctgttgcccagggtggagtgtagtagcatgatcccggttcactgagatctctgcctcctgggttcaagctatgcttctgcctcagcctcctgagtagctggaattacaggcacgtgccaccacgcccagccaatttttgtctttttagtagagacagggcttccctatgttggccaggctgatctcaaactcctgacctcaggtgatccacctgcttcccaaagtgctggtattacaggtgtgagctaccacacccagcccctagttttcttttattgcttatactaataaaataatttgcattatctaaaccagagtttatcttaacctctgttagggcagtgcttgcgctacatggtataacgtgatgagtgtgttgtggatggttctaagtcacttagaatatttattttccacccttaaccctctcttgatacccaaagtcctatttcaaccttgagctaattcttacccttaccctagaggacaatcaaaatactataattttctctggatttaataatgagacagtgtttttgaagcactgtggtaaggagttgtgaaattagtgggttgcaaccagtgtttttgtttaagaaaagaaaaagctaagtggaatagggtaagagaaatgacagtgtgaatccctcatagaaagggtaagtattattttgtgaaaccagtgtgtatacagatgtctttctgttccccaccatcaccttgcagtatgtgctggataaaatgcatttcttgccatgattacaacacaaaaacacttgaaagcaactgatcgaaccattaaaaggcagttgttaatatgcatatattgaacaatctgagaaacctgggtcaaaattcaaagagtattgaaaactacagttgtctaccctcattagtttatttttgacaaaaagttgcttttagaaatactttacttgttgaagttgttttactatcaaagcatacctattagcttttgaagggagtcctcctgtaaaatttataggattaaaagttttcatgtgcttgtgactaattatgaggtttatagtggtttacattttgagatagttatatatataatatgcccttttcttttgtgacattatacgtatttttttatattgcatttaaaattaaatgacttgcttttgccagattaaatacagataccattggggttttctgttttgattcctaatgataatatggattgatttcaggtgtaattattgaaacagatataattggttcagaccttttgaagaactctgacccagagacacagtccagcatgcctgatgtaccatatgaaccagatttggatatcgaaatagattttcccagaggtactcaaaacctttatgactatggaatttagttatggagtcaactgtggttatgatcatttaccatttgatgtttgtgtcattgccttttagcagtgttcatattttttattcttgttattttttaaactcaccttaagagttaacttcatattttgttgttgtttttttttaaaaacccaccttaacagttaacttctggaatgagatcacttgagtccaggagttcaagaccagcctgggcaatgtggtgaaacactgtctctactaaaaatataaaaattagccaggcgtggtggtgcatgcctgtaatcccagctactcgggaggctgaggcaggaggattgcttgagcccaggaggtagaggttgcagtgagccgagattgtgctactgcactccagcttgggcagcagagtgagaccctgtctttaaaaaaaaaaaaaaaaaaaaaaattctagaagtaattcattatagaaagtttaaagaagtgtttgtgtcctttttaatttaaaaatgttgttagcatctgggtgcggtggcttatgcctgtaatcccagcactttgggaggccgaggtgggtggatcacctgaggtcaggagtttgagaccagcctggccaacgtcgtgaaaccccgtctctactgaaaatacaaaaattagctgggcgtggtggtgagtgcctgtaatcccagctactggggaggctgaggcagaattgcttgaactcaggaggcggaggttgcagtgagccaagactgcaccattgcactccaacctaggcaacaagagcaaaactctgtctcaaaaaatatatatatataaaaaatatataatatatataatacataaatataattttatatattatatacatcatgatgtatataatatataaatatatacaatatataatataaatataattttatatataatatatattttatatatattatatagtttttatatatataatatatatagttagcttttttttaagatcctttgaaaattaagttcaccttcaaaggaaaaattattttcaggtcttttgtaaaataagtgtgccccatttttcattattttcttaatccatggatggctaatgagcacactgagtagaatgtaaaacattagtttttggaaaaaacatttaatagattgaatcagatttgtaccaagaccatttagatcttgtaattggatttcagactataataatttttctggtatcatacattttcatgaaaattttatgttgatattcattttatatatgtttttaggagtttgaacagtgtttgtcagaattcacaaaccatgttaggtacaatgagtcatttactccccagcccagcctagattgtccccatgtatgaatgctggtttacatcctgtggttagttctttgttggctgtgtttatgtaaccctgtgctatttcatttaaaataaaagttctgatttggttgtcagctgctgaggagcttgatatggaaaatgaatttttattaccacctgtttttggcgaagaatatgaggaacagcccagacctcgatctaaaaaaaaggtacattcacttaatagcctatataacaatatttctctataggcaaacaaggatacagtgttcttttagtgtgcctgagaatatgggaacatattttgttttctaggttggaaaataatttattttctatttatatagaatatagtaataatatattactgctatttattactactatttattactatttctatttgtatagaaatagtaattattactatttctagtaataatagtagtaataatttatttctagtaataatttattactgtttctaagtaataaaaatatctcagatttagttgatacctcaactaaacttgtattgatacaaggtcaaaatagaaaacagttgctaaagtagtaagttcaattatttgacaaaaatttagactgttttctagggagctgttttttccacgattatttctgatgagatgatcagtggggttgaagtacacagtttattatttctggtctcttttaggcataccaacacacatagaaagacatgctggacagtttgatcattcaggtagaccaaatctacatgcattaacaagtgtaattgttataatattctgtcaactttctgtgtttctgacttccaacataaagcaggttttaaaaataccttaagaaagatagctttcacaaattgtccccaaaagaaagaaaaaaaaccggaaaagggagagaatacttggagtggaatgaaggtggacttctgcttgacaccaaacacaacaattaactcaaaatgagccatagacctaaatgtaagagctaacaatataaaactcttagaagaaaacataggcctaaatcttaatggccttatgttaggcagtttcttaggtaagataccaaacgcacagggaagaaaaggaaaaataaataaataaactggactacatcaaaattaaaaacttttgcattgcaaacagtgccatcaggaaagtgaaaagggggccaggcacagtggcacctgtaatcccagcacttacagcactcaggaaggctgaggcgggaagattggtggagcccaagagtttgagaccagcctgggcaacatagtgagacctctacaaaaactaaaaaataaaaaccagccaggcatggtggcacgtgcctgcagtcccagctacccaggaggaggatcgaggctgcagtgagctatgatcgtgccactgcactccagcttgggcaacagagcaagacctctcctcaaaacagaactccagcatggatacttacctggcaggggagataccgtgattacaaaactctagcatgggtgacagagcaaggccctgtcttaaaaaaacaaaaataaaacaataaaataaaaaagtgaaaagtacttaagtgtcactctctataaggtggagttgttgaaaagttcttcagtttctgttacagtaatatttagattattagtttattgtcttatatttattttctcatcattggtgactctcaccacagaatttaatatgattttgttgcacaaagtgatttatgtagaaacatcacatttcctggaatattaattgactgttgtcagattcaggaataccagtcagttcaaagcaaatacctatatttcattttttcttttctaatttcatgacacattaaacaaataactatatttttatgacagattaaacagataactatatttgtaattacagatgaccgttgtacaatgcagtggttgggctctgatcccccctgcacagtcacaaatttgtgtataacttttgactccctaaaaagttaagtactagtagcctactcttcactgagcccccctgcacagtcaaaaattcatgtattacttttgactccctaaaaagctaactactagtagcctactgttgactggaagccttgctgataacagttgattaacacatattttatatgctacatactgtatttttataataaagttagctagagaaaatgttatcaagagaatcatatgggagagaaaatatatttacgattcattaggtggaaatagatcatcctcattgtcttcaagttgagtaggctgaggaggaagaggagagaggttgatcttgctgtctcaggtggcacgattggaagaggtagaaggaggttggagaggcaggcacacagaaaaacatacgtgtccaagtggacccctgcagttcaaacccatgttgctcaagggtcaattgtaatttgcctttgttgagagatggcttgtataaagtaatgaaataatgtaggctttaaaaaagatattattatggtgttttttactaatagggagccaagagaaaggctgtatcaggataccagtctcatgatgatagttctgacaattcagaatgcagctttcctttcaaatatacgtatggcgtaaatgcatggaaacactgggtcaaaactaggcaacttgatgaagatcttctggtattagatgagttaaaatcttgtaagtgttttaattttgtttctcctaagtcctatttaaaatcaagatttctgttattgagtacctttaaatttaaaaaacataaatgtaacttaaaatacctgtaagaatgcattttattttacttcagagctcttacaaagaataacgtcagaaagtttcttaaccttaataagacgctaaataataacaattattttttattttatgtatttttagctaaatcagtaaagttaaaagaggatctactctctcacaccacagctgagcttaactatgggttagctcattttgtcaatgagatccgacggccaaatggagagaattatgcacctgacagcatctattacctttgccttggaatacaggaggttagtaatttgatggctgctttcaagtataacattaataagaaaagttgtggtagttcttgtttctgtagcattatggaacctttattgacttaccaagaaacacatctacaaagttgtatgtttgctgccatttatatataaatgataatcaggatgacattctttccttacccattgcagataagtgaattcacattataaggcatgatatgtagccacatctggctatagatccatgctgatctacatgtaaacagaaaaatgtcataactctgtaaataggtctgtttcactgtatgcttctgatgtgtttctaacttgttaaatagtataactactcattaattctttggctatttcataaaaagagatcattctttaggggtaaagataaacttcatccacatgtctatgaatttgttttctacagtaaacatggagatcaactttaaataatgacctctagttctgaacagattccacagatttgtgcccagaagtcagaaagaatctccaacttgacattctatgtattttgaaatatggtagatgacaggggagatctcttcagagttttgtttgtaggcctaaaaattcattttattctgctaacaggtgttagataatgaagtaaatcactgaagaaaactagaattgtcttaatttgtgttttttttactttttctttaggatagaaatttgcttaagattctgtaagtggtggtgcagatatatagtgcatggctataaatcactgtattcaaggaccatcatatatcttgcagtagcaacctaaaagatacgtgaataggtttacttttttcttattctcgttttataggtttacatgtactttgagcctcatgcttagatgataatataggtccaccattccacaaacctctgaaaagcagaatttttttcatgaaaacacagtaaacagtaaaacctaactt

SEQ ID NO: 909 - DNA, 9718 bp, Homo sapiens
caaagcagttctttgcaaacctttaacaatgacaaaagctacttactgtaaacctcacatgcagaccaaatcttgtcagacaggtaacttaggacaatgtgacttacatacttccccataccttcatctcacctaatgaaatacatgcttttcttgaatgacacctccaggatagattcatttggtcaatttgtcattttctgttgattttgcttacgtaattttagatattacctggagaatacagcatctcattttaaatcattatgatcaatctctgataaaggcctagaatacaaattatgtcaaaagtgaaaaaatactatctcgaaaatttccttggggataagactactaaaattataatgcttcctctgagaaaatcatctctttgcatgtggtttgtaatggtaacagttctgtttccttcctgtcagaatgaggtgaaattgttcaaatatgtattttttatgaaatttacagtgttacctgtgtattctaattatttgattaaataagcctttggggaggttgttgaggagagtatggtagggtatctggaactacatagtgtttttaaaggatgttttctttcttaaaaaaaaaaaatccctaaattctatttgtattttctgtaagttagaacagctgctgctttcttttttgtcctgttctttttaagttacctaacttaaaaaaactgggaattaaaaaaaaaaaaggtactgaggtagttaaatttttctttatcaaattattttaacattgagcacctgtatataagtgttagttaacattgctccttaaatatgttttgtgtttttagatgatacttggaggacagaatatgttccagtgcctatccctgtgcctgtgtatatcccagttcctatgcacatgtacagtcagaatattcctgttcctactacagttcctgttcctgtaagtcacattttaagttctttctcattttgagatttagcagacacagttgggaaaacagtgtacagttgacccttgaacaacaagagtttgaactccatgcatccacatatgtggatgattttttttttttcccaataaatatgggcggccctctatattggcaggttccacatccgtgaccaaacacagactgaaaatacagtattctgcctgtaatcccagcactttgggaggctaaggtaggcgtatcttcagcccaggagttcaagaccagcctgggcaacatggtgacaccctgtctctactaaaaatgtaaaaattagccaggcacagtggcatatacctgtaatcccagctacttgggaggctgaggtaggaagattgcttgagcttgggagatggaggctgcaatgagccgtgattgcaccactgcactgcagcctggtctacaaagcaagtccttatctcaaaaaaaatgaaaataaaaaattatttgaggatgtgaaatctgtgtagaaggctgactgtaggggtgtggaacttgagtatgcatagactttggtatccatccacaggtggtcctggaaccaatcccctagaatactgaggataactctagttgcagttactagtttaatgaagctaataaaaccatctttacctttcttcgacagttaacttagatttggttgaatctctgttgtcatgattgattgctttgtgtatagtatgtatatgttcatcctcgaggagtgactttcgcggatgtctgtgcctgctctgtgcatattaagtttatatttgggttcattttcaaaaggaatatttgtgggccatgtgcagtggctcacgcctgtaatcccagcactttaggaggctgacatgggcagatcacctgaggtcaggagttcaagaccagactggccaacatggtgaaaccccctctctactaaaaatacaaaattagttgggcatggtggcacatgcctgtaagcccagctgctggggaggctgaggcaggagaatcgcttgaacccgggaggcggaggttgcagtgaactgagatagcgccattgcactccagcctgggcaacaagagtgaaattccatctcaaaaaaaaaaaagaaaaatatttgtgaagccataaggtttagaactgaaacatagaatttcatataaaatattattttatcccaaatcacttgcagtacttagaagaacactgtgtcagggcttggctattatagtcccctgggggacagaaatacttcaaaaattctttttctttaatttgaattccaaaaagtagatgcttgtattctaggctttcttatcacagttaacatcttagttttgtatgtgttcttttcaaagcttttatccagtgtgatattacaaagtagatcatgtgtcagagtaatttttaatttggaaaaataccttttaatgtttagtaaacctaactcaaaatgatttggttaattaggtgccagttcctgtttttctgcctgctccattggacagcagtgagaagattcctgcagcaattgaggagctaaaaagcaaggtttcttcagatgctcttgatacagagttgcttacaatgacggatatgatgagtgaagacgaggggaaaacagagacaaccaacatcaacagtgagctacactaaattataccttgcgaataagtgttaacattggttatttataagtattgttacagtactttccagggcatatcattttgtttcaacttatgtgggggtgaggaaagcattgtaacaaaaatgttttttatattaagagatctacactgtatttagccaggtgccctcagacagatatccgaagcaggaatttggtctttggtctctgttttaagcaggatttgacttgtaaaatcaactcaaaattattcttgttaatggagtagtgctgatgcaaaactataataacttgtagtagactctaatgatgatcaaaactcttattttgtaatagttatccctagttttttgttttgttttgtttttttttttagatgaactcttgctctgttgcccagggtggagtgtagtagcatgatcccggttcactgagatctctgcctcctgggttcaagctatgcttctgcctcagcctcctgagtagctggaattacaggcacgtgccaccacgcccagccaatttttgtctttttagtagagacagggcttccctatgttggccaggctgatctcaaactcctgacctcaggtgatccacctgcttcccaaagtgctggtattacaggtgtgagctaccacacccagcccctagttttcttttattgcttatactaataaaataatttgcattatctaaaccagagtttatcttaacctctgttagggcagtgcttgcgctacatggtataatgtgatgagtgtgttgtggatggttctaagtcacttagaatatttattttccacccttaaccctctcttgatacccaaagtcctatttcaaccttgagctaattcttacccttaccctagaggacaatcaaaatactataattttctctggatttaataatgagacagtgtttttgaagcactgtggtaaggagttgtgaaattagtgggttgcaaccagtgtttttgtttaagaaaagaaaaagctaagtggaatagggtaagagaaatgacagtgtgaatccctcatagaaagggtaagtattattttgtgaaaccagtgtgtatacagatgtctttctgttccccaccatcaccttgcagtatgtgctggataaaatgcatttcttgccatgattacaacacaaaaacacttgaaagcaactgatcgaaccattaaaaggcagttgttaatatgcatatattgaacaatctgagaaacctgggtcaaaattcaaagagtattgaaaactacagttgtctaccctcattagtttatttttgacaaaaagttgcttttagaaatactttacttgttgaagttgttttactatcaaagcatacctattagcttttgaagggagtcctcctgtaaaatttataggattaaaagttttcatgtgcttgtgactaattatgaggtttatagtggtttacattttgagatagttatatatataatatgcccttttcttttgtgacattatacgtatttttttatattgcatttaaaattaaatgacttgcttttgccagattaaatacagataccattggggttttctgttttgattcctaatgataatatggattgatttcaggtgtaattattgaaacagatataattggttcagaccttttgaagaactctgacccagagacacagtccagcatgcctgatgtaccatatgaaccagatttggatatcgaaatagattttcccagaggtactcaaaacctttatgactatggaatttagttatggagtcaactgtggttatgatcatttaccatttgatgtttgtgtcattgccttttagcagtgttcatattttttattcttgttattttttaaactcaccttaagagttaacttcatattttgttgttgtttttttttaaaaacccaccttaacagttaacttctggaatgagatcacttgagtccaggagttcaagaccagcctgggcaatgtggtgaaacactgtctctactaaaaatataaaaattagccaggcgtggtggtgcatgcctgtaatcccagctactcgggaggctgaggcaggaggattgcttgagcccaggaggtagaggttgcagtgagccgagattgtgctactgcactccagcttgggcagcagagtgagaccctgtctttaaaaaaaaaaaattctagaagtaattcattatagaaagtttaaagaagtgtttgtgtcctttttaatttaaaaatgttgttagcatctgggtgcggtggcttatgcctgtaatcccagcactttgggaggccgaggtgggtggatcacctgaggtcaggagtttgagaccagcctggccaacgtggtgaaaccccgtctctactgaaaatacaaaaattagctgggcgtggtggtgagtgcctgtaatcccagctactggggaggctgaggcagaattgcttgaactcaggaggcggaggttgcagtgagccaagactgcaccattgcactccaacctaggcaacaagagcaaaactctgtctcaaaaaatatatatatataaaaaatatataatatatataatacataaatataattttatatataatatacatcatgatgtatataatatataaatatatacaatatataatataaatataattttatatataatatatattttatatatattatatagtttttatatatataatatatatagttagcttttttttaagatcctttgaaaattaagttcaccttcaaaggaaaaattattttcaggtcttttgtaaaataagtgtgccccatttttcattattttcttaatccatggatggctaatgagcacactgagtagaacgtaaaacattagtttttggaaaaaacatttaatagattgaatcagatttgtaccaagaccatttagatcttgtaattggatttcagactataataatttttctggtatcatacattttcatgaaaattttatgttgatattcattttatatatgtttttaggagtttgaacagtgtttgtcagaattcacaaaccatgttaggtacaatgagtcatttactccccagcccagcctagattgtccccatgcatgaatgctggtttacatcctgtggttagttctttgttggctgtgtttatgtaaccctgtgctatttcatttaaaataaaagttctgatttggttgtcagctgctgaggagcttgatatggaaaatgaatttttattaccacctgtttttggcgaagaatatgaggaacagcccagacctcgatctaaaaaaaaggtacattcacttaatagcctatataacaatatttctctataggcaaacaaggatacagtgttcttttagtgtgcctgagaatatgggaacatattttgttttctaggttggaaaataatttattttctatttatatagaatatagtaataatatattactgctatttattactactatttattactatttctatttgtatagaaatagtaattattactatttctagtaataatagtagtaataatttatttctagtaataatttattactgtttctaagtaataaaaatatctcagatttagttgatacctcaactaaacttgtattgatacaaggtcaaaatagaaaacagttgctaaagtagtaagttcaattatttgacaaaaatttagactgttttctagggagctgttttttccacgattatttctgatgagatgatcagtggggttgaagtacacagtttattatttctggtctcttttaggcataccaacacacatagaaagacatgctggacagtttgatcattcaggtagaccaaatctacatgcattaacaagtgtaattgttataatattctgtcaactttctgtgtttctgacttccaacataaagcaggttttaaaaataccttaagaaagatagctttcacaaattgtccccaaaagaaagaaaaaaaaccggaaaagggagagaatacttggagtggaatgaaggtggacttctgcttgacaccaaacacaacaattaactcaaaatgagccatagacctaaatgtaagagctaacaatataaaactcttagaagaaaacataggcctaaatcttaatggccttatgttaggcagtttcttaggtaagataccaaacgcacagggaagaaaaggaaaaataaataaataaactggactacatcaaaattaaaaacttttgcattgcaaacagtgccatcaggaaagtgaaaagggggccaggcacagtggcacctgtaatcccagcacttacagcactcaggaaggctgaggcgggaagattggtggagcccaagagtttgagaccagcctgggcaacatagtgagacctctacaaaaactaaaaaataaaaaccagccaggcatggtggcacgtgcctgcagtcccagctacccaggaggaggatcgaggctgcagtgagctatgatcgtgccactgcactccagcttgggcaacagagcaagacctctcctcaaaacagaactccagcatggatacttacctggcaggggagataccgtgattacaaaactctagcatgggtgacagagcaaggccctgtcttaaaaaaacaaaaataaaacaataaaataaaaaagtgaaaagtacttaagtgtcactctctataaggtggagttgttgaaaagttcttcagtttctgttacagtaatatttagattattagtttattgtcttatatttattttctcatcattggtgactctcaccacagaatttaatatgattttgttgcacaaagtgatttatgtagaaacatcacatttcctggaatattaattgactgttgtcagattcaggaataccagtcagttcaaagcaaatacctatatttcattttttcttttctaatttcatgacacattaaacaaataactatatttttatgacagattaaacagataactatatttgtaattacagatgaccgttgtacaatgcagtggttgggctctgatcccccctgcacagtcacaaatttgtgtataacttttgactccctaaaaagttaagtactagtagcctactcttcactgagcccccctgcacagtcaaaaattcatgtattacttttgactccctaaaaagctaactactagtagcctactgttgactggaagccttgctgataacagttgattaacacatattttatatgctacatactgtatttttataataaagttagctagagaaaatgttatcaagagaatcatatgggagagaaaatatatttacgattcattaggtggaaatagatcatcctcattgtcttcaagttgagtaggctgaggaggaagaggagagaggttgatcttgctgtctcaggtggcacgattggaagaggtagaaggaggttggagaggcaggcacacagaaaaacatacgtgtccaagtggacccctgcagttcaaacccatgttgctcaagggtcaattgtaatttgcctttgttgagagatggcttgtataaagtaatgaaataatgtaggctttaaaaaagatattattatggtgttttttactaatagggagccaagagaaaggctgtatcaggataccagtctcatgatgatagttctgacaattcagaatgcagctttcctttcaaatatacgtatggcgtaaatgcatggaaacactgggtcaaaactaggcaacttgatgaagatcttctggtattagatgagttaaaatcttgtaagtgttttaattttgtttctcctaagtcctatttaaaatcaagatttctgttattgagtacctttaaatttaaaaaacataaatgtaacttaaaatacctgtaagaatgcattttattttacttcagagctcttacaaagaataacgtcagaaagtttcttaaccttaataagacgctaaataataacaattattttttattttatgtatttttagctaaatcagtaaagttaaaagaggatctactctctcacaccacagctgagcttaactatgggttagctcattttgtcaatgagatccgacggccaaatggagagaattatgcacctgacagcatctattacctttgccttggaatacaggaggttagtaatttgatggctgctttcaagtataacattaataagaaaagttgtggtagttcttgtttctgtagcattatggaacctttattgacttaccaagaaacacatctacaaagttgtatgtttgctgccatttatatataaatgataatcaggatgacattctttccttacccattgcagataagtgaattcacattataaggcatgatatgtagccacatctggctatagatccatgctgatctacatgtaaacagaaaaatgtcataactctgtaaataggtctgtttcactgtatgcttctgatgtgtttctaacttgttaaatagtataactactcattaattctttggctatttcataaaaagagatcattctttaggggtaaagataaacttcatccacatgtctatgaatttgttttctacagtaaacatggagatcaactttaaataatgacctctagttctgaacagattccacagatttgtgcccagaagtcagaaagaatctccaacttgacattctatgtattttgaaatatggtagatgacaggggagatctcttcagagttttgtttgtaggcctaaaaattcattttattctgctaacaggtgttagataatgaagtaaatcactgaagaaaactagaattgtcttaatttgtgttttttttactttttctttaggatagaaatttgcttaagattctgtaagtggtggtgcagatatatagtgcatggctataaatcactgtattcaaggaccatcatatatcttgcagtagcaacctaaaagatacgtgaataggtttacttttttcttattctcgttttataggtttacatgtactttgagcctcatgcttagatgataatataggtccaccattccacaaacctctgaaaagcagaatttttttcatgaaaacacagtaaacagtaaaacctaactt

SEQ ID NO: 910 - DNA, 542 bp, Homo sapiens
gaaaacattgcgaccagaggctcacaggaacctaatcttgtatttcccattgcagcagtggttcagtagtcattgtttggggcaaccgtatagaacataactattccgaattatgtacctacattttctccgtatcaatagatgatgtggagagtaccttatttttactcccttacgctcatatcttccacttatttcagattttatttatgtggggttttgtcttgtttgcaatgcaaataatgctgcagtgaacttagtgtgaaatatctgagagactgcatctgtagaataggtttcagaaattgccattgctgggccgcaggaaatacacaacttaaagtttgaggatatctttggtaattgttttcatttttcttttcaaatttataatcatatttaaagccatttatccagcagagggagtgagagtatcagagagccataataactgttggatcttctttttctgaaataaatttaaaagtacccaagtattttcatagttcaggtttgcaaccttgattttgtacttaaaagtt

SEQ ID NO: 911 - DNA, 542 bp, Homo sapiens; identical to SEQ ID NO: 910

SEQ ID NO: 912 - DNA, 2845 bp, Homo sapiens
tttgtaaattgaattcaggtagtagtatcatccaccaatccatctgttgctttgttggtcttctgaaggggggatttaaaactctgaaacagtctgagcaccttgagagaaatcagaaacaagacaattatttgcagtgctgtcaaacaagccagaaggagaaaatcaaggtagaatgccccactttccagttgccttaggatagcaggctgcagcctcagacttgatcctgtcattctcctctgtctcccacatctgaattgataattgctgcaaaatgtcattagcctacacttcatccatcagggctcttggattcttacaccacgacttgctgtgcaaggtgtttattgcatcttcaaagtgaaactttaaattattattcaaacatttattttccttttgttttaaaaagagtccctacaatgatcacttctaagatttttttttaccttcccctctgcagcacacacagctattcaacaatgatttctaaaattcatatttcaaatttgtatctctccattttgaaacattatagaaagcatgggatgcttgagacaaatctggtttctcctttgaagtagctgttgacaacctactctcttgaaaagttagatataattcttaatcatgtttagtggaaatttgtttacctgttccatctgttttgctgtttcattgtaaggaagatgagaagtgttggaacagcttccctcccctaaaggtattctagcagaggcgagacagcaacttggcgggcatgttgcataggagttaagtaccagatggggaattgcccatgtgatggtgaagagtctctcacattgattttcttccttttctcctcttctctcctccttctcttctctcctctttctcttctcttctttctcttctcttctgtcttcctcttcctcttctcttcctctcctcttcctctttctctctcttcctttttctcttcctctttctctttctctttctcttctcttctctctctcttccttccttctttctttccttccttccttccttccttccttccttccttccttctttccctccctccctccctccctcctccctttttctttttctttctttttttttggtttggcagagtcttgctctgttgcccaggctgcagtgcagtggtgtgatctcggctcactgcaacctccacctcccgggttcaagcaattctcttgcctcagcttctccagttactgggactacaggtgcataccaccatgcccggctaatttttgtatttttagtagaggcggggttttgtcatgttggccaggctgatctcaaactcctgacctcaggtgatccgcctgcctcagccttccaaagtgctgagattacaggcatgagccgctgtacccggcctgattttctatgattctgcctttaaaagacagcacgtataccaagcctttttcagaaagcttttctcttaactccttctaatgctgaattttctctctattatcctcacccaattttggctgagagttagtgtacacaatttaacttcttagaaaaattccagtgtctatgcttatattgctcacttgaatcatttgaattagaaagggatctacaaataataaaagcaaagagtgcagacagattagggatagtaattcttaaagtgccatctatcccagatttccgttatagaccagcatatgtgtaattgtgcagtgggaggtaagtagtacccaggacattgcatgtacaatactttgaaacaaagtggcaacaaagatttcctggctcaggtatgcaccccagctgctggtttagatgaagtgctgagaatatttagaaaaagcgctttaaaaagcatctagagattatcatgaaaataattggagacaaagtcactaggctgctttgtgagaggcagcataccatggctctaaacccgttcacaaaaaacaatgttagagacattaggaattcaggttttgaaaatctttttttcgatttatttgtaatttacataccaaaaaaccacattaaaatagtcctcccttcaacatggctatcttttttcaagttttatatgcatagctctctcagcacttgaatggaaaaactgttacagcatttgggagttgtttttcttttagactttgcagatcttatctcaaggtgactaggaacccagagctaagtatctgtgaggcaatctctgcgaacgctgaacttacctagttggtttctatgaaatatgtagaatgcactgcagtagccattgtaagaaggtactataccggttttttggggcttgttgttgttgtttggtctgagaatgtactgccaacccctcttttataagagagaactgattttgatacatattttaaaatatgatagtacagagttaatggatgttaaaattttatttctttgttttggtaagtagattaaatcgagaatcatataatcagtacatttgagaattatataaccagtatataataatactggacacaaccatttgccatcttttcctgttatcatcccatagagtgggtggggagaatgaatagacataaacctagaataatgataaatggtttttaaaactctatattgaatacattccagctgataatgacttttctttttcaccttggtgatatcagcctcagggtaaaaaaaaaagtttcataaatcttttagttataaacaggaaagttttatattagtgtgtcatttcatttctagactgttgatggtgatgatgataaagaatttggagccaattttgatatatgaatgtattgcttttacatgtgatgattaaagctctccattagcagtt

SEQ ID NO: 913 - DNA, 2395 bp, Homo sapiens
gtgaatttgtggaagcaatctgcattcataactttgattggagaataaatggtatacatggtgctgtctttggaaaaggtaattatcagaattccaggtccaatttgagccccaggagagagtttcctctttttagaggaatataaatataaatatgaactgctttatggcaaatatatagagaatgataaaacaaatggattataattgcattgtgtacgagaatagatactagtgtttttgttttattttgtttttaagaaaatcataggtaagaatattagtgagcaataaggaatagtgggggaaaacttcacgttatttataatgttgtgaaaatccaagtttttcaatttatgtctggtactcaggcaaattaaggagagaggtgaggggaaaaggtatgggatgtacatttaattttctggtccttactttgtaccttgcttccagcaagagaactgactactgtttaggatcaggatatgctgcattttgaaaatgtaaattaatttaaaaaataactactaaaaaggccattccacttatttaactgtaaggaggtcagaaggtgttacataaatcccatcagtgttaggtaaatatgagactttgcaattcatttccacatttttttagagtaagaatgcccttaatgatgtctatctcttgtgtctaccatttcagaagagttggctgctttatcgagttttcatgtgtaggcagtgagccagtaaaatcatttttgttttggaatgctcagatatgaatagcattatactctctcagaaatcttttcatggatatgggattctattgtttccagaaatattactgaattgttatcccatatcatagaaatacggtttcttggggtttaaaagaatccctgtaggccatcggtttccactgtgctctctagagctttgctggatgttgacaagggaacagggtgaggaagtggtgaaaggaaatagaaacgggagggagggccaagcagtaaaactcagggccgggcatggtggctcacgcctgtaatcccagcagtttgggaggtcgaggcaggtggatcacctgaggtcaagagttcaagatcagcctggccaacatggtgaaaccctgtctctactaaaaaaatataaaaattagttgggtgtggtggcacgcgcctgtaatcccagctactcaggaggctgagggaggagaatcgcttgaacctgggaggcggaggttgcagtgagctgagatcgcgccactgcactccagcttgggagacagagcaagactctgtctcaaaaaaacagaacaaaacaaaactcaggtccaaccacacttttaatcattaaaccagttttatctgttttattaattgttttctttgtaagatttattttaaaaacagaagtctgatagctatattttggtgggggcaggggatggtgttggtggtgaggactggtctgtaccaacaaatctattcctatggcagtctatactacagctgtccataacagatggatttctattcttctcttaaagatctgcagatgaggaaattccacatctatttttattatacaattctatgcatctattctcctgacaaaatgtttttgcttgtttttaatatattcttcggagtaatcttggcttttcttggtcctctttgtttaaggaacctattttgctagagatgctgcttattccagtcgtttctgcaaagatgacataaagcatgggaacacattccaaattcatggtgtcagcttgcaacagcggcatctgtttagaacatataaatctatgtttcttgctcgagtgctaattggagattacataaacggagactccaaatacatgcgacctccttccaaagacgggagctatgtgaatttatatgacagctgtgtggatgatacctggaacccaaagatctttgtggtttttgatgccaaccaaatctatcctgagtacttgatagactttcattgatttcacttccaaatctcggtggtcaaggaagctttattcttttttgcaggaaggtttgctcttcagtcatctagccactaaatgttaattatctgatacttttgaaacagatatgaaaaaaagtggcctccatataaaaagacatactgacttcaaggttggtttttgttgttttgtttttgcctgtttcttgtagtcttgtttgttaaaagttgatatcattgatgttttaacacataggggtgaaagataccattcaaaatggaatcagctgagtctcaactaatgtggtcattgagatctttaaagtttacgtgtgtgttatcaggataaatgattttagtttaaatagacttattcgtataaatgttgaaaaaaaatacagacataaatgtgtcccttt

SEQ ID NO: 914 - DNA, 6713 bp, Homo sapiens
tagacagtgtctccttccttgaagatgctatcctctgaaataactgtgagtacagtcgcataaccctaatttaagatgtgcctgctgaacatgtgctctctcagatcctgtcctcagaatgcttttggctcttttctcggtatctcatccttagagtttttattttataccaatgttctggattacatacctggtccagaaatctagacttgtacttctttttaattgcctagttgacatttcaaccttgattaaagattgacaatatttatcaccttttcctcctggaacaatttaggttaatggtgcagccttttttcctagtcaaacatgccaggaagttcagggcaaagttcaactgctccctcttgtcttatgtggtcactgcttctgagaacatccaggaagttctttctatacttgaatcatcttctcagtcctttggggctttactgctatgagtatgaacttttgtgattatttatttcagtcttcatgatggtgctatcacattctacagttgtttatgtctgtacccagtaagctcttttgagggaaggaatcttgtcttctcctattcccagtcttgctcatgcataacagatgcccattcctcctaaatatgaatgctgtattataggcattagtaataatccctgttacattgcagtctgaagtatgttttaaacatacttttttaaagttagaactgacttacaagtgaatctattcttagattcttagatactaactactttagatatttagttatactcaataactaaatatcaatactcaatatctgtttcttctgaatttcagagtagttagaatgtttttcttaagactttgctagaaaggaactggtttgttagtaattctgccatcaactcatggagttataattgccaaatgagttaatttttatataccttaagctatcttgcctacaaaaagtaaaataaggcaggattcataaatgttacttgtaaattgagtgtttcacatgaggccaagtatgattttaacataatgaatatcattgctcctcatctgtaaatttgctgctgctttcatatgtgtatctgtacatagagttatgaatgaaaatccagtaatgccctaaagcaactttcttccatagggtcaaagctcacttaaggtaaacgtgtgaaaaaagtgactgcagtgtgtttgaaaccacaagctgtttctatgtcataaattaacatcagcttgcaagtctctgaaagaaccactcatttgtaattggtatatatgtcacaacctcccacattcctttagcccatctcagggaattattgaaacgctggcagggttagtttcattttgttttggtttttttgggtttttttgtttgtttgaggattttttttttcttttatcatttgtttgctcctgtgtaagcttaatatataatggcagtttggcatctgttcttcgcacatgtctaacccagcagagttatgcaaaaatgatgacttcattttaggtcaaattggctttgttcccagtcctcattgttggtcactttgttcagttctggtgactcattggtgatgttgatgaaactgctcagcctgccagctgggatattgatggcaggtctaggcttcattgttaggtagaagattgaatacttctcactttatacaaatttacattggctattgctcccatgtgttagctagtcttaacatgtttgttatttcgttatcttattagctgacatacggagtggtattattagtgtcgtactccttagcgtgagcatgacaattaagttaccttactaacagtgatgagtaaaccatactctgatctaaacccattgttaccaatgatgtgattatgaagttagctgaatctatggtctacatttgaagaaatagttcagaattctctactacattgtaagttacttgctaatagagattgggcattattatgtactactccccttctcacatcctacccaaagtacacaaggccgtagtaaaatactgttgctactaaaaactaaacatactgtggttgctaatgtcctttacatcttcagcctatagggaatggtacaggcagaaacaagcaccattaagtatattatcatcagtagtgagatctgtatgattaggatatctttgcttaagcccccaaaggaaaaattctctagcattaaaaacatggctggaacatagctaagcagttaacctaattagtagacttattgttaacgttcagtcctaaaaatgaaaagcttcagttgggagtagaaaatatactatgctggtatatagagcaacaaataccctgatgagataaaatgaagtagaaacttaccatttgacattatttgactttcatacatgctactgaaaagtctaggtttagctaagaagcataaataatggcagtacttgtagaggaaagaacataccagctaaaacaagaactgtaatgaatataatggaaagtgtttggagcttgaatacttggcttcaaaaatctggctttgccatttactgttaaaaaaatatctgagaatttatctcaggctgtaaaacagagaagtcataccaatttcaagaataaaatatgatataaagaattgttgaagccaaaatatccagaaataaacagaatggaaggtatcattgctataattatcttttcagaataaaaaatagagtattctttatcctttctgttgtctcacatgacaagcatgggatggtgaggaaatggcatattgcctatgttcgccgccccacccccttagttccaccaccccttcaccgtcacccccagttcactagtgtatcagaatgcatcttcagaattacacactgaagatacaaaaggtccagttggtaagctcatcagtaaataacaaggctttgaaatctgacaaattagctatttttgtaggaagataatagaacagcaagatggaagacaagtgatgagtatcatctgttttgaggttgacaaggtgtgacataaccctgttaatagacacaagtaaaagaaaatcatactaggattggatattagtgagcgagcaccgaccagtagaaacaacaacagcataaatctgttatttaagtatcccaataatgaggttaaaaaaaaaaaaaaaacagaacaaagcatgaaaagaccacaattagtgctggctatgcttagagaggagcagtctcttggtaaactcaggcagtgatgatgaacagaaaatggccgactgatactgtaatagaggcatagaactaaggacactccgtgagctggcataaatacaggggagtctttaagactgaaaaaagttcatgggtatgacacttaatatgactcaacattactgcagaattttaaagcaaacatgaaagcttgagaataaacactagtccctctacttcaagaaaaagcagaacctgtactagaacatgaagaacttagagatcaaaagacagccagaactatgatgaaatattttgaaagcagtgggcacatttttaaagattttttttggagaactttatgaggctgtatgtataattcctatatgtaattttataggaattcttaactgaaagtagttatcaactgctacttatcaggagcagtgttattagggattttaagttaggcatgtagaaaactttctgacaaaagggctattgaactccagccagttcccagtgaatctccaggaggcaccttagaagtcttcacaagctgaataccatgtctttagggtgtccaaatgcttctgtcttgggggagagatgagagatgactgggtgcctttccactcagaacacagtagaccactcactatttatgaccaagcctcacttcttttctattacagttacagattcttttttagtctggaagttagggtaaataaaatttgtatgtttgatttttctcttaggaatgttttctcatcttaactcttatgttatctttatggccaacagatttgctcagaatatatcatcaaaatatatgtattgtattttgtaaaggtgaaaggatcgaaataccactttgacagttataaaccagagtagatttgagaactgattgctcacatcacacttacgaatagtctcagaagcctttaagagaaacttacttctcaatggacacttagaagaatttgatgatcttactgtcataaaatcagtaatgaaattctcagcaaaactatttggtaaacattgcaccctgtatttttacccaacatcttgttatgaaaattatcaaatacattaaaaagttaaaataattttatagtgtactcactacctagatgctaattagcattacctatgcttgctttgtcacatatccattcatcatttcatattattatttgatgcattttaaattgcatatcattaactagagttcattgttggcttttttacataaaattagcatgcaatgaagtgcatagaaatatgtgttcactgaggtttggcaaatgcatatagtgctatggaaataggaaacgttatcaccaccctagaaagtttccacactgccctttccagtcaattcctgtccctacttgaccctcaaaggcaaccactgttcctttgtctaccataagatttttctgttctaacactttatataaatagagtcacgcaacatgtacgctcttctacaaggcttcatttttttattgctgttcttttttattgctgagtagtattccactgtatgacaatattacagtttgttttcttaatttcctattattgatagatacctgggctgtttccaggattggccattataaataaagctgctatgaccattcttacgtaagtctttgtgaacataggttttcatttctttgcagtaaattccttggattagaattgctgggtcacagggtagttttaaaagaaactgccatacctttttccagttcagttttattgtgccctgtattttgtattttgatgtgcataaaggtgtaaactatttttatgatccatattgaagtattagaagaagtgagtttggaataacaatggcattgttcatggtcaaggatgacaattggaactatctgaggaaagcaaagacctgtctgccccagacagctcctcaaggggttcctatgcctgaaactttagcaatatttcactccttgaaaggttaaagcccaaccatggtgatatgttagctagaagaaacagcactggtttgtttatgttactaactttcaccacccgttttcagtaggtaaagtaagactgatcattgacagaaaaggttatttctgtgatgaggttgagggggtagtggaaagcatgtattgctagtaagccccaggtacagctatgtgagagagagtcacctggacagggaagtcccccaaatggtggccagaagagcagaaaacggggtgggaaaaattctacctcacagttttgcataggggatagctatgcttttacgggacattttagcgtttaaaaatattttcaatattgtctctttattcaataccacccagctgtagttttttcacactctgatgactctcttatccactcttttacctctcccagctgttctattacatacagcattcacctgtattagtctatagaattataatcatctgtgtgtttctaatgctcattttcaaaaatatgtatggtttattcgatttttcctattaaaattttaagggctgggaaatttggcttctactgtaaatccttataatgttccacacattgtaaatatgcaataaaaatgttaacaactataatggcagcaggttttggtatgtatttctttgatatattgtcactttggacaataagtttgatttctgttaataaaagttgttcataaaatctagggagaattaagtcacactggtctctataagataatctgatgaattctgcatctttgaatcaatttgagttattttttgtaaaggtttaaattgtttctaacagtgttacctaaaacctttcattaaatcaaaaatgtaacttgtatattctgaaataacctggagtcttagaagacagaggcttctgcttccctctcccgtgaccccaacaatcccttcccacaggcttggcacagaagttcagtgctttctctacgtctcatgttgtcagaaataggttctcaccataatagacagtggtgaaatttccattgttcctactgagaagtccatttttaaggcatcaaaggtgaatgtgtatttagggatggaggaggcatattacaacaaagctgtatttaaaataacacaatcatatcatgctataaacaatagcagttccagaatggctactaaggattttggactgccagactttggaaattggcaagccttataccttgtccaatgaagttaagtacatttgagtgacagttcaacatacaagcaaaaaaatatatagaagacattgtacatttgttattaatggacatgtttactttacatgttagagtatccatccatctctaggttttccattagatgcttcattgtatccacaaacctgtttcaaaccattgaagtgatcttaccattgtgtttgttcaaaataaaattgggagaaaatgtgaatgagtcaatatcaacacttgacattcctgtctttttaatacattttattcttttgtttagaaaattt

SEQ ID NO: 915 - DNA, 15914 bp, Homo sapiens
aaattgcagcactcttgaatgctggcgatgaggaagatcttgtggaactaaagtcactgcagcaacaacttagtgatgtttgttatcgacaggccagtcagctggaatttaggcaaaatctcttacaagcagctcttgaatttcatggtgttgcccaagatgtaagtgtctattctgattcttttcttttcttcaaattatctgaacacttacctacacgtaatttttttcaggtttgcatgcctcctaaattatttttctgaaccaataaaatgaattactggtgggggtaatgagataaaattctttgattttttttaaaaacaagtattttttaagtcattctgcatgcaattcaaccttttattgtctaactagagtgttccaatctagtagaatattttattttgactccttctcaatgtttatgctttataacttagatggaaatggaagtctcaatacttttttgcattctgctgacctgaatgtacttctttgtcttcctggtgcatgcatctgtgtgttctgtcttccagataatgcatattctaatgattcgtccttgtcttgtaacagtgtagtcttttcaagtgtaattgtgataacctcattagatataaacctcattaatcattaaacactttagatgctgattacatcagggttatctctttggtgtccctctgctttagttgtctcagcagttggatggcttattagggatgttgtgcgtagatgtagcaccagctgatggagcatcgattcagcaaactttaaaactgcttgaagagaagctgaaaagtgttggtaagcagattttaaaaatgctgaaacataaggtttttttttttttaaatatcattaccatggttagacaattaagtcaacttacactgaactaattagtattattttcaggaaacagaaaaatagtataaaaagattttattcccttgaggggttataatttatgctgaaaattttatttttcatcgttagttagtcactcctcccttcactgggcctttacccttgcctgtttacccagctatatctacaggtgctgtgtcttgcatatactatgaacaattatttgtagtgcatgcatgaactgtaattagctgtgaaatgttctgtggtaaatcctgtatgcccaaaattgtgttttatgcaatgatttttgttgttgctttatcctaaccttgtgaaaaaatagttggtttggttttttggttcttgtctcaccaaactgggaatattgtcagattacccattctccaaggagtggggtacatttacattaaggggtccagttacattaagctgatgtaggcttgatgtcatttgacatcaaggcctttagaatttttctacagcaggaagcacagtgaactttcctaaaaggtcaggatgtgacaatgggaaggtggggagtcgtatcaaggggggacaaaaggggaaatggcaatggaagagaggaaacaggaacttaaggcagagaactagtaaaaagtggttgcacatgactaaaccaaattattgaaaactgccttagggaattggtttgaaaaatcacacttgtactgacattttacttgcttacagcctttgttattttatttttttgagatggagtcttgctgtgttgcccaggctggagtgcagtggtgccatcttggctcactgcaacctctgcctccccgattcaagtgattctcctgcctcagcttcctaagtagctgggattacaggcacctgccaccacgcccggctaatttttgtattggtagttatagtagacatggggttttgccatgttggccaggctggtctcgagctcctgacctctggtgatctgcccacctcagcctcccaaagtgctgggattacaggcatgagccagcgcacctggccagcctctgttattttaacagatggtatgcataatacatatttagtgtttaatatgacaaatgaattttcttttaaaatattagttttcttgagccacagtctttgtttaaaaaaaaaaagttcctttacacatgtaatttggagaattgtaaatataccctaattgttgcttcctatggtatagaagctagactgtatctttagtcacaatgttcaacatcctttgacattgatgatacattgctggagtgtcttaaaattttgcaaggcttatgcgcttttttaaacaacatgtttgccttgttctcctataagttggacagcataaaagcaggaagaaaaaacagaaaattgttttctattagaaataggaattttcatatttttcttctgctttcattttttaaaagtaattattgtctatggaaacccatgttttcaaaattccctttagggagaatttggcatgagagagagctccaattcgagttacatttaaagggttttattgcttgaaatgttcataggatggagtcttgggattccatcccaaggtggtttactgtacaaagctcctatacttgggatccaggtacaatatctgatgagacgatttgtttgagggagggaaagcgccttagttgtgtaagagattaaatctagtaacttttgttttagatgtgggattgcaaggtttgcgtgaaaaaggtcaaggtctcctggatcagatctccaatcaggcatcctgggcctatggaaaggatgtaaccattgaaaataaagaaaatgtggaccacatacaaggagtgatggaagatatgcagcttagaaaacaaaggcaaagtttgaccgttaattactttttactaaaataataacaatattagttaaaatgaagttatataacattttatatacagacaaaacgttcttaactgttatatagaagacatgtagtaggtttttggtgaatgtgataattactgtatataattttactaacatagtaataatttattcaattattaggtaccattttcctttttattgggttgtaaaaatttcaattatactcaactatttcaaattccatatccccagtgtagtctatgactcttctgctttaaaaaaaacttactgaagaataattttgctttttaaatttcatttagtttagagttgccattaaacttgtcatctacattgatctgtttcttcatctaaacttacagaatgtcacacattcattgttctcatatttgctgtaggaggattaaacagtggactagtgatgtttagtttcattttctataaaactaggaattcaaaagattctttgaaaactcagtttgcaatagcaactacaaagtattgcaaagtaaaggattaaaattatgcaatatacacaatctagcatggttatatgaaattttgcacacttaaaaattttatgatcatcaacaaaacttcacagaaagcttccttctgcatcacagagaaaacagtcatgaggcagaaatttcttccctcatatctgcaaacttacttttattctgtcaccacagaggatgatagagctctccgtttatatcaaaaaatatcaaagctgagcttccatttaggctctgattctgatcaccctcctgactcctaactccatcaaatcccattctctactctggttcctgccctcacttaaatgcttaaatttctcctgttttaaaaataataatcacacatatgggtacgtcttcctcttcaactctttgtcttttagcattagaactcttcctcacagctaagtcatttggataggtttacggtacattcatactacttcccccactacctccaatttattttcaactcttttcagtctgacttctaccctaactatttcattcagtgttgctcttaccagcattaccaacgtaataaatgctgtatcttacttaaagttcagagaatacttttagtcttgacttgcttaactgtgattagcgttaggcacaactgacttttcgatttcatctttcttgaaaacacatttatgatccttctctgtttcttcttggtttttgtcactgatttcttggccactagctaaagttactgcttccagggtttgttctgaggccagattcccttctttatatattctccctggacattctcactacttgaattactttctttaatagatcatggtttagtagttacagctctcccgtgctgtagacccataattccaattgcctacttagtgtcgcctgcgggatgccccatgtactgctgaaatctagtgtattagtccattcttgcattgctataaaaaactacctgagactgggtaatttttcttttcttttcttttttttttgaaacagagtctcgctctgtcactaggctggagtgcagtggtatgatcaaggctcactgcaacatccacctcctgggttcaagcgattcttctgcctcagccttccgagtagctgggactataggcgggtgccactgcacccggctaatttttgtatttttagtagagacggtgtttcaccatgtcagccaggctggtttcaaactcctgacctcgtgatccgcccactttggcttcccaaggtgctgggatcacaggcgtgagccaccgcacccggccgagactgggtaatttttaaagaaaagaggcttaatgggctcacagtcccacaggctgtacaggaagtatggctggggaaacctcaggaaacttccactcatgatggaaggtgaaggggaaacagacacatcttacttggatggagaaagaggaaaagagtgaagggggaggtgcggcacacttttaaacaaccagatctcatgagaactcacttactgacatgaaaacagcaagggggatatgtgcccccatgatccagtcatctcccaccaggccccttgtatttattagtccattctcacgctgctatacctaagacaggataatttataaaggaaagaagtttaattgactcacagctttgcagggctggagaggcctcaggaaacagaatcgtggtggaaggggaggcatctaatcacatcccaccaggctcctcctccaatattgggattacactttgatgttagatttaagtggggacacaaatccaaaacccagatccaaaccagatcacctagtatgtccagactggaatcattttcctctaaaacttgctctccttttttaatttcctgcctaggttaaagttaccatcagctaccaaacttgagatttatcctaaaatccttcatctttctcatcccttatagcttaatcaaatgtccaggttctgctgtctctgaatctcaaacatttatggtcaagatcttaaactcttatctgcctctggcctggctactctccagctttttgtatataagtgtaattttcataaagtacaacaattgtgtaaaacttccttcagtgacttcctgtttgctcagatggagtttgtcttcttggaataatgtaggagacccttcataatccaattcttgcataattttatcttctataacattcccataaaatcacacagttgtttttatctccctgaaagcatcatgctgtttcatgcatccatgactaagaatacttgtttccttgttttctgctcagtgaattcctacttactcttcaagactcagggatacttactttactttaggaagcctttttggacttctaaggcaagttagtcacttgctcctccctactctcataaaacattttaaatagctttataatagtacttataacatctctgcaaatgggagcatcttgatagtagagaccatatcttatattttccccagcacacattatctaatacctgaatacagtatatgtatgataccatcttcatcaaagtggcctacattgttttttagtttcatatttaaaaaataattatcacttcccttcagtccattgtagaattactttaaccaagttgaattttaatgtcatgttatagcttttattcagagcatctttatttttttttaaaaaaaagccttgtgatacctacttctatattgttattaagctttctttaaggacatcaagtatagtagagcacagtgtctggtaacatattatcggtatttgagactgcagtgggagtcccccatcccacctgcagtacgcagaatttcatggaaatgaaggaaatggaccagagttaagttaggttaagttgccttaaaaatttaaatggttatattatccaaaaagaccacaatgagattaaaaaaataatttgaattgtgtttctctacacccagaggtcagtagagtttttttgtttttttaagccctccatctagtttttaagaatgtagatggagggttttaaaaaaaatcagaattaaatattattttaggtactataatataatgaaaagcgttaatgtttaaatgtttctttagctgggcatagtgatgcacacctgtagtcttagctacttgggaggctgggatgtgaagatcatttaagcccaggagtttgaggttatagtgagctatgatggtaccactgcactccagcctaggtgcttgagtgagaccttgtctcaaaaaaatatcatcctgtatttgagaaacattacacttttatccttgaaacttgtttgatgctaaacagcaatggagattttttttgggttttagtgtactattgtccttacattttgctttaatattttgcagaatccatgctatctttaagagggtttgtcattgagtatcatttgggtattttgatgttttgatgtaacattgatataaatatccctaaaattcttacaaatcaatacaaaatacttgcattctccattgtttaggactaagtattttagtgtactataaaatacatgtaccaaatgatgatgttacaatagtaatcaataaaacagaaatgatgagttaaatttatgtttgggttcattagatgtgaagacatggtagatgtgcgaaggttaaagatgcttcagatggtgcagttgtttaaatgtgaagaagatgctgcccaggtaaggagcagtcagctacattatgtagttaacttttcttagaagattgattttatctaactacaaacaaaagtgtacttttcatggtcctaaaaaagtaaattcttgaagtcaggttctagtttatctatcttgttgaagaatacactttggtattcccagctagttgattgatctcatttaacttaattttctcaatgaaatcctctataatcctctattgagctagagattgggatcgtttattatttattattgttgattaggttgtcagttacatccaggataaaatctggtggagcacactgcattttgctctcttgcatctgcaagagaaatttcaataccagataaacaatttgatatattttgtcgttatcatcagagaacatcatttcagttagatatagataaaatttttgattttatgtagtaacacaaatctgtaatgcaatcctgatggatctacatacagaaatacatgatcttttattatgtgatattaattttaaaagaatgcttttcttcagtatgtcttgccttcagatttaaagaattttgaggagtaggacaggtcattaattcatgtagcttatcattgaatgaaataagcttttaagactttaggttataattaacggatttattaatcacatgatagtaatctctgtataaatgacattttgatacaataagtaaagagttctgaatccagcttcattgttatgtctttttgtttaggcagtagaatggctaagtgaacttctggatgctctgcttaagactcacatcagattgggcgatgatgctcaagaaacgaaagttttgctggaaaagcatagaaaatttgttgatgttgcacaggtgcaaaactggttatcttccttttccacaagctcagtgtttgaatagctttctgcatgattataatgtaactttaccttccaagtacaagaaggttagttttgttattccagaagtgtcacagaattaagaaaatgtcagctggtgcatcaaaactagcctgcataaacttgagagggtttacgtttccctgaatacatgttctgcatggtccctctgatttatgctatgtattacggcatttttaaggcaatccaactgttcatccacagaagttaatatgaaatggatgttaatatcagtaaataagaaacctcactttctgcatcacactagtgttagcataataatacagaacttttttgtggtgaaaagtgtctttttttttttttttaagacacagtcttcctctgttgcccaggctggactgcaatgatgcaatctcagctcactgcaacctctgcctcccaggttcaggcgattctcatgcctcagccacctgcgtagctgggattacaggcaccggccaccacgcctggctagtttttgtctttttagtagagatggggtttcaccatgttggccaggctggtcttaaactcctgacctcaagcgatccacccgcctcggcctcccaaagtgctgggattacaggagtgagccaccgcgccaagccaaaaagtatcttattttccctaataatgagttcacgttttaacagatgtagtttcctatatggaatataaagtgcctaatttcacctacttttgaaagtagttttgattaattcataagcagacattctttctggccagtgaaatttaagcagactgcgatgggggaaacagaataaagtggggaagcctaacagaaggagacttttttctaattaaaaattttaaaacaatttttgtttttttgagacaaggccttgctctgtcaattaggatatgatgtttcagcacaatcatagcgcactgcatcctcaaactcctgggctgaagtgatcctcctgcctcagcctccaaggtagctaggactacaggcaagtgtggccaaactcaactaatttttttcatttttttagagataggatcttgctatgttggccaggctggtcttgaactcctaacttcaagcaatccacccacctcagcctcccaaagtgctgggattacaggcatgaatcactgtgcctggccatgaaacttattataaactaacaaaaacatagcttcccctttattacttatacacacagatgatttgtagtaataagtgccactagatttattcagtattgatttctagtagtgtcacttaactgtaacgacaatcttcctgcacactttccccatccttctcttaagaattcttttattacaattttatgtttccttttcttttttagagcacttatgactatggcaggcagttgctacaggccacagttgtgttatgccaatctttgcgctgcacttctcggtcatctggggatacacttcctcgactgaacagagtatggaaacaatttacaatagcatctgaagagagagtacatagattggaaatggctattgcatttcactcaaatgctgaaaaggtttgcttgtgtttttgaaatgttattctcagtggtattgattatatgtgtttaaaatatgttaattttagtaatgtaactatatgactaatctatttttcaatatttatattagttccgttgttacggtttgtttagatataatacattgccttagagagttcaaattaaatttccttaatccttaccagtgctggagagccatgattggagaaatccagaaccacctggtagtcttcttctctttacacttctctcctcaccaagcctggtgtccagaatatgccctctgttctttagagtatcatgagttcaatctctttcgttatgcctggaagggaaactttttgctttggcaactgctattaattgtcacacattttttaaaaggcaccttgtgattttataaagtcgggacattaaaaaaataagaataaggacaaaagtaaaatgcttttttatatgtgttctttaaagattcattctagaatttattattcaatgaattaaggtcattaatttcagaaacaaaaaataaaatatgcagggttatttggacacattttcaatagaacttttttcttactcttcatagtaagaatttattctacccaagccttacatatccattctgaaaaggaactttattatgtagttaattttgttttgatctcttacaataaaagtttatatgtagggaatgttcgatacactttgagatattagcaaacctaacttgatccatggaacagatgttgcaaggaacctcaggaattaaagtttctatctgagttatgaagtacatctgttgggaagggtccatagttaactcattctcagctggtcattgaactccgtagatcagtgtttgattaacatgggcctaatgatgataagtggaagtatacaaaatagtgtaacttgtttatctactgattgtttcaatgagaattttttattattatgaagtatactattaacatagaaaacataccacaagtattctgtgcagtgagatttcataaagtgaacacacctgtgtactcagtgtactgttcaaaaaaaacagaacattaccagcacccagaagctccccccaccctgtgtaatcacagtactgctcccccaatcacctcactgtcaaagggtgacaattggcccaatgtctagcaccactgataacttttttttttttttttgagacagagtctcactctgttgcccaggctggagtgcagtggcatgatctcagctcactgcaggctccacctcctggagcttgttgtacaaacctaagtaaagccctttgttatcagatattactttcctcttgactgtattctattttataccataagcataaatataaataaccacaactataagcaaattgtatagtataatgattagaaaaatatctaaattaaatcttgagttttaaaatacaaaaatgtccgttcatgagtaatgctgaagtaaacatgattagataaagtgtaatgcaaaaaaaagttgtaaaaatgaatactttttattctctctctcaaattttgcagttcttgtggtttaatttaaatggtaatggttagggtggagtgaagaacagtatctcatcaaggactatagagattaccatatttgaattataacctaatcattttatggcagttaactcaagccagcagatcagttgttaaatattatcatctagctgagttgtcacatcagttatttatttgtactctttgttgttttttatttatataatttttcatttgtaatgtctatatgctctttgagaacacagtctatacctccttcaccttccagactgctacataaacataaactgttcaataaatggttacttaatataaatgaaagaatacttcttaaggacagattgaacttattttccaaatagtagtctagttattttctttcttggaaatcaccatattgttagtaggaattatgtatttcattttgtttgtttgaatttcttgaagaattttgccaataatagatcaatcttatatagtggtatacctgaagatgctaagaacaagaaaatgcctttaatctaccaaatttgtatgagcttgattccatttctgtgtctttcttttctctctttttttttgtggggtggggtgatcctctgaaactgcagacctgtctgtgtctcttgattgatgttgctcttttatttgttgcagattttgcaggactgtccagaagagcctgaagctattaatgatgaggagcaatttgatgaaattgaagcagttgggaaatcacttttggatagattaactgttccagtagtttatcctgatgggtatggggcatgttcttataattttattttttattggtgtggtcttaaagtgaaatcattaaaagaggaaatctattctttaaaaagccaagtaaattaggtttggtccacatctttaactcctacgatgaattagtttaaaatgaaaagaaatccacacctcttagccacagtaatggtacttgccaacaacagatgcgttacttcttgacagcttgttgtagaatgatcattgactagattaagacactgggttctagccttggctatgatggtggggaatagtgtgacttggggcttcattcaggaaaaggaagaggggacaagggattgatgtttagtgagttcacaatatatgccaagtaccaagtgaaacatttcaccttcattacttttgaccaaagaggaccaaaccagtatgattattcctgatttacaaatgaagaaactgaggcccacagagattaagtaaggctctcaggatttcacagcttctaagagttagcataaacttacaatctcaggtatgtctgtgtggctccaaacccattccctttgtactgtgttatatggcgttctaatttctttatgtgtgaaggaatggggtcctgattatcttacacctttccatttcaaatagtgataaaaatatgaaataatctgatgcaaaataaatggatcaggaaaagaatcaggaagagcttcagccgggcgtggtggctcacgcctgtaatcccagcagtttgggaggccaaagcgggcggatcacaaggtcaggagatggagaccatcctggctaacacggtgaaaacccatctctactaaaaagacaaaaaattagctgggcgtggtggcgggtgcctgtagtccagctactcgggaggctgaggcaggaaaatggcatgaacctgggaggcggagcttgcagtgagccgagatcacgccactgcgctccagcctgggtgacagagcaagactccgtctcaaaaaaaaaaaaaaaaagaatcaggaggagcttcatccctggtgatttagacctgattcttactgaaaataatttagagataatccagaggatatttaattcaaatgatagagtaaccaaaccagtgaataaaaatacaagtacctttaacgttgtggtatagtgtgatgagtctgtgcactctggagccagaggtctcagctctaccacttactcactgtaacaccttgggcaagccacttaacctttgtgcctcaattccctcatctaaaaactgccatgtaacactcataccttcctcaggttatgggggtgtgggaattacctgagctaaataagtataaagtacttaaaacagatctgacacataataagcactgctactactgtgccatgatcttccagtgattatttgggattgatattgaaaagatggcattttattcccttgaaataatattattcatagtctatacttacgttatctcaagccccacctaaacttgaacaatcagaggtagcctaaagtcacctaaagttgtattacacatctgcaataaaagacaacaaaattcagctagtagcagaattacaggcgtgcttctggttgttccattccaggatcccttaccctccctgattcctacatttcacagccagttgtcacacagtcagtctcctgttctacccatgtcagcctaggaacacctctccctggtatgcttgcttcagcttctcgtctgtgtttcacagatagtccatgtgtcatttcctcatccatccttttaagataaaagaatgttagtactatatattcaaagttcacacccacctttaatattttggaattgctgttttattccactttatattcatattaaaacttatgtatatctcttttaggtattttgctgaattaaatatttcccaaagttgtgtgtagtgttttccataattattaatataatggtaatctgtttatgccatgtatagtttgtttgacaggttagacagatttctcttttataccttctcctggtaaaataaaagagattgatggtctctctggattcactgctcaaagacctaggttcaaattctggtttttccctgggtgaccttgcttacatcatttaacttgctaggctccacttttctgatctgaaaaataaagagattaacctgataatttctaagaaatcttccagctctaaaaatattctgtgattctgaatacagtatctttgagagtagaataaaattaataattttatctgttaatgtaccaaaaaatgtcataacattaaaaagaatatttattttgcttgccagctctatagacaagtggtgtccccagccggtagcactcaagtacctgtataaattttatgtttgtgcatccttctggacccacatatttccagtgtttcattgttcaatttgttgctattatcataactacacatgatataacctttataccatcaatatatttttctcatcatgtcttaatgtattttatgccattttaaaaaatgtttttcctgctgaatttcctgctcaaacagtatgatcaccgatgaactgatatttacacataggctatctcatgtagattttttatggtaaatttttgcttctatttgtattcactgcagttaatagatttgtattaatctgaggtttttctgtgtgttttgatttttagaaccgaacaatattttgggagtccaagtgacatggcttctactgcagaaaacatcagagacaggatgaaactagttaatctcaaaaggcagcagctgagacatcctgaaatggtgaccacagagagctaatagctaccagctacctacagatttgcagttcataatcccgcatgttgtcaacatactacagcattagccaccacaccttaagatgcatttcacagccaaaataagtctcatttcttttcatgacacatttctctttacatgttaacaccttgctactaccaaggcataattacttaacatgcttcgaggctgtagattccaagtatcttaaaagaaggaactataaacattgcactgaaaacttgctttaaagctttacctgacctgtcagtttgtagacaaacaactgataataagctttgaatggtgctaataagagtaggaattctctctattaaaaagaaaaaaaaaagttgcccttcctccacaggtgatttagtaaatttagacagtagttaaactcttgttagtagacagtggtgtcctcaaaattttactttgtaattcttcagaattgattatttttattgtgtcaatacagagaaagcctttcagatctttgatatatcatagtcattaaaagaccttttcctatttgtattgataatgtattaaaagttgtttgtgcttaataaaagacttctttaaacatcttatttaatttagtagttacatcctatttccaaacatgagtgccttatttaaaagggcattcttaggactgtgaggatggtttaatatttgttttttcatggtggttgcatgtattttagacaggaaatacatatgtaagcatgtgtatataataaataagcatgttttatcatgaaaaattattgtgaacaatttagatctttaagaacttattaataatggaatactatttctaatttttctctttttcaacttgaaaaatattctcaaaattattaactaccctgaagatactttgtctttaggggaggagggctgaggaagaaggcatacataattacttcagtgtaatcctttatatcagagtaatctttcaggaactaaaatagcaattgttaataaaatttagtttctcattatagtctaaaagcaaaataaattctgaagtagtccaataacagaactgtatgacccctttagaaataaaatttatcatgaaatgctagttcttttaagtttgtattaagtttaaatggtaaaatgcatataatttaaattttatgtatttttatttcagaacattttttaaaatattaaaaattattttttagtcttgtagtcattacaaaattataaacgagttgtatactggttcctttttgaggtctacaaacatgctcgtgtatcttccaatgc

SEQ ID NO: 916 - DNA, 217 bp, Homo sapiens
gagaaaccaaacatgtttatgaaattaacacgttctgaaagattagcacatccaatctatggtaaattttagcaaattcaaaacagagtgaagcctgaactgtcattttccagcatctcatcactaagggaaggttgttttcaactggaaataactaattcctttatgctttattatttaaatttctgtttaagaataatgtgtagttattattttt

SEQ ID NO: 917 - DNA, 9925 bp, Homo sapiens
aacagtcaataaatacatgtttattgattaaactgaattataaaaaacaaaaccaaaaaaaaatttccttctactactaagccatgcaggcagagtccacaaagacaacttcctggccaaaacccagctgatccactgttggtataatcttaaaaaaaattacccatcaagaaagtcaatcgtgtgcagaagacaggaaccccagctctgctaaggctgtggctgctgcagagactaccaaagagtaggattaggttgtagatagacgtgaccaaccatagttcttgaactttctcaaaggcaaaggctgacttcaaagtccattgtctgtcaataaaatggcatcaggcaaaaagctggggaagagaagcccagatggatccttggttgttttcagatgtcaaaggttcacaaagctggccaagctgtttctggaagggacttttccagttcactatattatagtgtgctgggggatgaaaaaacaaacaaacaaaaaagcagggtggggtgggagaaatgggtggtaacaaatgtcacacctgtaccaccaggcccatcacatcttgagcattccccagtctgtgaaagcctattaaacagggtcacctagaaaaaaaacaagtttataaatccatttcccctcattttattaaatgttccacttatgtacattttaaagacgaaccatttacaagcttgtgcagtttgcctccttggctcacaggaggggaacattgtggaaagcctcaggataaacagaagacttggttttttgctccttttctctgtacggtacagtacgttttggtttacaaccatgagtacatacaattaaaaaaatccctcatgcaaattgtagaaaaaattttctttccttgaagctggcagtgaaaaataaagattcatgtcattttctttgtgcacacccctgtgcgcttcttcctgtcagattcttccctaagtattaagagaaataggggaaagccacagagcacgctggatttcaacaagtggtcttgtctttttaaagttcaacacttcttgaacaattagctcctggctgtaggaccagtaatcccttaaacaggcatgctctccatctaacaggatgaagttcagtaaagcagggactgcccctgggggcttacaggatgaagactcaaactgggaatggcttccaccctaaaactgtttgatcgcttcagtatctcttgcttgctaataacacctgtatgatcctttgtccagagggatggatggtgttgagaatggggaaaggggccaaggatcacaagtgcaaaaaatattgtttatgtcatgttttggagggaaggtggtgaggaaaagacaaatctattcattctggataattaaaggtggtttcatgcatttttaaagccacaattttatatctagggttgctgtagaaaccaacatctctggagagggaaggaaagaaaaggagaaggaagagagagttcagtgggactttttttccattttcatttttatataaaagtgttaagaccacaatgaaaaaagttttttatccatatatataataaaccagtttgtgagctacataatttgtctttcccatcttcagaaatgttctcacattaacaatgattagatagcatcatgcccaaagacattggccacacaataaaacaaacaaaaaaacccagtactatgatacaattgaggtaaaaggggaaacaaaaaaatttaacatttgcccacaaataattttttttctttttcttaattttgtcagaaaaataccaaacacagtgatttaaatttaaaaaaaaaaaaagtcacaaaaacctgtttttagcagaagtgaatgaccaatgggccagctccttggctcagacgtgattactattggttttcctaattaatccacaaatccacagggaagtgtaagtcaacttcaggggggagtggtggtataaaattaaaaaatagaaaccaaataccccacctggtatgcccccttttccctaagcccctttaccctccctcacatgtttccacccccactgcacaccccctaatgaccccaacactcaaatctccatcagatctaggtcagcttcttcaaagccatagaaagactcggtctcactttcaccctcaaagagctggtgaagactttcaggctcaattgtctcttcaggagatgatctgggtcgtggagtggaagactcagaatgttccccactcagcttcagttgctcctctagggaggcaattagctcctcctgcatgtcagcatttcttgtaggtgagttaatgttgccatcggggccaggcagaacactagccaccaggaaggagcgctgaactagctctggacagtccccaatgacacctagcacttcacccagccagacaagcaccagctgaagcaggacatcagaatcacatgcagtatctgccatttcccgagcctgttccttccattttttatgcaggaagttcttgacagttcttttgatgcatacatctaatggctgaattttggagctacagcctgctgggaccactgcaggcaaagtgctagaggcactaagcatagccagtacctcttctgacaagtgagtgcgatgacagtccatcacaagcatgcctttgctgcgctggcaagctgtgtgcttctgccacactcgagttgaccacagctccatgatctcgtcatcactgtagccactctcctttgcctctagcaatatggagtctggcatgttagcaggctgatccatctgccctctgtagaaaaccagggtgggaaggacagtgccatctgccagaatggctaggactacatcacaccaaggttcccctgtgcccactgtctgcagggcattctcctttcgatcatcactgctcagcacctctgtatccaggaacaaagagatctcatcaatagccacaatcatagacaagggtaagtcctggttgtgaatctgccgttgtacaaaatcaatgaagagtcctgcattctctgctacatccttaggtagggtgtgggccacagctcgccgggcatggggagtcaggtggtgccgcagcatgaaacgcacagcccactcataggagatcttaaaccccccttccaaagaacgtcctattttggtggccttctggaacaaggtctcctcatttacaggtagctgttgttcgcgctgggttagcacccactcagccagtttctcttctgcctcaaagctcagatatttgccctctagattctccccctgggaggcctggaaacgtcgaagccaacggcgaatacgtcgctggggatttcggaagtgttcagctgcctgttctgtattgcagcatagagcaaacagtactactcgaagcttcttcacagacagctgctcctttttgccaactccaccactaccaccaccacctgatgctagctcaggttcttgggtgactgggctcccttcatcctgatcatcaacattcagacattcggctccctctgtagccagcggtggaagggctaaagcctgcgggtgagtgggggttggtggtggggttgcagttgaggctggtgatgggagtgctggggctaagggagttagtagctcttcaggctcagctggggtggcccccgcagatttcacagtggcagctttgttagtggggaaggaaggaggagggtacatattcttcacgttccggtcatgcactcggtcacgagtctggccatgcctaaaggggtgaggagcaaagagaagaggagaaatctcagttcaactaggaaattgaaacaataatatgataataataataataataacagagtaaacacactgcaaaccagaaattaaattgtgaggtgagtttttgttaccttgagtgagctatccaagtgagtcctatggaaaatgaaacaacaaaaatagttagctcagtgaaaaaataagccctccaaagacagtgccctgggattcaacttactacatacaaatacgctgttcgcagtgaccagctttcccagttttatataaacttcaggtcggaaggtttctaattaggtccagcacatctcaacagtgaatgagtgaggccaagtaggtatgctcctgatgcatacagtacgaacctgtatcttttttcctccccttgctcaactaatccccttctctcctacttaccccgtggcaggatgctgctggatctgtgagaggggttgaataccaaatgcttggccatagcatcgcccacagaggtaacaaaggtacatgaagtgcaggccagcttgattccactaaaaaagagaattgagactatgtaagacaaacacagcagtgacacttgagaccattaagctttgaggcttaagaaagaaaaggaatgccctcccactttctcctttttctgaaattaattcacataaccacctctccaaataatgaaaaacctgaaaattaatgtaaaaacctgaaaaattaagatgctgccaataagttttttcttacctcacagaatttttaaacaaagccaaatacttggggctcttccgtggaacatgattgctgagaaagacaaagaagtggtatgagttacggagttctgctggctaagctagagatcaccagccagtgacaatgcccccaacaaaagagacacttcttcagtgcaccctaatctcaacctaagccagttttcctgtcaccatgcttcttaaactttaatatgcatacaagtcactgaggatctattaaaattcacattctggttcagtaggcctagggcggggctgagagtcagcatttctaacaagctcccacctaatactactggtacttgaatagcaaggccctatgaaattagagcacagaccatcaaaaccgaaaaaacagagcctctcactctgctaggagagaagaacaaatagctctaagagttgaaggaggaaacatattagaagcaggggagaaaatgaaatgagtgctcaagaatctggctggggccgggcgcagtggctcatgtctgtaatcccagcactttagggaggccgaggcaggtggatcacctgagctcaggagtttgagaccagcctggccaacaaggtgaaaccccgtctctactaaaaatacaaaaaaatcagccaggcatggtggtgcacacctataatcccagctacttgggaggctgagacaggagaatcacttgaacccaggaggcagaggttgcagtgagccaagatcatgctattgcactccagcctaggggacagagtgagaccctgtcttcaaaaaaaaaaaaaaaaaagaagaagaagaagaaaaaaagaatctgaactctcaagctaaaacactggttaaaaaccaacttacttgatcatgtggttggcataagctcgagaacagcaggtgctatagcgacacagagagcagtgtacgtaagtagggaaatgattagggaagtctgggatctcgaagctgcactccaggcatgtctgccggcccatgacactcctgtgggggagaaaaaaaaagaattctcattactgcctcatgggtccccaaaatgtaggattttcagacaacaaaccctgctaaaaagctaccagattgcactgtgtatcaggaataatcctggccacccagtccccacccgcccagcacttagaagaaggcgctgacattttcctaacagctctcttctggatgctgcgctggacagggggataaaggaagacaggcagagggtccattgaggaggtcagcggtgctgcctcctgcaaggcgctgggaggtgtatcattagaggatacaggaacagttcgtggctgccctcgggaagcccggattgtcacctgagaaccaagggaagtaacaatgagacatcacccacactaaatttcagaatactgaaaatctctattcctccctccctgggcctataaaagacactggcaaactctttaccttggtgcctggtttcaagccctccagctgcttgggtttacggaaggttttatggtgttgaagcttgtgttcaattttgtccttggcaaagagaaactgcagccggcatttgttgcagtgataaacatttctcttctgaagtgggggagggaaaaaaagagacaaaatcccttaaaggttcctaataaattttcttttttgaggagaaagcagatcaatgtcaaccatatcattcttcccacctttctgttgataatttaagagagtaagaaagaaatatgcaacatgaccacaaaacctaccattgagaatcatcacctcccatgatatcaaagaaagatggattctagtccaggatgactaagttctcaaatcatcctttcctgacttgttttaacaatttgaatgagtgatgtaacctttatttgtattatatctttacactgctgacaactggacattcttctggacattcttcattcttctttttttaaaaaaggacaatgtacatagtaaactaaagtcatacttttttttctatactcttccaactttgctttcaactccaacactcagtccccttccatacaaacaacttattaccagtttcctgagtatgctttcgtgggcagtctacacatataactgtatcacaaatacattcatatccaatcattacctgcctcgccccctttttttgagacagggtctctctctgtagcccaggctggagtgcagtggcatgttcatagctcactgcacgtcccaagtagctgggactacaggcacgtgccaccacgcccggctactttttgtatttttttgtagagacggggtgtcaccatgttgcccaggctggtcttcaactcctgggttcaagtgatctacctgccttggcctcccaaagtgttgggattacaggcgtgcatcactgtgcctggcccttacttttttccctttcctttttgtagagatgttgtctcaccatgttgcccaggctggactccacctcctgggctcaagtgatcctcccacctcagccctcttctttttctccttttaacacaaatgatagcacttgtctataccttgctgttttctcacttaacacatcagtatatacagatatgtctcctggtgagaccactttgaggattcagtctgcctagtattgaagtccttcaaaaatagaacccatgtctatgattttctttagtaggataacaaagctctgtaagcttaggctaagagacaatttccatgcccctatttggaaatacagttgtggtagacaatcagcagtcactactgtgcaaaggagactatgagtgtaatagggtacatatgtttgtgtgcatatgtatgtgactattaagcacacatgcactcatcttattctccattttgaatcctctcttatatactatatacctttcactctcctctagtggctctcttcttgtagtattttaaaacgaagtcatagcttttcatcttataaggaaaataaaagcaataaaaaactcttctttgccacttcttcctctggatttacctaccctgggtcctccctttttataaataaacttctttaaatacatcgtcttcatttccttacctctcattcatttgttctgctgaaatgtgacttccaccctaccaaccaacaaaatggctctcatcaatgttgctaaattaaaggcctgtttctaagtctctatgttgcttgacaccttcctgtaacatatgacattttgatcacacccttttctttaaaacactttcttctccccagtttccttaaggttaagactcttctggttttcctcctagtactatggtggttgctttatagataagggacttcaaatatcctaagccttctcttattctcaacagggttggggggcccatggtatttaagtttaaaatctataggatttatataacgctgattcctaaatcttttctacaacccagagttctctcacaggcttgagatctattatccaacagctacacttgacatccacagatactgctaacttacaatatccaagctcatgatctcccccctcacaaatatactttctctattgtttctatttcagcaaatagttccctcattcacccaactgcccaagacagaattttaggcactattcttaactactgcattgctaccttcacctaatccatctctacatcataaatatcacaaatcttctgaatatctctcaactctaccctctttttatttcaaaagccaatagccactatcatctctcacctaaactactgaaaaaggccttctagctagtttccctaactgtagtctcaatctcctttaatccattctctgcagtgcaggcagtataaagccttaactaaagctgaacacatcactccagggcttaaaacccctttagtggcttcccagtgaattcttttcatggcttaaaagatcctccatgatctgtccctgcctaacttccaacccctctgtctcttacaccctacactgaatctctctcaatttcttgaacctccacaattttgctttgtgccttgggcacactgttcttcgtcttatttcatctggctcattcttattcatccctcaggtattgaacaacacttctttctggaagccttactaggcacccagaatagctatgtgattttctatatcctataatttccccaacacagtactcttcatgttttattgtattgtttgccttgtttactactaaatctctagcatctagactagtacatggcacattaagtgaattcaataaatttctgcaaacatatgcatattataatctctgcccaaattatttgcctagctcagccctggccccagcatccatgtttaaaaaaaaaaaaaacaagagaatatgggaattgcttggtgcctagtacctggtgcctcatgtaatgctgttggaatgcattgccatttttgaagaccttcaggcaataagggcagagcagatgccgggtatcctcatggatcatccgaaaatggacatctacctcagagtagagtgaggagcgatattgacacacctgagtcacataggagggaaaataaggctaagaatgaagtgaacaactgagaggccttaaaaaaaaaggtagcaacaaaaatttttaaattaaaaaaaaaaagttttctcaaatgcatagaaatcaaattattttcctgactttgtaatgctgggctatgtttgtgataggtttagctattactttaaaaataggaagggacagaaagtctaagaataatccatgttctctaactaagaaaaataaagccttttctgtcaatttccaaagggcacgttcaggagacagacactcccttagaatatgcacatgttcccggctagtctacttgtggacatgttcttttatgtttttctcctgcatggaaaccctgaagataaactgtgtttactatttcttctgtacctactcagagttcctaaactgagtgtatgcagtaggtggtcaacaatattcattagtaaattctttgtattcttcctgagggcaaaactgctaaaactccctggagaaaaaggcaatacctggcaaacataaggcatctctccaggcttatgagtatccttcatatgctggagaaatagtggctcactttcaaacgcccattcacagatcttgcacttggctgtaagaagaaaagtaatcaataaatccacttgaaaataagacaaaagtcctgctgactcacaatctttattttctctgcctcctttattttgattttcaacaatcagtaaatcataggtcccttctgttctttctttaaatggctccaccttaacatatatgttgctgataatcttatgtacgtagctcagacttcttaccaaagcttcattctagattttatctataagacattttaaattggttattctatc

SEQ ID NO: 918 - DNA, 2386 bp, Homo sapiens
ctttcattttttctgctaccgtgactaagatggaagcgtttttggggtcgcggtccggactttgggcggggggtccggccccaggacagttttaccgcattccgtccactcccgattccttcatggatccggcgtctgcactttacagaggtccaatcacgcggacccagtaagttctcggcgctttcgtttgcgtagcgggagggaccgtggggcctggtgctgccggctggttttgagagcccgggaaggtgaggcggggaccccgggggcgcgcgaacggcaggggagctcagggcgcggagtcctggagaatgcagaataattggaaggaattatagaaaatcagaagcgcagctcagtgcgcggaaagagggcgcagtccatcccccctctcagctcccaccgttctcactctttaggaaccccatggtgaccgggacctcagtcctcggcgttaagttcgagggcggagtggtgattgccgcagacatgctgggatcctacggctccttggctcgtttccgcaacatctctcgcattatgcgagtcaacaacagtaccatgctgggtgcctctggcgactacgctgatttccagtatttgaagcaagttctcggccagatggtgtaagtcatccagagaacaggagagtggttcccaagtagagaggggagtcccctgttttttattcccttcgatgggatggggggacttgttgcagcgggggactgggagagttgttggaggtgggcgatctgtgtttgcaataaagtttttggcattaggtgtaaaatgggggaaggtgtggtaacttcttttggggatgggtggagaccccgacttaattctctcccttttctcacaaccaattccttttaaggattgatgaggagcttctgggagatggacacagctatagtcctagagctattcattcatggctgaccagggccatgtacagccggcgctcgaagatgaaccctttgtggaacaccatggtcatcggaggctatgctgatggagagaggttcatatgaatacaaataacttatttcctttaccacccaacctagtacctgtgtagtatctcttctgtctcttctccccaagtgaatcccactttaactcagaccccatggtccccttcttcagctaagatgaacctaaggtgaaatgagttttgacccattgtgtcctgttagcttcctcggttatgtggacatgcttggtgtagcctatgaagccccttcgctggccactggttatggtgcatacttggctcaggtaagtagtaagtctagaggtgggggaaagggaagacaaaaggaaatggattagtggttgtctgcttttctcctgaaattctgatatgagggatgggctgggatcgctattactgggcagatggttttctttgtagtctgggggctgtaggtgttgacactgattccagtgacaagatgacatgactgggagtcagtagacatgcaaagagaggacaccctagaacttcttcctgaagtggctcttagcttattttctaagcagagttcattctggtgaggcaagaagtagaatgtcatctttcactctaatgctttttataccatagatttgagacaactagcctgttattcagcccaatatccccccatggttttcccccaatctccctagcctctgctgcgagaagttctggagaagcagccagtgctaagccagaccgaggcccgcgacttagtagaacgctgcatgcgagtgctgtactaccgagatgcccgttcttacaaccgggtgagggatgtgctgggaacctaattggcgggctctggctacttgcaatccctgggtctctatgctttgaagaacagattgccttacttgtgtgactcctattttcacattggggaagacctccacctgacctttcatttaaggacttaaggcgtgggcattattgaatgctctgctttcttccagtttcaaaccgccactgtcaccgaaaaaggtgttgaaatagagggaccattgtctacagagaccaactgggatattgcccacatgatcaggtgagtaatagggaaaaaattggtgacagacttgggaggtctttggcttacactaagctgggcttttctgggaggctcacccaggaaaattttctgggtggaaagttttggttggacagtacagctatttttaggaattgatccctttatgcttcacaattttattattctgtcttccttttttagtggctttgaatgaaatacagatgcattatccagaactgaagttgccctacttttaactttgaacttggctagttcaaagatagactcttcttttgtaaagtaaataaattcttcaaaatgcttgctga

SEQ ID NO: 919 - DNA, 334 bp, Homo sapiens
atttttgtcactttaatggaattagtttcaagtttttgcaaatatgaaaactggaagcttaaagccttgggcatttactggacaatgtctaacctccccccgcccccagccccctacaccccagccaaagaaatatgaataaagttgaaataattcttttttctttttttaactaccgagaaccctggatttttgttttgagacagagtctcgttctgtctcgcacgctagagcgcagtggctcaatcatggctcactgcaaccctgacctcccaagctcaagcaatcctcccatctcagcctcccaaagtaccagaattacaggtatgagcca

SEQ ID NO: 920 - DNA, 6677 bp, Homo sapiens
tggtgaaatgcaacttcaatgtggaggaggccctgcgaaggctgcggttcaacgtgaaggtgatccgaggtgagcagcggtctgggccttccttccgctgcggccccgccctgggcactgctgaccgttctccccggcctgggccttccttccgctgcggccccgccctgggcgccgctgaccgttctccccggcctgggccttccttccgctgcggccccgccctgggcgccgctgactgttctccccggcctgggccttccttccgctgcggccccgccctgggcaccactgaccgttctccccggccgtgtttgcagatgggctctgtgcttggagtgaagaggagtgcaggaactttgagcacggcttccgtgtgcatggaaagaactttcacctgatccaggccaacaaggtgcggactccactgccaggctccaccgggggcttctcgatctggggaggggctcagggtccgcaggcacacagcacacggccgactggaggcctggagccccgtgtcctgtgtccgcctcctcaccgtgtgcccattgctgtcttctgcattttttgctactgactgctgtgggcccctttcctgtccccacaagaacaaggctctggctttgggaaagaatgtggcaaaagctgaattctagtagttgtttctgcctcacattccaccccagggccctgggcacctcatcttcaagtctgtgtcctctgagcagagcctgctggctcagtgtccagcattggccccacagcagaacccctgacacctggagaccaggggtctcctggttccctcctccagggacccaggtcctgccacccgggacaaaccctcatgacaggcaggtgctgccaagtgccggggccttctgcccttccttagaccttccccacgtcctctgtgggtctctgcatgtctgcagcagtgccctctgccctgtggcttcttgagtggtaacttccaagccagcctcttggcagtcagacatctctggctgaaaaccttcccatggctctgaccagtggcttctccgcctctgtccacgccccggttgggcactgagtcccttcaggaccagtgggctgtggccttgttgccgagccttgcttctgcctcgtgtcctgggaccgtgctccatttggggcccgatgtcgtccactgaagggcttgggtgaggaggcacctgcccggggctggttgtacggctcaggacattgctcaggtgactgtgcggtgccgtgcgcagcagcgatggactgtccttgtcagactccagcaccacgtggtgttttgattggagacagcggggcgaggtgtggctggagtgtggtgctcccaggctacacttggagcccctgtcaagtttctgtagctccgggccgtgtttctggagttgtgggccgtgtttctggactcctggccgtgtttctacagctccaggctgtgtttctggactctgggccgtgtttctatggactccgtgtttctgtagctccgggctgtgtttctacagctccgggcccatgttcctatagctccgggccgtgtttctatagctctgggctgtgtttctggagcttcgggctgtgtttctggactctgggctgtttctatagctccgggctgtgtttctatagctcccggctgtgtttctgcagctcccggccgtgtttctatagctccgggccgtgtttctgcagctccgggccgtgtttctatagctcagggccgcgtttttgtaactcccggccgtgtttctggagctccgggcaggtcctggcccagccgcgaggggccgtgtgtagccagcacacgttggtcagcctgagccagtgcgtatttcaccctggcccttcacagaagagctccctcgtggcgtgcgtttgaggtttgccctgcagggaggttgtctcggtctcgcccccaggcaggaccccacgttgttctcgcagcggtgagcatggggcatcctcgttctgggtggcggtgggttagttggcccagagcatgtccaggtgagggggtcttttccgccatcaccagcagtggccacagcctcaagctctctgtgggatgagcctcccgggtggagatgttggaggtgttgccaggtgtgcgcccagctctgtgccaggtgccacatggaacacacttgctgtgtgtcccttctcgtgtccctgaagccttgtgtgcgtgtgtgtgtgtgtcccttctcgtctccctgaagccttgtgtgcgtgtgtgtgtgtgtcccttctcgtctccctgaagccttgtgtgcgtgtgtgtgtctcttctcgtctccctgaagccttgtgtgcgtgtgtgtgtgtgtcccttctcgtgtcctgaagccttgtgtgcgtgtgtgtcccttctcgtctccctgaagccttgtgtgcgtgtgtgtgtgtgtccctatctcgtctccctgaagccttgtgtgtgtgtgtgtgtgtcccttctacgtctccctgaagccttgtgtgcgtgtgtgtgtgtccttctcgtgtccctgaagcctatgtgtgcgtgtgtgtgtcccttctcgtctccctgaagccttgtgtgtgtgtgtgtgtgtgtgtcccttctcgtctccctgaagccttgtgtgcgtgtgtgtgtcccttctcgtctccctgaagccttgtgtgtgtgtgtgtgtgtgtcccttctcgtctccctgaagcctgtgtgcatgtgtgtttggccctttatgtgctacgttgggaattttgtcgggttcacagaacccatgtgtccttctgcggtgtcttctgtgcacttgggaagcattcgctgggccctggagggatgtgttcggtgggaaagcaggcgccgcgggcttgtgcctcttcctcccggggaaggggctcagtccaggagtctgtggacccgggggttgtcactcccactcccaccccgggcctgtgagaagcaggcagatgaggtggacgcaactggcccgtggctcatggtctgggatggggtgggtgagcagtagacagaggcctggagggtacgtttgtctggctgatgctacagaagggaaaggggtctcaagccaggagctggagggctctgagggggcttgaaacaggaggcagtgccacagtgctccgagcccctgttccctgtggtgggcatagcctgtggcctgttagggtcatgggtcggggggtcttgcgttatctgagagtggtgggtgctgtgctccttctgtgctgtcccggggtcccaggacgtcctgggatcgtggtgcaggtgctggggctgggcagccggggacagagatggctcctgacccctccccgcaggtgcgcacacggtcagtgggcgagtgtgtcgagtactactacctgtggaagaagtcggagcgctacgactacttcgcccagcagacgcggctgggccggaggaagtacgtcccgtccggaaccacgtgcgtgcagccctccccagcagtaacgacaggcggccaccccgccgggggtgggcacgtgggcgcctgggcggcacctcttgggtgggggcgtctgtcctgtctgccgcccctcatggcgccctctccccacagggacgcagaccaggacctggatggcagcgaccccgatggccccggccgtccgcgcccggagcaagacaccctgactgggatgcgcacaggtgaggcttggggagtatctcctgccctgggggcggccacgggtctggagccgtgagtgaggcccggtggagcctctcctgcctggcgccctgtgctgggccagcctcgccaggaggagtgggcgtctgggtggcggagggcagccacgtgatgtggatgccgctctgtacacctggctgggagaggggagggcagggattacgcttaccctctgggcttgctggaggggtgcatgtggccccactgctggggagccccgtatggtgaggttggggtatttaccaggcctcagtctccggggagggccttcctgccccagggtggggacttagcccgtcaccaggacactcaggaaggacagggtgtccggagccgtcgccaggatcttgcacctgaggccatgacggagcacagcagggcctcgggtagggaccatgtccgatggtggtgtctgatgtggcgtccgaaggtggagacccacacggggagggtgcaaacgaggatcctttgctttctggctctgtgtttagatggttgagtctgggagggtcccccatttccagagtctggttgtttccatggtttgtttgccaaagggtgtccacctcggctacttcctagaattgtggtgaggccccttgcgctgcctgtgggaacaaaacttccaaagaccctgtattagccctcgcagcgcccccggcattgtttacacctaagtctgtgtattccacagaccctgtatttaccctctgcagtgcccccggcattgtttacacctatgtctattgtattctgctctttttaaagatgtgggttgtgacccactgttggtctgatgaactaaaatctacttctaaagctgagacccttaacctggggctcgcggatttcagtgtaactggtgtcttttgtatttgtgtggaggcttttctggggagggatccacaggctttgctggacccagcaaagttaggcaggagcctgcacaggatccgcggctgtgggcaggccccaccctctgttgcgttctctttcacagatccactgagcgtggatggcacggccggtggtctcgatgagcccggagtggcctctgatggactcccgtcctcggagccagggccgtgttccttccagcagctggatgagtcccccgctgtacccctgtcccatcggcccccagccctggccgacccagcctcataccagccagctgtcactgctccggagccagacgccagcccaaggctggccgtggacttcgccctgcccaaggagctgcccctcatctccagccatgtggacctcagcggggatccggaggagactgtggccccagcacaggtggctttgtcggtcaccgagtttggactcatcggcattggggacgtgaaccccttcctggccgcccaccccacgtgcccggcccccgggctacactcggagcccctgtcacagtgagtgccaccccatgcccggagcctccgcaacactccaaccaggtccccccagccctcaggctgagcagaggagggtgggaggcatttgccccaaggacccgaggacagtgtggctccacgagcaggctctcagtgtgtctttaggtttattctttacttgtatgtattttttgactggagaatacattcatgtggtccacattctccacaaatgggagcaggtgccaggctgtcccacccctgctccagccaccagctcccctcagggcaccccgggcccggctgccataggctgtgggggaggcaaggctgggagtctcgagtccagcgctcagcactgggctgtgcaggcacgtggggccgcactgacactctctgcgtctctcttggtctctcccctgcagctgtaacgtgatgacctgctgactcctggccgcgggcggcgtatgcggcccagactggacttagcgctgccgctgggcccgcctctgtcagtcttcctgaccccttccccaccccccgggccttggggtagcacctccttctgcttcagaacacgtcaggactggggtgaggtggctgggccgtgagcccttgcccctgtccacacagaatggacccacggccccacccagcgccgtcagcgcccggcactgccacccgggtccgggccgctgcctgcacgtgggatccgtcgggcagccggggacagaagagaccccgtccgttgggacgcagggcagagccggccacctagtcccttccagccagcagaggcgagggaaggcgtcactgccccggcggggagacgggcaggacgccctgccccgcaccagcagcctccgccggggcgccctcagctccctgcttggctctgtctctccacacccggcagggccgcgggctgccccagccctgggggtcgtgggcagctgctactcagtgccaaccccgtggggcacagagccatatacctcgctgtccggcccccaccccagcctcgccttcccaccccatcgtctccacttcaggaaaagccgcactttacacccccacctgcctcttccccctccatccctgctccccgatcctgagcggttggggtggggtccctcagcaaccccaggcgtgggtttgaggagacaggtgatttacatcccctttgctgtcctcccccggtaccaaggcagggagcctccggaggagccggccctgctggccacgcaggggccagactccagcctgtttccccagccctgcaggtcttccttctgtgggaagcttcctagcaagatggcttggagtcctggtccccctcctccctggccctctcgttcgtttctgtttctgtttacacgttggagtggggtcctccgtgggcggcggcgcgccctgccccgggtgtcgtccggcctcttgtgctcgagcccctttccgagttggactcgaccatccctcaccccaccaaggaccacactgtgaagtgataactgccttgaacccccctttgctgttttaatttacttaaact

SEQ ID NO: 921 - DNA, 10149 bp, Homo sapiens
cggctctgctccactctgctcagctccgctccaggaaggccacctcctcctccccctcctcctcccgctgtcaccactcaccgctcataacctcaagggggtggggaccccagggctggacacaccccaccgtggccccagagctcagccggtcgcacggacggacagttggaagccggaccccagagcctgaggtgggcagtgtgccagggtcccttgcggcctcctcaaggtcagtgccagctggggatgcagctactctggggctcttgagacttgtggggcacaccccaggccctcatcccaaatcacaggccccaaaaggggctttacccccggggcatctggggcaggcaggaccaggggaaagggtatgcccccgtgtccacaggccagccctggtctgggggtctatcaggagaggccccaggctgggggccagctccttgcagaggcctcactggggacaccccgcaccggccatggggagctaaaattggaaagtggcgagtgggaggcagctgacaaagctatttcacgggctcttcaccatgctccggtttcaagctcctgctccattaacctgatccccagggcctctccacccccacccaactgatgaggaggtgcctccaccctcaggccgacagcacagccatcaggctggcagcctctgctgtgggcaggggcagtggtggtcttctcttaccccagattccagaggggggtcactgagaaacccaatcctgaagggaggcaggcagaagtctgtcccaggtctgccatgtgaccttgacaggtccctgcccctatctggcccatgacccctccatctgtacgaggagaccgtcggctgctggggggcccaggggagatggctacagggctggggatgaagatttaggggaggatcaagggtgggcaaaagggccacatcagccacctcttggccccgtcagcccaagagttgcctggacatgttccctgcttcctccctttaatttgggtcctatgtctgtatccatggagtccttgggaagcccctgagccaggctgaagcgggataggaagggtaaaggtgctagctgagccgtagtacggcccagcagttctccaggggacaagctaggcccccgctggagggagtggtgagactcagccggggcctgattctggtcagcaccttggacagcagccagtgccctccctggccccgcctggccccgcctggccccacatccgctactcctgggcacctcctcaaatagcacagcctccagctggtgcccagggcctgaatacacagagcgctgagagagtggggcagtgtggtcacggacacaggcagggactgggatgtgacaggctggagctcagggacttgttgggggaatgggggtcagtgacaggctggaggcttaatgcgaggatggaggcttggctctaggggcagcacctggggtggtcatgggatctcagggaggggagtgggagtcagagaaagggtcttagagaagctggggctttgtgaggagctaagggagactcactgatcgaggtggggaccctgcaggcagaaacctgactgtagtgatagaggtggggtttctccgcacgcaggtcatgggggccttggcaggagcggttttggcagagggtggggccggtgcctctggaaggtatgaagatgtaaatgaaggtgagggaggcaggctgcgagtgagggctctgcgggcaagagccttgatgggtggggtgggggcaagagcagcagctgggatggggcactggtgttcggtggcctgtgaactgtggggggcacaggggcaggcagagtgatggtacaaggtccccaaggggctggaggggcaatctctcttcagagtgggtccccactggggtggtgggaccatgaggtggggctaggcttggctggagactgtaattccctcacccaacctgtctccccagccctgtccaggctatgggcatcaagacagcattgccggcggctgagctgggcctctactctctggtgctgagtggggccctggcctatgctggccggggcctccttgaggcttcacaaggtaatggctgtgccccggggcaggtggacaggacccttcttcccctggaggcctcagggttccaaccagcaaagccagaaagttacaggctccagacctagggtactccttctagaacacggctggatctcccttttcagcccggggttcccatctcagatagtcactggaggctgggtggagccaggttcagtcacaggaacacagagatgcagagacactgacagagagatggacacagagtcacacacatagacacacacacacacacacacagaggcctggacccagacacacacacacagagacctagacccagacatacacacacacacatcccgacacacacacacacacacagagacctagacccagacacacacacaaacacacagacatatacacacaccccccaacacacacacacacacatacacacacagagacctggacccagacacacacacacagagagagacctggatgcagacacacacacaaacacacagacatatacacacacaccccaacacacacacacacacacacacacacagagtcctggacccagacacacacacacagagacctagacccagacatacacacacacacatcccgacacacacacacacacacagagacctggaccccgacacacacacaaacacacagacatatacacacacaccccaacacacacacacacacacagagtcctggacccagacacacagcgagacccagaaagaagcagatgcagcaccaaagagactcagacccgtgccccgttcctgatgccctcgctccccagggtggggcagccttgtccacgggggaaggtggggcaggggatgtgaaggcccctctccctgaggccacactctgttctcagatggggcccacaggaaggccttccgggagtctgtgcgacctggctgggagtacattggccggaagatggtaggtcccccacatcccagggtccctcccatcccgaacccttctctgctctctgctgttccagatgttggcaagtaacagagagcttctcacagctctggggcctctggcttgagcttcagtgccttcagcttctttactggcccctcctgtatcctcctgggacatcaagtttgcccgggccctgctcacttgggaaataggtcgcattagtggagtgtgcttcagtggagcctccagcacctccttcccagaaacaaagcagtaaagggggaatggcaggcaacgtgcggaggagagggggagcttcaagcgacccggcagcccccatggtgcccttcactcctctctaccctcctgcctcggtacttccttcacagaggagtgtggagacctgcaggcactgctcttgtgtttgcataaagaggacacgttgggtttggctagtggtaaaaaataattattattattaaatttaaaaatgataataataaaagaagaacatgaaggctgggaaaggtgctggggctctgaccagcccaggttccagctcgtcctgtcccctctcccaccctcacctgccccacctccttctgccccggactgccccaggatgtggctgacttcgagtgggtgatgtggttcacctcctttcgcaacgtcatcatctttgccctctccggacatgtgctgtttgctaaactctgcacgatggttgccccaaaggtgagctggacctgggccacccagcctctccctgccagctcctctttcaccacaagggttgtgggaaccccctcctggggtcacgcccccatttatatggcgaaactgaagccttctccctgcccacagctccgctcctggatgtatgctgtgtacggggccttggctgtgatgggcacaatgggcccttggtacctgctgctgctgcttggtcactgtgtgggcctctatgtggcctcgcttttgggccagccctggctctgtcttggccttggcttggccagcctggcctccttcaagatggaccccctaatctcttggcaggtgtgaactggtgcaggggtagagggtgtagggataagatcccaaacctctcacttcatccaaagtccttgcaccccaagtatccccaagtattcccttcactttccacctgtcttcaagcctttgggtatgtcctggccacaaggtgagcacctgcatcacaggaggaactatccagatcatcccctgctcctcgcattgctgggatagagcagtggccaaagttaactggctctggaagagaggaagggacaggaccaggctgggcccctgtgggaagctagggagtggggaataggttttccagagacaggaggcaccctagtgagctggtggcctgttctttccccctccagagcgggtttgtaacaggcacttttgatcttcaagaggtgctgtttcatgggggcagcagcttcacagtgctgcgttgcaccagctttgcactggagagctgtgcccaccctgaccgccactactccttagctgacctgctcaagtacaacttctacctgcccttcttcttcttcgggcccatcatgacctttgatcgcttccatgctcaggtgaggggacaccctgtgggcttctagaacagggctgaatctcccttttcagattggggtttccatctcagatagaattccccaagcaggctgtatccccatcctcaggcatgattccaggatgaagccgtgtctcccctccctcctcagaccccaggatggggccacctttcccctccagcagggaccccagggtggagacatgtctcttttctcagacaggactcccaggccacgaatgttcccttcccactcaaatggggctcccaggacagaactgggtctcccatggctggctgtgaatcctcctcagactccagggtgacctctgtctccaccctcaggcaggactcctggataaagccatggctcctcctgccccaagtagttggtgagcccccctcagacagggctccccaggcagggcttgcctcttccctcagacccttcgcatccccccaggtgagccaggtggagccagtgagacgcgagggtgagctgtggcacatccgagcccaggcaggcctaagcgtggtggccatcatggccgtcgacatcttctttcacttcttctacatcctcactatccccagcgacctcaagttcgccaaccgcctcccagacagtgccctcggtgggtccacagaagagaaatgggggcagggctgccgccccaggaaaacagaccctctgcacccccacggtgccacagtcaggggagctgaggcacgcagggcacagcacctgagggcgtgggagcaggggcttattctttctaatgcatgggtcttggcattagcttcatcctgtggggccagagcagcatcccacggaccccacccacttcaccaggcatgactgatttccacaatatgggggggtctccgtggggcgggcagagcctggtgtctccccaaggaagtggtgggacagggtcttcatgggggcaggccccaggcgattggaccccaggcagtgacagtgccctgcccccagctggcctagcctattcaaacctggtgtatgactgggtgaaggcggccgtcctctttggtgttgtcaacactgtggcatgcctcgaccacctggacccaccccagcctcccaagtgcatcaccgcactctacgtctttgcggaaacgtgagtgctggccaggacgggggaggctcaccccctgggaccacaccttcccctagcctcttcccccatgcctggggagctctgcgcctgatggcaacatgcccatctgctttcctcttacaggcactttgaccgtggcatcaacgactggctttgcaagtgagtaggagtggggtgggggtggtcacagccatcctgccaggtgtctgagcagggcagtgccaagatgggtccacattttaaaagatcacccctgggccaggggaagcaaagagggcagtgaggaggtattggcagaggtctgggtgaaagatatagaagttaggatttaagtgagggccctcgaggtggagagaggtggtgggaggagggtcacacagtcagcagcctgaacaggacgtggccatgaactgtgggtgttgggaaggagaaggagatgacgctcaaattgctgtctgcagcctgggaggatggagggcagtttccagagagggcttcagtttaagaaatgtatagtcgcaatctaggagacatccctgtggaggttcagggaggtggttgggtctgagggtctgggtttctgagggtccagaggactgatggaactcagagcgtcctgagtgtgggcaggtggtttttaggctttgggagtgggtaagtcctcaggagagggagtggtgtgagaagaggagagacggggatggccgagattcagcctgcaagagctctgcttggaaggaaaaggagccagcagaaaggactggaaagagtagttggaggggcaggagaagaatcaaggtcatgtgccaccctggaagccaagggaagaccatccaggcatggtggggacagcttggtcagatgccactgagcctcaaggaagctggagaccgaggattagtgctggtgacatggaggttttcagcctttcatgggcaaggcaggagcaggtaaggagggaaagtcaactgaggagtagagaagtgtgtgatgactcctggaagaagcctgggactgcagggggaagacaggagtggctgagggagaagagggatgtgttaaagataggagagaatgggacatgctaagaagaattattcaacagagaagctggggatgcaggatacaggggtgattgatggagtgaggtccctgaagaggaaggaggtgagggtgtctagttccaggcggaggcctggcttcagtgggaggaggaggaagagaagccagtgtggatgcagaggaaagcaggttaatgtagacaagtaagggattccacctgaaggcttcagccttgtccatgaagcaggaggcacggccatcagctgagaaagccaggacagggacgtggagagaggcaacatatatgcttacccccacaacccagcctggatccccccactcatactatctctccactcatacttgtggggagataagaatacagtggcccttgcagagcaagggagaagcagctgactagagaaatcttggcactgagtacccaggtggtattggaggtggtgggcttatgaactccagcatgtgaagatgtgagatttcccccatggggcttagctgcctgggtgtagctgaggagaaagtaagtgattgggctctcccagatggatgacaaggaagaagtcaggaataagggtttttagattatttatagtcatgactcattggatataagcctgctaaggacggtggtgaaggtgggagggtcacaagatcaatgggattgaagaactgaagctggggggccaggaggtcaagaggagttgggcaaagaatgggaattagaaaggagtgaactttcaagtggtgacaaagttggggcatggccatgggtgtgggtggctgaggtggagtggagaaaaagccattggaaatgaggaggtcgaggaatggagaggctggttattcctgggtcttccacagaacttatttaacaaatatttattgagcacctatgtgccaggcattgttctaggcactggggatacagcagtgaacatggcaaagaccctgaactcatggagcttacagtctagtggggagaaacagaccataaacaggtaaacaaacataaataagataattttagagagtggtaagtgttatgaagaaaataaaattgcaatgggatagaagttgacaacagggtagaagcttctttagtcggggtctaggcaggcttctctgaggagatgatatttgaattgagatttgagtgataaggagatgtggagcagagaataccaggtagagggaacaacaagggcaaaggccttgagacacaaaccaactgtgtgggtgtaaaggtaagaaaggccagtgaggccagcatgatgaactgggggagcatggtggctgatttggtcaggaagggaacagaaaccagaccacttgggatcttctagccagagtaaagagactgagtttattcctattgtaatggggagctattcagagaggttaatcatggaagtgatgtgacctgagctacactcttaaaagatgcctctggctgctgtgtggagaatgaaccatgggggcaaaagcagaaacaagaagaccacttaagaggctcttgcaataatttatgtgagaagagtgatcatcttgactagggtggtggtggtagaggaggtgagtggtggtcaggactgagaggagccaacagaatttgctggcttgcttggatgtgggtgatgaggcaaactgagaatccaagatggcaccaaggcttataccctgagcaactgaatggatggtggtgccattcactgagatgaggacggagctgggtttgagcagggataggggaatctgtcaatcaagtgacatggctagtagcaattgcatatacaaatcaggagagactgggctaaagacacagatttaggggtcatcgtcatagagctagtacttgaaatcttgggtctggatgagatcatttgggaagtaaacgaacagagatagagaagctataatgtcccaggctgagcctgccacaatttgaagttggttggaggaggagctgctacgtgaggtcaggaatgttgaatgcacccagggtgacagtgttgaggaggacgccctgttgtgtgtcctctcccatctcatccctgccctttcccacactcccagtggcccttctcccatctttcctgcagatatgtgtataaccacattggtggggagcattccgctgtgatcccagagctggcagccacagtggccacatttgccatcaccacactgtggcttgggccttgtgacattgtctacctgtggtcattccttaactgctttggcctcaactttgagctctggatgcaaaaactggcagagtgggggcccctagcacgaattgaggtgagcagggaagacctggggctgggactggctgggtcatagagggcgggggggcactgctgctttctggagttgtccaaacacctggcccctaatccagaactttctcaccaccaccctcttagttgtcagagcaatggctcactctgtaggaatctgcccctccctcccttctatgaggaatggagcacctgggccttgccatgttggtcaggccttgtcctctctctggacctgtttccccatgtttaacaaggagggagagctgacctggggctctccgagacccagacatagccccaagacctgactggccaggtgggtaaggctgctgacccaccatgtcctctttcctttggcctcttgtcccgctgcccatgctttcctggaccggataggcctctctgtcagtgcagatgtcccgtagggtccgggccctgtttggagccatgaacttctgggccatcatcatgtacaaccttgtgagcctgaacagcctcaaattcacagagctggttgcccggcgcctgctactcacaggtgagggacaggggtgtggggatacagaaggtgccaggcatcagcctcaaggaccgtgaccttccaaaatgcctcctatctccctcatcacccctgggactcagaagggagggcccatcaagcggggagaggggtgggaagacaaaagtcgctgaggatgcagtgctgctcctgagcatctatgactccctccccacacagggttcccccagaccacgctgtccatcctgtttgtcacctactgtggcgtccagctggtaaaggagcgtgagcgaaccttggcactggaggaggagcagaagcaggacaaagagaagccggagtaggagggagcgggtagagggatgggctctgctcagctattcttgggccagatggggcctgaccgatagaataaaagacttttctacaacag

SEQ ID NO: 922 - DNA, 10146 bp, Homo sapiens
cggctctgctccactctgctcagctccgctccaggaaggccacctcctcctccccctcctcctcccgctgtcaccactcaccgctcataacctcaagggggtggggaccccagggctggacacaccccaccgtggccccagagctcagccggtcgcacggacggacagttggaagccggaccccagagcctgaggtgggcagtgtgccagggtcccttgcggcctcctcaaggtcagtgccagctggggatgcagctactctggggctcttgagacttgtggggcacaccccaggccctcatcccaaatcacaggccccaaaaggggctttacccccggggcatctggggcaggcaggaccaggggaaagggtatgcccccgtgtccacaggccagccctggtctgggggtctatcaggagaggccccaggctgggggccagctccttgcagaggcctcactggggacaccccgcaccggccatggggagctaaaattggaaagtggcgagtgggaggcagctgacaaagctatttcacgggctcttcaccatgctccggtttcaagctcctgctccattaacctgatccccagggcctctccacccccacccaactgatgaggaggtgcctccaccctcaggccgacagcacagccatcaggctggcagcctctgctgtgggcaggggcagtggtggtcttctcttaccccagattccagaggggggtcactgagaaacccaatcctgaagggaggcaggcagaagtctgtcccaggtctgccatgtgaccttgacaggtccctgcccctatctggcccatgacccctccatctgtacgaggagaccgtcggctgctggggggcccaggggagatggctacagggctggggatgaagatttaggggaggatcaagggtgggcaaaagggccacatcagccacctcttggccccgtcagcccaagagttgcctggacatgttccctgcttcctccctttaatttgggtcctatgtctgtatccatggagtccttgggaagcccctgagccaggctgaagcgggataggaagggtaaaggtgctagctgagccgtagtacggcccagcagttctccaggggacaagctaggcccccgctggagggagtggtgagactcagccggggcctgattctggtcagcaccttggacagcagccagtgccctccctggccccgcctggccccgcctggccccacatccgctactcctgggcacctcctcaaatagcacagcctccagctggtgcccagggcctgaatacacagagcgctgagagagtggggcagtgtggtcacggacacaggcagggactgggatgtgacaggctggagctcagggacttgttgggggaatgggggtcagtgacaggctggaggcttaatgcgaggatggaggcttggctctaggggcagcacctggggtggtcatgggatctcagggaggggagtgggagtcagagaaagggtcttagagaagctggggctttgtgaggagctaagggagactcactgatcgaggtggggaccctgcaggcagaaacctgactgtagtgatagaggtggggtttctccgcacgcaggtcatgggggccttggcaggagcggttttggcagagggtggggccggtgcctctggaaggtatgaagatgtaaatgaaggtgagggaggcaggctgcgagtgagggctctgcgggcaagagccttgatgggtggggtgggggcaagagcagcagctgggatggggcactggtgttcggtggcctgtgaactgtggggggcacaggggcaggcagagtgatggtacaaggtccccaaggggctggaggggcaatctctcttcagagtgggtccccactggggtggtgggaccatgaggtggggctaggcttggctggagactgtaattccctcacccaacctgtctccccagccctgtccaggctatgggcatcaagacagcattgccggcggctgagctgggcctctactctctggtgctgagtggggccctggcctatgctggccggggcctccttgaggcttcacaaggtaatggctgtgccccggggcaggtggacaggacccttcttcccctggaggcctcagggttccaaccagcaaagccagaaagttacaggctccagacctagggtactccttctagaacacggctggatctcccttttcagcccggggttcccatctcagatagtcactggaggctgggtggagccaggttcagtcacaggaacacagagatgcagagacactgacagagagatggacacagagtcacacacatagacacacacacacacacacacacagaggcctggacccagacacacacacacagagacctagacccagacatacacacacacacatcccgacacacacacacacacacagagacctagacccagacacacacacaaacacacagacatatacacacaccccccaacacacacacacacacatacacacacagagacctggacccagacacacacacacagagagagacctggatgcagacacacacacaaacacacagacatatacacacacaccccaacacacacacacacacacacacacagagtcctggacccagacacacacacacagagacctagacccagacatacacacacacacatcccgacacacacacacacacacagagacctggaccccgacacacacacaaacacacagacatatacacacacaccccaacacagacacacacacacagagtcctggacccagacacacagcgagacccagaaagaagcagatgcagcaccaaagagactcagacccgtgccccgttcctgatgccctcgctccccagggtggggcagccttgtccacgggggaaggtggggcaggggatgtgaaggcccctctccctgaggccacactctgttctcagatggggcccacaggaaggccttccgggagtctgtgcgacctggctgggagtacattggccggaagatggtaggtcccccacatcccagggtccctcccatcccgaacccttctctgctctctgctgttccagatgttggcaagtaacagagagcttctcacagctctggggcctctggcttgagcttcagtgccttcagcttctttactggcccctcctgtatcctcctgggacatcaagtttgcccgggccctgctcacttgggaaataggtcgcattagtggagtgtgcttcagtggagcctccagcacctccttcccagaaacaaagcagtaaagggggaatggcaggcaacgtgcggaggagagggggagcttcaagcgacccggcagcccccatggtgcccttcactcctctctaccctcctgcctcggtacttccttcacagaggagtgtggagacctgcaggcactgctcttgtgtttgcataaagaggacacgttgggtttggctagtggtaaaaaataattattattattaaatttaaaaatgataataataaaagaagaacatgaaggctgggaaaggtgctggggctctgaccagcccaggttccagctcgtcctgtcccctctcccaccctcacctgccccacctccttctgccccggactgccccaggatgtggctgacttcgagtgggtgatgtggttcacctcctttcgcaacgtcatcatctttgccctctccggacatgtgctgtttgctaaactctgcacgatggttgccccaaaggtgagctggacctgggccacccagcctctccctgccagctcctctttcaccacaagggttgtgggaaccccctcctggggtcacgcccccatttatatggcgaaactgaagccttctccctgcccacagctccgctcctggatgtatgctgtgtacggggccttggctgtgatgggcacaatgggcccttggtacctgctgctgctgcttggtcactgtgtgggcctctatgtggcctcgcttttgggccagccctggctctgtcttggccttggcttggccagcctggcctccttcaagatggaccccctaatctcttggcaggtgtgaactggtgcaggggtagagggtgtagggataagatcccaaacctctcacttcatccaaagtccttgcaccccaagtatccccaagtattcccttcactttccacctgtcttcaagcctttgggtatgtcctggccacaaggtgagcacctgcatcacaggaggaactaccagatcatcccctgctcctcgcattgctgggatagagcagtggccaaagttaactggctctggaagagaggaagggacaggaccaggctgggcccctgtgggaagctagggagtggggaataggttttccagagacaggaggcaccctagtgagctggtggcctgttctttccccctccagagcgggtttgtaacaggcacttttgatcttcaagaggtgctgtttcatgggggcagcagcttcacagtgctgcgttgcaccagctttgcactggagagctgtgcccaccctgaccgccactactccttagctgacctgctcaagtacaacttctacctgcccttcttcttcttcgggcccatcatgacctttgatcgcttccatgctcaggtgaggggacaccctgtgggcttctagaacagggctgaatctcccttttcagattggggtttccatctcagatagaattccccaagcaggctgtatccccatcctcaggcatgattccaggatgaagccgtgtctcccctccctcctcagaccccaggatggggccacctttcccctccagcagggaccccagggtggagacatgtctcttttctcagacaggactcccaggccatgaatgttcccttcccactcaaatggggctcccaggacagaactgggtctcctatggctggctgtgaatcctcctcagactccagggtgacctctgtctccaccctcaggcaggactcctggataaagccatggctcctcctgccccaagtggttggtgagcccccctcagacagggctccccaggcagggcttgcctcttccctcagacccttcgcatccccccaggtgagccaggtggagccagtgagacgcgagggtgagctgtggcacatccgagcccaggcaggcctaagcgtggtggccatcatggccgtcgacatcttctttcacttcttctacatcctcactatccccagcgacctcaagttcgccaaccgcctcccagacagtgccctcggtgggtccacagaagagaaatgggggcagggctgccaccccaggaaaacagaccctctgcacccccacggtgccacagtcaggggagctgaggcacgcagggcacagcacctgagggcgtgggagcaggggcttattctttctaatgcatgggtcttggcattagcttcatcctgtggggccagagcagcatcccacagaccccacccacttcaccaggcatgactgatttccacaatatgggggggtctccgtggggcgggcagagcctggtgtctccccaaggaagtggtgggacagggtcttcatgggggcaggccccaggcgattggaccccaggcagtgacagtgccctgcccccagctggcctagcctattcaaacctggtgtatgactgggtgaaggcggccgtcctctttggtgttgtcaacactgtggcatgcctcgaccacctggacccaccccagcctcccaagtgcatcaccgcactctacgtctttgcggaaacgtgagtgctggccaggacgggggaggctcaccccctgggaccacaccttcccctagcctcttcccccatgcctggggagctctgcgcctgatggcaacatgcccatctgctttcctcttacaggcactttgaccgtggcatcaacgactggctttgcaagtgagtaggagtggggtgggggtggtcacagccatcctgccaggtgtctgagcagggcagtgccaagatgggtccacattttaaaagatcacgcctgggccaggggaagcaaagagggcagtgaggaggtattggcagaggtctgggtgaaagatatagaagttaggatttaagtgagggccctcgaggtggagagaggtggtgggagagggtcacacagtcagcagcctgaacaggacgtggccatgaactgtgggtgttgggaaggagaaggagatgacgctcaaattgctatctgcagcctgggaggatggagggcagtttccagagagggcttcagtttaagaaatgtatagtcgcaatctaggagacatccctgtggaggttcagggaggtggttgggtctgagggtctgggtttctgagggtccagaggactgatggaactcagagcatcctgagtgtgggcaggtggtttttaggctttgggagtgggtaagtcctcaggagagggagtggtgtgagaagaggagagacggggatggccgagattcagcctgcaagagctctgcttggaaggaaaaggagccagcagaaaggactggaaagagtagttggaggggcaggagaagaatcaaggtcatgtgccaccctggaagccaagggaagaccatccaggcatggtggggacagcttggtcagatgccactgagcctcaaggaagctggagaccgaggattagtgctggtgacatggaggttttcagcctttcatgggcaaggcaggagcaggtaaggagggaaagtcaactgaggagtagagaagtgtgtgatgactcctggaagaagcctgggactgcagggggaagacaggagtggctgagggagaagagggatgtgttaaagataggagagaatgggacatgctaagaagaattattcaacagagaagctggggatgcaggatacaggggtgattgatggagtgaggtccctgaagaggaaggaggtgagggtgtctagttccaggcggaggcctggcttcagtgggaggaggaggaagagaagccagtgtggatgcagaggaaggcaggttaatgtagacaagtaagggattccacctgaaggcttcagccttgtccatgaagcaggaggcacggccatcagctgagaaagccaggacagggacgtggagagaggcaacatatatgcttacccccacaacccagcctggatccccccactcatactatctctccactcatacttgtggggagataagaatacagtggcccttgcagagcacgggagaagcagctgactagagaaatcttggcactgagtacccaggtggtattggaggtggtgggcttatgaactccagcatgtgaagatgtgagatttcccccatggggcttagctgcctgggtgtagctgaggagaaagtaagtgattgggctctcccagatggatgacaaggaagaagtcaggaataagggtttttagattatttatagtcatgactcattggatataagcctgctaaggacggtggtgaaggtgggagggtcacaagatcaatgggattgaagaactgaagctggggggccaggaggtcaagaggagttgggcaaagaatgggaattagaaaggagtgaactttcaagtggtgacaaagttggggcatggccatgggtgtgggtggctgaggtggagtggagaaaaagccattggaaatgaggaggtcgaggaatggagaggctggttattcctgggtcttccacagaacttatttaacaaatatttattgagcacctatgtgccaggcattgttctaggcactggggatacagcagtgaacatggcaaagaccctgaactcatggagcttacagtctagtggggagaaacagaccataaacaggtaaacaaacataaataagataattttagagagtggtaagtgttatgaagaaaataaaattgcaatgggatagaagttgacaacagggtagaagcttctttagtcggggtctaggcaggcttctctgaggagatgatatttgaattgagatttgagtgataaggagatgtggagcagagaataccaggtagagggaacaacaagggcaaaggccttgagacacaaaccaactgtgtgggtgtaaaggtaagaaaggccagtgaggccagcatgatgaactgggggagcatggtggctgatttggtcaggaagggaacagaaaccagaccacttgggatcttctagccagagtaaagagactgagtttattcctattgtaatggggagctattcagagaggttaatcatggaagtgatgtgacctgagctacactcttaaaagatgcctctggctgctgtgtggagaatgaaccatgggggcaaaagcagaaacaagaagaccacttaagaggctcttgcaataatttatgtgagaagagtgatcatcttgactagggtggtggtggtagaggaggtgagtggtggtcaggactgagaggagccaacagaatttgctggcttgcttggatgtgggtgatgaggcaaactgagaatccaagatggcaccaaggcttataccctgagcaactgaatggatggtggtgccattcactgagatgaggacggagctgggtttgagcagggataggggaatctgtcaatcaagtgacatggctagtagcaattgcatatacaaatcaggagagactgggctaaagacacagatttaggggtcatcgtcatagagctagtacttgaaatcttgggtctggatgagatcatttgggaagtaaacgaacagagatagagaagctataatgtcccaggctgagcctgccacaatttgaagttggttggaggaggagctgctacgtgaggtcaggaatgttgaatgcacccagggtgacagtgttgaggaggacgccctgttgtgtgtcctctcccatctcatccctgccctttcccacactcccagtggcccttctcccatctttcctgcagatatgtgtataaccacattggtggggagcattccgccgtgatcccagagctggcagccacagtggccacatttgccatcaccacactgtggcttgggccttgtgacattgtctacctgtggtcattccttaactgctttggcctcaactttgagctctggatgcaaaaactggcagagtgggggcccctagcacgaattgaggtgagcagggaagacctggggctgggactggctgggtcatagagggcgggggggcactgctgctttctggagttgtccaaacacctggcccctaatccagaactttctcaccaccaccctcttagttgtcagagcaatggctcactctgtaggaatctgcccctccctcccttctatgaggaatggagcacctgggccttgccatgttggtcaggccttgtcctctctctggacctgtttccccatgtttaacaaggagggagagctgacctggggctctccgagacccagacatagccccaagacctgactggccaggtgggtaaggctgctgacccaccatgtcctctttcctttggcctcttgtcccgctgcccatgctttcctggaccggataggcctctctgtcagtgcagatgtcccgtagggtccgggccctgtttggagccatgaacttctgggccatcatcatgtacaaccttgtgagcctgaacagcctcaaattcacagagctggttgcccggcgcctgctactcacaggtgagggacaggggtgtggggatacagaaggtgccaggcatcagcctcaaggaccgtgaccttccaaaatgcctcctatctccctcatcacccctgggactcagaagggaggcccatcaagcggggagaggggtgggaagacaaaagtcgctgaggatgcagtgctgctcctgagcatctatgactccctccccacacagggttcccccagaccacgctgtccatcctgtttgtcacctactgtggcgtccagctggtaaaggagcgtgagcgaaccttggcactggaggaggagcagaagcaggacaaagagaagccggagtaggagggagcgggtagagggatgggctctgctcagctattcttgggccagatggggcctgaccgatagaataaaagacttttctacaacag

SEQ ID NO: 923 - DNA, 802 bp, Homo sapiens
actttgagcaacaaccaaacaaaaaaagtctgaaaattgaaaagggactcagatttgagagaattgtccccactccccaccatatctttcctagtggcccttgtggcatttgggaagctggccccagggccaagtgctggtcttagctcagtcagcttcctgtccctcacgtgggctggccttgccaggtgccctcccctgccacccccctcagacacagtggagctggcctcaggctgtccaaccacagatccatgggacttccctagccctccacccctcttgccatttccgcacaccacactccctgcagaccctgctgtgtgtgggtcacccagggaaggcctcacttctgagtgtgaatccagcctttctgggcctctgggggtcagggtgtctgtggctctctaatagcctctgtttatgagcaaggctcttgtcatggagtgaatcaccggatgccccctgccaccccagtgagggccagggccagcggtatgcccattttacaactgaggatctgaggccctaagaagtgggtcacaccagctcagggtcaagtaaattggctgaacctgtgttcttaactctggggtcaaaccaccctgtctgctcccttgagccattttcttggagcctcgtgagggccccagtgtgggtgcacggggttgtcgcccctgcagggcagtcagtgccaggagcttacagggctgatccaactacttggcttcctcatgtgccaggtccttcttctcccaactgcgtacagtggcaacatcttccctatgggctgtggtgacat

SEQ ID NO: 924 - DNA, 6150 bp, Homo sapiens
gacaccagatggagagcagagaccatcgaccttggcagcccaacagcagaacactgaagccccaagtcttcaacacacctgctcactgactcttggagcactgatgcagaccctgagctgcttgctcagaaggcactttattcttcctaaagaaggagacatatctgcactgtacactgcacttgatggggatgctcccatcggaaagacgagaaggctgagtcctgtggggaactttgccagcacactcagctaggctggggcagggccagcacacggcctgggataccgccctgtggttctggttcatggatcaagacaacctagggggatatggcaacactggagaagcctctagtttctcacccttgcccaaaagtccaggactaagcagcacttccctttccttggctgacgcagcccctgaggcaccataactggatccaggtagactctggcctctcctagcctcttttctggagcccccacaaggccaggccagtgagggtcgcaggatgggaggggtgcttagttcagtctgcctgagctggtcacatcttagtcaggcacagcacattgagccgcactggtaggaaggtggcacctgctgcataggcgatctcccgcaggacaccctcccatttcttctcctcctcgttatacctggggatgagagagagtggggacaaggatggagagcttggtcagctgagtccagagtggaacgcagcagagaggggtggctgagggcacttggcccatctctagggagatctgctcctgaaaatccccaggctctgggaaaggagaccccccacaagacccaccccaaggaacacccaccccacactccaggaagggtctttctccccaggaaagatcacctctcaaggggtgttcccatattcctcaaagttcccctccaggaaggtctacactgcccacaccaccccatcaatgtcctctccttgagaatttccatgctccatttctactaagtctcacgtctcagcctccggcagcactgctccccaggggctgcctgcagcagtgcagatggctgcaggttcaggaaggagatgccccagaggctaaagtttccttctcccacccccacaaaggaccagccatagagagcaatggttctgaaaggccagggctccaactgtttcccagccctagtggcagccctccctccagaccaagcacccggaaggcaggagagaagaaaatccggctgctatttgggccctgtttctgtgagtctatgacctaagcttgggtctgctcccatctgcaacactgttgctgctccacagtggggcatggtgtcatctgtgcaagcccagactttcccaacaaactggtgagaaacggccaagcagggtatgttggctattcctccctacaggactccctagaagagggatccgctttgcccccagaggagcttgcccagtgccttggtaccccaccatggtgctatggggtgtcagccttgctcatgatgcccccttgcctccccagggtgggactcacctccagatgtcattgagctctgtgggaaccagctctccagactccgtctccagtgtggcaaagccaccaatggcatagagggtacccaccaggctgaccaggctgagtgagctacgctcctgtgggaaggcctcgaagggtgcccacctgggggtgtgtgagaaggtgcatcattgggatgcctcggcaagcccagtgactgtccctgccacccagcacccacagctccaactgcaaccctttgcaatccaagtcccaggcacccatgcccccaaccccattccccttccctgtccctctggtcttcccttccttccccattctcttgctcctccactttcctttccttgtcctcttgccattctatccaacctgtccagcaaagtccaccatggatctccccactgcccctactcctctcctgaactaactccaccctccaactcacaaccccagcccctagcaggcccccagccttgccctggacgcagtccttttgcccctcagcggcccctgcagccccacccaccttgcacacctgctctatccttcttctcccttcacagcccagttgttctcaatgtatcttcgctaccctggctcctgccttgggccttagtcccatcctccaaaactgaccttcctgaggtccacagtcactgcacacgcactgaggtcctacagcacacagccctgctgacgtgactttcctcacccatctcttcggcctcaccttcgtggcctccttcctggataatgcagctgcctccaccatcagggcttggacctcagctcctcccatttacactctctctcctgagggagcttggcccctccgtgtgctactgacccccagatctctccctccagctcagccctctctctcccgggtggggtccttttggacacccccaggtacttcaagtccacatgtcctaactggaccctcactttccctacccaatcccaatgattatccagtaaatggcctcccaccctcactcagaagcatgtacttctccccctctcacccccacatccaatcaatagctaagccctgtttctcccacctcctagactcttgctactcaaagtgtggttcatggcccagcagcgtcagcatctcctgggggtgcgttagaaatgcagacttacaggctttcagccctccgcataccgagaatcagaatctgcactttaaggcgatccccaggagatttgcatgcccatcacagtgtaagaagccctggcctgtctttgtccggtgcatcccctcaaccccatctccgctgtgcccccagctccaggcctttatcacccctgaccttcctgacccctgggaaatccctaatctgctctctatatcagttgccatgaagtactttagtagaacacagatgagatacagtccctctcctgctggcccccgctccagccccagcaccgccatcccaactccatcacccacccacctccacccagctggagcaacaccttccctcctataggccttgagttttttctccaaactgcctcagcaccacctttccttagtctggggcaacctcctcccaccaccctcaccccttttgcgagctgagtccaactgtctctcagttcagttttctcttttctgatgtcccaggcagggcagcttctgtcttgttcactgctatatcccttgcaccaggccattgcctggtatgagtccctgaatgaggaacctggcatcccctcccccagccctgggagccccctcctgcagaccaggctggccataacccttgccccgcctccccacctcactgctgatcaggagagaaagcctatttctatactgatgtccaaagtcaacactggagacccaagacagggactgcagctcctgctggggctgacagaagcccaaagccatgcagttgtccttggcggaagggacaagctttcatacttgttgtctgtgatgctgtacacttcggcagaactggtcagccctgtgtcggtgaccccagctgccacgataatgcggccatcatggacagtggccccaaagagtgagcgggcggtctgcatgggtgccagctccttccactcaaacttcttggggtcatagacgcacatcttgttcaggcacttcctgtggggtggagggtggggatgggtggagagaagcaggagcccagccacgcctccctgcaatcacctgccggggcagccaggacaaacccctgacagcctctgggagattctacctctgctccacagactcactccaggcccagcctcacctgtcactgcctttgccgccaattacgtagacaaggtccatgtgggagagcactgtgtggccatacaccacgtaaggcagcgggtccgattcaccccatttgaatgacctggaggagacgggagtgggggtgggggagggcacccatccaggctcggctcagtccctgtctctgcacccatccgcccatccacctaacacatattcgagatgcgtcagatccattgctggaacttccgaggcctctcagttctttgatcccaccctgccccccaacctccccgcccttacccaagcccaccttcactctaagcacaaggctctagctccaaatcccaccccaggccctagaccagctgcggcctccatgccccactcacccccacggagctcagccccaccccagccatgctcacagcctgtcgtagcacatgaccgagtccaggcagcgctcgccgtccttgatctctctgccaccgaccacgtagatggagttgagagcttctcccaggccaaagaggcagcggggcgagggcagcggtggcatccccagccactctgagtccagatggtcaaactgcaggccaggtgtccagtcagctaccgccccccactcccccagcctcagcccagccccactcagtcccactgccccagatcacggaggaggtcgggaacccaggtagggccaatacagcctggaggtgccctgagaaacagtgcccctcctaccatcaggctgagagcagatgagcgtcccccacacccaggcaggctcctggcaaccaccattatagcaggcggtagggcaccacagcacagaaatgagggggagctctgtgagggaggtccagctatggccttgctttcccaggctgaacaactcccaactgaggcctgcctgccccctcctctccaccccatcccactgttcaggaaacttccaaatacggccctgccttttcgccctgtaaaatctacagtccacagccttgtccacctccacagctttataattaagatattaatactaggggttcatctttttggaaagttttctgagggctgagcaccttgctgatgagcactttataagcatcatttaaccttccaacaaccttatcatgcaggaaggagaatatccccagttacaaacagaggcccagagagaataaacaatgtgcccacactgctgagctagtagctggtgaagctgccctcatcccccagtgcaaccgtaaggcctgtgagcttaaccctggcaccaagcgcctgtcacccctcttgctgatcaggcctccctgagcacaccactcaccaggctcagccccagttctatcccttgcttaccgttccttggccggaaacactgccatcttccccttcacatctccaaatcccaccccactggcaaggctcaaacttatatggccagtctccaggaaactgtctctgccctttgagatctcacagtcacaccccaactcagacctggcactccactctgctgatacctcctgggcctcagtttcctcatctgtacaatgggaggaccatacaggattgttcctttgtctgggacactgctgtgagctccgggcctggccttcacgcagaggccctgcccaggatcctcacaccgaccttgctgctccttactgtgccccaccccaacccctgtgcagggccagggcctccaacatatgccaacttggggctaccacacccctgaaattaagataccaaagttatgctgctttttggcagctgcctattgactgtcttcaaccttcaagtaggtggctatcagtcaacctccccagtctacatctcaccctagacccagtggcattcacttgtgtagacacaagccccttctgggccccaagactgtccacagtgcctagagcccagcattagctggcggctcccaaggctggtcaggcacctgcaggaagtatgcgctcatggggtcctctttgttgtcttcgttgtagaagaggcctccagccacgaagacctggttctccttggtaaccaggctgacgtggttcttggggacctggttggagagggaagcacagtagcactcgttggctgctggatcgtaggccacagcgccctcctcactgatcatgaagatgagatcctgcaggaacatgccgaagcgcagggtgtcattgaggatcccaggaaggatacgttcggcctcctcatcctcctctgctttggctttgcttgtgcccttatcagcctccttggccccggctccatccttccccttctttttcttccgcagcgtggtgatgcggccctcgtgtgca

SEQ ID NO: 925 - DNA, 1672 bp, Homo sapiens
gacaccagatggagagcagagaccatcgaccttggcagcccaacagcagaacactgaagccccaagtcttcaacacacctgctcactgactcttggagcactgatgcagaccctgagctgcttgctcagaaggcactttattcttcctaaagaaggagacatatctgcactgtacactgcacttgatggggatgctcccatcggacagacgagaaggctgagtcctgtggggaactttgccagcacactcagctaggctggggcagggccagcacacggcctgggataccgccctgtggttctggttcatggatcaagacaacctagggggatatggcaacactggagaagcctctagtttctcacccttgcccaaaagtccaggactaagcagcacttccctttccttggctgacgcagcccctgaggcaccataactggatccaggtagactctggcctctcctagcctcttttctggagcccccacaaggccaggccagtgagggtcgcaggatgggaggggtgcttagttcagtctgcctgagctggtcacatcttagtcaggcgcagcacattgagccgcactggtaggaaggtggcacctgctgcataggcgatctcccgcaggacaccctcccatttcttctcctcctcgttatacctggggatgagagagagtggggacaaggatggagagcttggtcagctgagtccagagtggaacgcagcagagaggggtggctgagggcacttggcccatctctagggagatctgctcctgaaaatccccaggctctgggaaaggagaccccccacaagacccaccccaaggaacacccaccccacactccaggaagggtctttctccccaggaaagatcacctctcaaggggtgttcccatattcctcaaagttcccctccaggaaggtctacactgcccacaccaccccatcaatgtcctctccttgagaatttccatgctccatttctactaagtctcacgtctcagcctccggcagcactgctcccacaggggctgcctgcagcagtgcagatggctgcaggttcaggaaggagatgccccagaggctaaagtttccttctcccacccccacaaaggaccagccatagagagcaatggttctgaaaggccagggctccaactgtttcccagccctagtggcagccctccctccagaccaagcacccggaaggcaggagagaagaaaatccggctgctatttgggccctgtttctgtgagtctatgacctaagcttgggtctgctcccatctgcaacactgttgctgctccacagtggggcatggtgtcatctgtgcaagcccagactttcccaacaaactggtgagaaacggccaagcagggtatgttggctattcctccctacaggactccctagaagagggatccgctttgcccccagaggagcttgcccagtgccttggtaccccaccatggtgctatggggtgtcagccttgctcatgatgcccccttgcctccccagggtgggactcacctccagatgtcattgagctctgtgggaaccagctctccagactccgtctccagtgtggcaaagccacaatggcatagagggtacccaccaggctgaccaggctgagtgagctacgctcctgtgggaaggcct

SEQ ID NO: 926 - DNA, 802 bp, Homo sapiens; identical to SEQ ID NO: 923

SEQ ID NO: 927 - DNA, 3742 bp, Homo sapiens
agacaggaaaagtgcaatattaccaagatggatgccagggctcattggggacaatggagggaataccagtggcgctcagagagcaagaggcagggagcggggtgctgaaggaatcctagctgtggaacaggtgggtgggttggtggagtttgatcttgtggcgttctcctctcccccttctttgggaagatgataggggtccctgccagatccacccagaagaaagggattcaggcatggggcccttgacctctaggccccagtccctggagcagaggcaggccctcgggagctgttccttgttttgatttctgttgtggtgcagccagctgctcagagagacctggcctaaaaatgactcccagcagccctctctcaccccagtgtcctgatatttgggctgtgatccttctggtgtatgtttgaatctttctaaaactgggtgccctcagttcagtttctaggcaggaagcctagaagtcaccagatctttttgggggatgtgagaaccttgagccgcgcacaccctggtgagacaccaattcccacaagcctgcagcagggcctggggctgagcctgggctgcccattcatctcagcgacttcagcctgagaagtgagccctgcctgggctccacacccagagagtccatacaaattctgctccgggaagagtcggggggtctattcaagtttctctgcagacaaaacttcccacaacaggtaccaatctggcctccttcctcagcaccggtagagaaagcaacagaatgggaagtttcctctgggttggagcctcagagctctgcccctcaaggtgacagggacgtccctgtggcttgttccctccacctccagtactgtatgcttgctacttcaaccccctatttggtgaatttctgcacagacacagatctctgtgcctggaatgggactgtgccctgtgcgggtctctcccttggcgtatatccatctagatatttagtctttgagaatctcaaagcagagctctctgggaagagaactgtccacattgctaaataattaagattccctcacttttttgagggccatgtgttgtgagagagagagagagagagagagtgtgtgtgtgtgtgtgtgtgtgtgtgtgtctgtgtatgcaagtgttggtaacttcccacttgaactaaataacatggggttagagaaaaaaaaataccaggcaagctgtctccattgaacaagtccttggcaatgggcaggtcccaagggactcacagcttctggcagcaagtgtgtcattcacacacatcattctggctggagagtgcaatgtgtcatttttttttctttttgtaattattttattaagtatttagttggaaatttcacactggcattaacaggtctagcataagtggcctaggcagtcatcccaggctccaaaatgaagatgtgcaaaagagatgccactgggaatagaaacactgagttggttcagttaggtcatcccctgcagacgtgtcatcgagcaggctgactcccacccctcagccatgccatgggtatgagaagccccttataatgaaagctgccagccctttcgtccttgtttcagagggtgggtcaggtggttggggtgagaacttgctcacggtgcacccaacaagacctgcaggtgcatataagtttagtcccaactgcagggccagaccaaacacttcctgggaagtgtgtggagggctgtgctagaccttcctgagtttctggctaaatcatcagccctgtttggtgcagtctcatgtctctgtggttcccaagctgcatgatcagagccagtgagaagacaggatcagtgacccacagctttggggaaaaacagccccactgttaacttccctcctgcaaacctgggtccccaggccataaggtgggcacactggtgcttacagactgggtggagagccctaccttccaaggtcttgatcccagcctgcctataaggttgggattagcatgcaatcccccttccccaatcctgtctttttaaaatctcaagtttgcacttaaccttgacaacagcaccctctcctactccagtcctagaactcagtggccttagagaatggggtcccctgcactgaaggtccccgccttgctcccagttccatcctggccaataggctgcgcctcaagaggtgaaagagaaaaaagggagggagggaggaagaattatttagaacaaaaggatggctcgagcacgttagaggcaagtgagaggcacgttggtgagaagagcatgtgcatgtttggggtagctggggcctactgtcccttcattagggaaggaggcttccagaagcggatgtcttctagaaagaaaaattgtgtgaaggctgaaaaggggcttggagttttgtctttgttgattagaaagaaggaagaagtcagctctgagtgtttcaggaagaagagagcaggtagaaagggaatttagtgatttaacacccaagggtccagccatagcaggttggaaaatcctccaaatttggccacagaaactggctaggaaaaaactgccactcattgggccacacgctgggtccccatcagttctcaatgaatggtcattgatttacttagcagagagaagtcaccagccacaaaccaatctttgagtttgcaggccctgattccagaatatatgcatccagctcccgggttctcagctggttttgcccacttccctttgactgtccaatccaaagccagtctctcaagttgtatggctcaaagagcagtgaccacaatgggtcatacagtagggacccacctccacaaattagaaccagagttcagactccattgggcacatctgggaggaaggcaacctcctttgtcgtcttgttggtaccagtcattctcaagtatctctgacacctgtggtggttcagtttgctgagcctgccacctggtatgaattagactgggtgtgatgaacattcatccatggatataccctaccattttgcgttgccttataaccaaggcacactccccataagagtttactgcagagaaagaacagcaaaacagccaccctccttgaatttacaactcattatctgcaacaggttttctttaaatccaagacacaggatgggaaatgggtttccccaccaggtactcagaggtctgcaggaagtgactcccgggcaaggcagacttcagtaatccctgaagcgtgagcatgtggactgcatggctgggtggggactggtggatgtctctggagctccagaaccttggagaattcctcatggaattcccctcccagctcttagtgggctctgtggggtcaggaggagcccttcctccaggttttccttctttcctcctcagcagagaaactggagaaaggacattaaactcagtgcagtcgatttgagtgctgaaatatttccagaatcaatggtggtgctaaactatctccatgtttctagcatttttaatagtggagttggtttgtttttaatctcatcacaaaaatgcagtgcccttggggaagggaccagccccttggcctgccactttccaggtgtcctttatcactttgacgggactctttggtctgcagaaaatgctctgtcttggcatgcttctagactgtaagatttgggttttgttttgtattttatgtttacatgcatcttatatttccctgaaaactaaataaagttttgggcctttttaaccgaac

SEQ ID NO: 928 - DNA, 226 bp, Homo sapiens
ctgctcctcacagatgcagtagcctctcccaatttgcaaggctcacctggcattctagacccaagtcacgctccagcccccgactccagggagtcttccctgattgccccagcccaccttgaagcctcagaggcctgcaattacccctcagggaagggccacagctcctgatgactcccctagtatccaggacaccaggcctccacaccccagcctgcccccacat

SEQ ID NO: 929 - DNA, 243 bp, Homo sapiens
atgccctgtgggtttcccctatgtccaatgactgtagacgggctgtcttgccaggcctcagccccgtctaccctaagcctggccccaaaggtttctctttcttcctccttgattttccatcttgacgaaggcattatatagaatcattttaatcactttcagatgttagagcagcgtattttacaggcatttatatccattgctttcctcagcaaggcatgttactacttttatcatctaagg

SEQ ID NO: 930 - DNA, 22008 bp, Homo sapiens
gcggttccaagtgtggagaaagcggctctgggtctaggtagtgtgcggagaggggcgcggggtggaattgctgcgggaagtgggaaactggaagtgggaaactggaagtggaatctggtgctccggaaagagacgttcccaacttctactttctccccagattgagggatactccccctttccaccatgggcaagaagggcaaagttggcaagagccgacgagacaagttttatcacttggcgaaggagacgggtgagtccggattcgctcagtctgcgagcgagcgagcgatctctgcccggttcgcctgctctttgcgaccattatgtacctctcctgcagaaggggtggtcggttgcgaggccggagaaatcctactagtgaagcagtttgcgcacttggttgttttgtccaggttaccgttcccgatctgctttcaagctgatccagctcaatcgccgctttcagttcctgcagaaagcccgagccttgctggacctgtgtgctgcgccagggggatggttcgtaacactcgccacaggttgctcctggtggccgctttctgggttctgagctgggatggcttccagtttcactgcgggaggggaacccgaatcccggtcctcttgggggccgtttcctttcttgattgcagagaaagggcttggaatacgtgcctatgatatgctttggccagtacacgtaacaccagggatgagagatcagttgccaagagggggaaaaggatggctctaggtttttaaatttctgttccttttataggctgcaggtagctgccaagtttatgcctgtatccagccttattgtgggtgagtaacggacagctctccttggtgttttaaggggtgggtgtataaggtattttgtcctgtatttctctcctccctgcttgaagcaaccttttagaatactctgacctgatttcttccaggagtggacctggttccaatcaagcctctccccaatgtggtgactctccagcaggacatcacaacagaacgttgtaggcaggtaataggagtctctctcttccttccccctttatacggaaacatctacatccctgaaatcctctaaaggcaagtttttcctttttaccgtgctttgagcacgttcttgcctgacatctgtacgacaagacctatggcattcgtagtgtccactccaggctttatttagagtcagggataaaggtgtttggaattgggagaagggcagagatctttagtgaagtcttctcctgtgaattcagtgtcagactgtaatctccatgaaggtagagacatactgtttttgtttactattgtatctcctgtgcctggtactgcatttggcccatgatgggcactcagcaaatgactagatggacaaatggctgaaccagggccattccagtgtttctgtttccatagttccttttcttctctttaggccctgaggaaggagctgaagacctggaaggttgatgttgtgctcaatgatggggcccccaacgttggggctagctgggtccatgatgcttactcacaaggtacagggagtgtggtgcttggagatcaggtgatggtggaggtgggcgcatgccctcctgggctgcagagtgcgtcaactaattgtctctatcctacagcccatttgacactgatggctctacgtttggcttgtgactttttggcccgtggtggcagcttcatcacaaaggttttccgttctcgtgactatcagcctctgctatggatctttcagcagctgttccgccgtgtccaggccaccaagccccaagcctctcgccatgaatctgcagagatctttgtagtctgccaaggtgggcatcatttcctttctcttgatccaggctcccaactcccaaagcacactttttaatatatcctgtcatttttaggattcctggcccctgacaaggttgacagtaaattctttgaccccaaatttgcctttaaggaggttgaagttcaggctaagaccgttactgaattggttactaagaagaagccaaaggtgtgttttggggaatggggtcactcttgggtcctggaactctagggaggttgggcctggtgggtcctacaggtaccttagaagggcctgaccaagcttctctcttttccttcctaaggctgaaggctatgctgagggtgacctcactctctatcaccgtacctcagtcactgacttcctccgagctgccaaccctgttgacttcctctccaaggccagcgaagtgagtctccagccttgagggacatgaggtagccccagaaacatggcctgaggatctcccctgacacctttccatcctcccaaacagatcatggtagatgatgaagagttggcacagcatccagctaccactgaggacatacgggtgtgctgtcaggacatcagagtgttggggcgcaaggagctcaggtatggagtggggtaggcacgggggccaggagccctggaggcagggaaaggccatgatgttggacctctgggaagaggatattgctgtgctaaaggtttgggatgggggcctgagccttttgatttatgtagccgaagcccgaaaggtgggtagtgagcctaaaacagaagggggcggggacaaagagggagatggcaagatcagtaatagtatctctggggcaggtcgctactaaactggagaacaaaacttcggcgatatgtggccaagaagctgaaagaacaagcaaaggcactggacatcaggtgaggagagaacgcagcgaggcaggtgtggactgggtgtccaggggaaaagtctgggaaaataacccaactcttgggactgttttgccagcctcagctctggagaggaagatgaaggtgatgaggaggactcaacagctggaaccacaaagcagccctctaaggaggaggaggaagaggaggaggaggaacaactgaaccagaccttggcagaaatgaaggcccaggaggtggcggaattgaagaggtgaaaggagctggggtagagcttggagttccccaacgcagggactgtgtgaagatgggagaagaaaatgcaaggcatggatagaaactttggagctgggccggttttactccctcaatccaccccctcaggaagaaaaagaagctgttgcgtgagcagagaaagcagcgggagcgtgtggagctgaagatggatctgcctggggtttccattgcagacgagggggagactggcatgttctccttgagcaccatccggggtcaccaggtgaggcggcattgggggtgcaggtttaggagacagaaggatctgtttgggtgtttggaggtggggggtgttgaatgtctttttaggttgccgaacgataggctgtggttgctgtcttcaccacagggtgccttggtgagtataaggccacaaagaaacataaaccaaaaaggatgagttaggtagatagatgagtgtgatagatttattttttttttttttgagacggagtcttgctctgttgcccaggctggagtgcagtggcacgatctcggcccactgcaagctccaccttccaggttcacaccattctcctgcctcagcctcccgagtagctgggacaacaggcgcctaccaccacgcctggctaattttttgtatttttagtagagacggggtttcaccgtgttagccaggatggtctcgacctcctgacctcgtgatctgcccacctcggcctcccaaagtgctgggattacaggcgtgagccaccgcgcccggctgatagatttattcttgaagaactagaacatcagaaaagaacttaggttatagtagatgctgccaggttacttgagtttcaagcacagatgaatagaggatctccctcagaggggagcagcattctttagttcattgagaccaagtgagcactcgcattagggtacttccactgaatactgaagaacatgtttttcctgacaaaatcagggtcacaaacaaaatgaacttttgtggcttatgtgtgggagtgtcataatcaggtcatctttgttgtacaggagggcagtagagcatggtggccctagagcagacacaggctcaggtttccttcccagctctaccacctggagctttgtgaagtgactgagctgactaccacttatccttgctgcctcagtttcctcatctgtaaaacaataatagaacctacctactagagtttttggtgaggaataaaaaaagataggtgtaatccctcatatgtgataaacactcaagaaatagtagttggagtttttcctttgagacaagatcttgttttgtcacccaggctggagttcagtggtgccatcatgactcactgcagcctcaaactcctggcatcaagcaatcctcctgcctcagcctcccaaaatgctgagattacaggtgtgagccaccatacccagcctagtatctttaccatgaggaaaataaaaggttctgacaattggtttaagtggaacagttttgttggatgtatgttggctgggccccttttattcagtggaaacaaactgtgtagacggtattctcaggagatgattgagatgctgtctgagaataatttttaaaggaaaaccagtgttgtagaatatgttaagatttggtgctatgtgggctgtaggtaccttccttaagacctatttgtgataccactgagacaagacagctgagtgggatagatcagtaacccagcctagaacgggatgttgtaaacaggccattcactaccctggatctgagctttcccatctgtgaaaggataatggatttgccagtgttctttctagtgttgctgagcatagactgaggtgagggacacagaaaaaaaaacagtatatttccttttaaatagtttacctttgtttctgttacacttcagttattagaggaagtaacacaaggggatatgagtgcagcagacacatttctgtccgatctgccaagggatgatatctatgtgtcagatgttgaggacgacggtgatgacacatctctggatagtgacctggatccagaggagctggcaggagtcaggggacatcagggtctaagggaccaaaagcggtaaggggcacgtgtgcaccaaagggaatgctgccactctgaggaagtgttagggtgggtactaccagagcctgagtagggcagcaagggctccaggcaatctgggtctctgagccccctactttcctttgggtctacagtatgcgacttactgaagtgcaagatgataaagaggaggaggaggaggagaatccactgctggtaccactggaggaaaaggcagtactgcaggaagaacaagccaacctgtggttctcaaaggtaaggagaggccgggggcaagactgcggggagatgagtcttccttgggagaagggcagctgatgttctcctatcacagggcagctttgctgggatcgaggacgatgccgatgaggccctggagatcagtcaggcccagctgttatttgagaaccggcggaagggacggcagcagcagcagaagcagcagctgccacagacacccccttcctgtttgaagactgagataatgtctcccctgtaccaagatgaagcccctaagggaacagaggcttcttcggggacagaagctgccactggccttgaaggggaagaaaaggatggcatctcagacagtgatagcagtactagcagtgaggaagaagagaggtgagtagttgcagctgagagaagggatggaaaggaagcggtggcttgaaccatttctctaaattgggggttcttaatcttggctgcacatggggagggttaaaaatactgtactgacgatcctgatttaactggtctggggtacagcctgcatggcaggatttttgcaaattccgtgggagtgcggtctgagtagtacagagtggtggaatcactcagagtcctcccctcttcacagctgggaacccctccgtggtaagaagcgaagccgtgggcctaagtcagatgatgacgggtttgagatagtgcctattgaggacccaggtgagagctctgtatgcagtggaatgagaaaagaccactggaagtctcagtattgggaattgagctttgacctttctccttccctctctagcgaaacatcggatactggaccccgaaggccttgctctaggtgctgttattgcctcttccaaaaaggccaagagagacctcatagataactccttcaaccggtaaaggggccataaactcatcaagagtgacccagggtctggtgggtaaatgggtaattttttgtttttgagatggagtctcgctctgttgcccaggctggagtgcaatggcacgatcttggctcactgcagcctgattctccttgaatcgcttgagtcagccttctgagtagctgggattacaggtgccaaccaccacgcccagctaatttttgtatttttagtagagatggggtttcaccatgttggccaggctggtcaaactcctgacctcaggtgatctgcccacctcagcctcccaaagtgcagggattacaggcgtgagccaccgtgcccagtctggtaatttctttagaaagcctggaatgttggatattagacagatgtcctttccactcaggtacacatttaatgaggatgagggggagcttccggagtggtttgtgcaagaggaaaagcagcaccggatacgacagttgcctgttggtaagaaggaggtggagcattaccggaaacgctggcgggaaatcaatgcacgtcccatcaagaaggtggctgaggctaaggctagaaagaaaaggagggtaagtgatggggcctccagagattgggtggggtgggggtggggggatggggaagaggtcacctgacaggttcctttgcagatgctgaagaggctggagcagaccaggaagaaggcagaagccgtggtgaacacagtggacatctcagaacgagagaaagtggcacagctgcgaaggtaatgggaggacaccacaaaggtacacagggctaaaagtgcagcagaaagcaagcctctaacctcttctcttcccccctgtagtctctacaagaaggctgggcttggcaaggagaaacgccatgtcacctacgttgtagccaaaaaaggtgtgggccgcaaagtgcgccggccagctggagtcagaggtcatttcaaggtggtggactcaaggatgaagaaggaccaaagagcacagcaacgtaaggaacaaaagaaaaaacacaaacggaagtaagcagagctgccaggctcccaggagagcatggggactaggaggaagggtgtggcatggctcagtctggcccccttgattaccggcctagcccctgctcacatcacagctgtctgaagaacagtgaggtggagtgcctagaactcccgtggtggtcctgagcagagaggaggatgtcctcctgcctgcctgaaggtctcccatgaaaacactgctgaactgtgttgacactcatgaccctttttttaaaccgttaaagggaagttcggtgttggagcgatactcaatgtagtcagtctacacctggacgtgtgggccacttaagccctccccacccccatcctattcctgaataaaaccaggataatggaagagttgtcttttctgacagttttaataagcacttccctatctgtccctacactgtgtgcggcactattcttaatatgtaccaattcatagacagaaatgacaaacgatccacaggtcccggtagtaaaacatttactagagagcaagcagaaaggaatgcacatcttaaagaaaccttcacaaagtcacaaaagtcaaagtttgtatatttcttttcctttttataaacgataaacaaaaatcatcaaaatcatttcagcaaaagacttttctatcattggggcaagttaaaaaaaatacaatgagatagaagacactttaaaagctgttgttgggtttcttgtttaattttaaatttagcaataccatctcaaacctggagcaatcctggaacagttaccaggatcaccttttcccttcaatccttgtggcttctgggaatcttcagagcctgggtctgaaaggtgtttcctacatgtctcagggctggatgcaaacctggctggggacctgagcatcaactcccatttagaatcagacatctcccttccctgcaaatgtctacaactaccaaattgctccccaacagttagctcaatggattgaatttgcagaagccaactcctaaaatggggactgcctggccatacaactaagaaaaagaagtcaatttatagatgcttataaggtgacaccttagtaaaaaatataagctacatacaatataaacctagagtgagttttgtgccctagaagaccctttatcccaagataacctcaacttacccacatgacaactcacctagagccaaaagaagcttcccagctctcactgcttccaaggaccaaaacagcttcccaagaaaacatccgaaaattccttctgatgaaggggtaatgtctccaagctccagctctccactaagggcagggggtccttacactttggaccccaacccagccctgagacacctagttaccaaaatctttctaaaaattaaggacaactgatttcacgctttagcacatcccctctaactgtcccatcgacttttcttgcgtttaggcggctctgggacagcaaagccgtcagctgtcttatctgtcttgctgtccaccttgtccatcttgctgctgtccactttgggttccatcttgggctccatcttgctctcacgattaaaagcttctttcctgctttccccattccgaccatcatttgcaccccggttctccccatgccggcctgcgcttcctccatgtctgttctccccgtgccgatggccatcagtatgacggctgctgctttctggatggcggtatccatctccatggcgaccaccatctccgtgacgtggactatcgctatgccgattgccagtctctccgtgactgtgacggctgctgccccggttctcagtatatctctctcttttcccgttgctgcccccagtcccttctcggctgttattccctgaagctgtgttgttgactccttgggctccggcagacgggtaggtcacaggggcaccactgatgttgccagtattgccaaagcctgggatgcccttggcggcactggtgacggggctgtcaggactgttatggccctgttgtgctgagttagttggaacagaattcaagctccctgcactagtccacccacttgccccagcagcagaacttccagccttctgattacttaaactggctgcaacaaagtgactcttgtactgtgactgaaagagaaagagacatcaggagtaggtaagatagcaagttcaagaaacttgaatatacaacttggcaaatgatgaggtttacagaaactctgtgctatcctggcactgtgagtttagtgtcctgatggccccacagtatggtcccttttgttcttgtgctataaaggaaaacttgtggatctctgtggagagatggacccccagtgttctgaaatgtacttttatagcctgattggctagaataaagcatctatgtatttagcacatttatctgcattcaaaaccaaaaagttctgaaaacttaaaaaaaattttcatactgcaatttaagtttgacagcaaaacctgccttgaactcattctatcgattcaccttagtgtgactatcagtaaattttgcttcagaagtgagttggaggtgggtgcctgggaggtgggcaacacttcaggctgttgggaagggagggaacacacaccctgctgcaggacaacaatcccaggccccaagtgtgactcaaagtagaccagcacaaggggttctctagatcaacttgcatttccaactaagctactgttaggtttatattcaaaatccaagcagcgtgaagaccctaaatctagcatcaagcctaggcgcccagctacaaccaggaaaactaagcccctctgtcactgcccaagagttactgctgaaagtgcttttaatgaaatgcttatttcagacctggaaagctgctttcattgccgttagtcgatctcccatagctcctgtggaaggcttgtaggcctcataattgctcattacattgttatttcctcgatcctaaaaaaataaacacatctatgagaatgaaaaaataagcaggaaagctcactgctatagactaggcctcattatgaaaacccttgaagtgggagctacaaaggaactggatacttttagaaagctgctactgctttgtgagaaaagacacagtgacaatcatttaaaaatgcttatgccctcaacccagaaattctatttctggaaattaaccctattaaacagaaatgcaatcagattatgcccaaagttgatcatgtatttacataaacacttccaattaattaagtaaaaattacgttaaagatgaaaaggccctgaatagcatattgtgtgactgctcaggccctgaatcaagaccatgaagggtctgaatttcggcttgaacacttgtcactgtaaccttaggtgcctcagcattgttatctgtactaacttccattcagttattttgaagattaactgagccaaaacatctgattgcttggaatggtcctggcacatataaagtgctcaataaatattacctattattatgcatcatcatcattattattataatgtgggaacagagtatgtaattacaaagatgccaagtttaatgctccagaaaagtatactggcagctttcttccctggcttggaatcaaggtgacagaaaacaggcagttaagaaaggccaccaaaagggtacatttgttacctggtttgtgagaaaaactagctcccgacttggaaattcctgatccgttcctgagtttaatgacaagatatggctagactttacagtgaccctttggcaacatttacctagcagcaggctttaggccagtgttgaagggcttataaaaccagactgctgggccccaactccagagtttctgattcacaaggtctggggttggggatgagtttgcatgtgctgctggtccagggaccacagtgtgagatcactgctaatctagaataatttcctgagcaagcctagtcaaccaagtacacaaagatgcttcttcaatagaaagttaccataagaatgagcactgcattgactcaaatcagattaaatacaaattcccttctagacagggctttaaactcactgaggctttcctgggtagatgagaatattcctaatgactttcaggacatgagaccaactataaaggcactactgtagtagtctagactcaccatgttctcagagcccaggccaggccgctccctgtagcctaggcctcctccaccaatgttcagcttttttcctttccctcctttgaatcgagatttccgaaaccaggcattctgcattgaacaaaattcaaggttaagtcaagggagggagaaaagaacagaagaagagaacgaggacaaagaggaaattaagtgggaagggggaacttttgcttaattttcagccagcactacgctaagggaggaattttcacaggaaccacagattggtttctctttggtagcataatccaccaaatttgaaaagtggctgagatccttatctaaggcttcctacagtgctccctccctcaaggctctcctggaagggaagttgttcaggtaagcttcaaacccagaggagtaactttggctacttctaacttccttgaggaaaatgagcttatattttatttctcaaaccatgtattattggacgtaaacatttggaacttaaacaactggtatgttcagaagcaaaggaaaaatgctatgtgaagtgaggcttatcagaactgactatagggacagactcccagaaaggatggtagccacacaactgaaaattttatttacccgcagagcgtaaaagttttcattgaacttgaccattgccactcaacatatttactcacattctcttaagaatgcagggcggtggctcacgcctatgaatcccagcactctggaggccgaggtgggcggatcacttgaggccaggagtcaagaccagcctgaccaacatggtgaaaccccgtccctactaaaaatacaaaaattagccaggcatggtggcacatgcctctaatcccagctgcttgggaggctgaggcaggagaactgtttgaaccggagacgcagaggttgcagtgagctgagactgcgccactgcactccagcctgggtgatagagtgtgactccatctcagaaaaaagaaaaaaaaaaaaaaaaaaaaaaagcaaatgtctctgggaaggttaaagttttatctgacaatcacatattaccagcaaaataaagtgcttgagaggtagggcagcaggcttggacaaagtcctgagcacagaaagcctgaggtacaaaaagaaatggaagaaaatgccaaagtcaaaatgtgtcctgttttaaaagtttatttaggactagctctctgtgctcaggagcaggggaggaaacattattctcttctctcctgcagtgcaggtcctttactcctaggaccagaaacttgggcactgccacattgcagctgggttgtaccagttgtgtgagctggcctaggcatttgacaaactcttaacagtttctgctctcagaaagtgttccgaacccatttgtaatttggggacagcatggattcagatgactccaggtttgatttgttagaatgcctcacttagctttagattggagcacacctggaagagggcaatcagtgtggtcagaggtctgagatctctgcaaggaacagttaagaggcaccatacaggctgggcacggtggctcacgcctgtaatcctagcactttgggaggttgaggccgaggcgggcggatcacctgaggtcaggagttcgagaccagcccgaccaacatggcaaaaccccatctctactaaaattacaaaaattggccaggcgtggtggtgggcgcctgtaatcacaactgcttgggaggctaaggcaggagaattgcttgaacccaggaggcagaggttgcagtgagccgagatcgtgccattgcactgcagcctgggcgatagagtgagattctgtctcaaaaaaaaaaggtgggggggcactatactatacacatattgttttaaaggcatcacacatttttagcctcccagaagaaaaattttgtgggggaagagcagtaaggagaatagtaaccatctttgagattaaatttactcctaagtgtgctatggggtagaaattacagcgacagattttagcacaaaggaatagcttttcaaaacagatgctgttgaaagaagaagaccagataagactagatgaattttagtatctcacaattcctatctgtacctcataagccccacatcctcctagccacccaactttcttgtcaagtttttatgttatctgttccaggactgctaaaatgtcttggtcttataaccaggagcaattgaaagtgtgcccagcccctcacctgcattgccagatctaggagttccttagaaacgtgttgattggctccttccaagttccggaccaggtcaccagcaaaattgctgtccttgggagtgagtagggtataggccacacctttctcacccgctcttcctgtgcggccaatcctatgcgtgtgggtatcaatgtctcgtgccacatcatagttaatgacagtcttaattgaaggaatgtccagaccacgggctgaaataaaaagcaaccaaattcttttattcttcatctgtagtcagaagatcaaagtaaccagaaatgctagtgctaataagccacatttcctttatctaggcaaagcgcatgggtttggtgagctgagatacaggcatgttaagtcaccaccacagattctatgatgttaggccttctagtgtaagggacttttattttttagagacggagtcttgctctgttgccagacgggagtgcagtgccatgatctcggctcactgcaacctccgactccctggttcaagcaattctcctgcctcagctttccaagtagctgggattataggcacgcgccaccacacccagctaatttttgtatttttagtagagacggggtttcactatgttggccaggatggtctcgatctcctgacctcaggtgatccgcccgcctccacctcccaaaatgctgggattacaggtgtgagccaccgtgcccgactgggacttttatcttttgcatcagtaatctgccatgccctcttctcttgcactgggaatatatatttaaaatgtgtcatgaagctgagaagttctctcctttctaggaaaaaatatcagtgtttaagggtagttattaaaacttgacagaacaaatccagaaattatattccaaaaactgttctcatcctgagttaagttgcccaactaagctgtgtatagtagatcaatgtaagggtaaggtatctactatattcagacatacaataagggcattcactgccttttttcccagagtgacttctagctgcagggattctttgattagagagaaatactaagtgaaaagtggtatctagagctccagactgtgatccctgtgctgaactgctgcttccttgggggtttgggaggggatggccagccaggccaacagtctttccatcagcctgctcagatattataggtcttatgtagtaagacagagtacccttatagcctaggaacttaatgttgttgaaaaattcatactctacctgcaacatctgtggccaccaggactgggatgtcctttttcttaaagtctgaaatgaccttgtttctctcactctgatccatatccccatggagcagcccaagattatgaccctcctgtttaaggttattcgctagctcttcagcattggcttttttagtaacaaagaggaggacactccctgaagaggtaaattctaccagacgccgggtaagccagttccatttactaggtccagaatggagaatctccacaatctgtgtcacatcttcatttgcctgagaaggaagaaatgaaacagatgattgtgacattggagccacagggcacctgaacaaggactaggcattatatttctacctgcatcgagaagaccttgaacaatcccagttctccttgggccttcagcaagtcaagtgcagctcaaaactcacctctcctttccaatcaccttgctctccacctggtgtacatacctaatttgtatgccccactactttgtagagctttccttaacaataaccatggcaagcaactgaaggattctctaagcagccataactgaattccaagtcccaattcagagtaatttttcacatagcgcatatgtacaggtaagaaatgaaacctgattttttccaggccttccaggtcaccctttccctcctgcgtaggcccctaccacaataattaaaacgtcagttccaacctaatacgctgatgcttccaggcacatctttttgtctctttgaagcctttttaaaacaattgtaagttttgagacattcaataaaacaaaaaaaacacaaaatgaacaaaatcaactcatacccatcacctagcttcaatgattcccaacattttgccagtcttgttacgtctatccccacaacttgcaaaatacccaatctcaagcatgttgcatctataaacataacatcttttttttttatctcaatagtgagaaattaattctgtgttccataatatgagaaataaacccattaaggtcccatccagccctgcttagggttacctctccaatatctccctgcaccactcgaatagggtcgatcaggatgtctctggccaacttttcaatcttcttccgaaaagttgcactaaataagagagctaaaaggtaagataaattctgttagagaaacaatatgatatctttatgcatacccattaagcttctttggcattcaggattattcagtttttttacataagctcacctgaactttaaatttagtttagaaactgattcactagggaaagatttgctcttattctatttttattacatttttagttaagacaagttgtcagtatggttcagaaaaagactcttgatttcaaatcagcagatctgtactgtacactgcttctacccactgataaaactgtataatttagggcagtttatttaatttctgatccttggttttatcatctataaaaaggaacaagttatatctagtgctaagatcctgtccagctcagataaactcattacctcccttattatggttctcaccaacagacacaagatcatttttacttccataactctgagtgcttataaaataaataagtgccctttttagtacaaatttggtttaacaaaggtgcttcatacatactctgcctgtcaggacgaacatgacttgctatggatcgaacttggtactctgcaagaaacagaacaataaaattattataacctgaaatacagtttgggaagcctggaaaaagccatattagtaaaagtcttcataagaagttgtaagaattaagaaaattagaaaccccaggccaggcacagtggctcatgcctgtaatcctagcactttcggaggccgaagcaggcggatcacttgaggtcaggagttcgcagcctggtcaacacagctatctctactaaaaataccaaaaaaaaaaaaaaaaaaaaatagccaggctgtggggtaggtgcctatcaccccaactactcaggaggctgaggcagaagaatcgcttgaaactggaaggaggaagttgcagtgagatcgcaccgctgcactgcagcctgggcaacaaaagcaaaactctgtctcaagaaaaaagaagctcctaaacatatcattcagcataaaagtgaaaaattttccctccatccaactgggctaggtctagcagtgttccaatcagtaaagacagctacgaggataggaaagcaaagggcctcgaatgatctgacattcatctacccaagaacacagaccttaacctctatgatcaaaggcatatggataaaaatgaagacagagaaaatattccccttatatacaaaggcactttgaaatttcctcaacccaataaaacctaacatacttttccagagaaaactcctaaaaatgttcatcttagctatatttctatagtctaaccccatccaggagtatttttagcttctctcatgctgaaaaaacagtctagaaagacatggaaaaaaaactagtatcatgaggatggggacagaagaaactggtattcaaggcataccaaatcccatgtcaaacattcgatctgcttcatcaaacacaaggtaagagactctttgaagattggtagctttctttttcacatgatctatcagtcgaccctataagatcaacaaaatgaacagtaagtataattaaaggcattcacagggactttctaagcagttgcactcctggcaaaagtgctaattctctagtctcagactgtaatagatactggtccaacagccacataccttatgcactacttagctcaaaggaacagaaattttgaaaactcaatcggcatcttcatttacactgtgatttaaattctgtgggaaagtggccagaagcagtttttgaggcattctaaagtgacctgatttaaagcataatgacaggtttcaatgtttaaactacactcttctaggctattctgaccatatgtatctttctgattcttgatgaacttggcaatcattttgtgggagagtataagaaaaactatttgacatagaggggaatttgtagctactagcctatatgtcacagagactctcactgaactgctaatttagccaccaatcaaaattaaaaccacagcctgccgttcatcagtatattttcaaccctgcttttaccacactttaggggaaattctctgcaaaactaatcatgttttccataccgagggaggctgagaagccatttaaacacaaggcatacttactggggtacacacaacaatctctgccccctcctgaagggccttggcctgctcccacatactccctcctccatatacggccactgatcgaagattatatgcttttccaaaccgcttacattctgcatggatctacaaagttgtgaataatatattaacaaactgtgacactaacaaatacctgtcacaacccaaacgaagttctgaaaaacagaatgtgatgtcataaaaaatcgaaacctagaacatactttaaaaccacgattttattcataaaggtataaatgaatggaataccattattgcatctcaacagattatctaaaatcttttattcattttacccccttctcttcctgatcctgtcactgcttttctaccaagataaaatgaactcatcctacagaaaaactgtcagcttataatacaaacaatccccatatcacaataggcttttcctcttaaaaaaagtagttctggccgggcacagtggctcacacctgtaatcccagcactgtgggaggccaaggcaagcagatcacttgaggtcaggagtttgagaccagcctggccaacatggtgaaaccccgtctctactaaaaataaaaaaattagccaggtgtggtggcgtgtgcccgtgatcccagcctctcggctgaggcaggagaattgcttgaaactgggaggtggaggttgcagtgagctgagatcacaccactgcactccagcctgggcaaaagagtgagactctgtctcaaaaaaagcaaataaataaaaataaataaaaacagtagtttttaggggaaaatatgtatttggttatatagaaaatatttaacacataatactttccaaaagtttcctggtagcacaacactgtgaatatacttaatgccactgaactgtacattaaaaatggttaagataatcaattttgtgtgtatcttatcacaattaaaaaaaaaagtttcctggtcattctacctcacttgactggctggtcccttgctagtccacatatggaaggaggcattctatagaaagcacatacctgctggcaaagctccctggtaggacacacaatcactgcaattggtccatcacctggttccaactccttctggtccattatatgaatcaacatgggccaaatgaaggctgcagttttcccactacctgttttggcaataccaatcatgtctctaccacttaatgccacaggcacaccctggagaaaaagtaaaatataaccactctaaaatttcaattctaaagatgtactgaagcaaatcctggggaatgataaatgactactaacatttttatttgcaatggaacaaaacatacctggtgctatgcatactggttgtgaaatagaaatatcaatatccaacattctcattaacttcttgatttataggaaatgacatcattctcattacgtggatatcagccaccacttacagaacagaaacaactccattttgtttaaaatacagaaatgaaaaatcaaggccgggcagtggctcacgcctgtaatcccagcactttgggaggccgaggtgggcaggttccctgagctcaggagctcgagaccagcctgggcaacacggtgaaaccctatctcaactaaaatacaaaaaattagccaggtgtgctggcgtgcgcctgtaatcccacctacttgggaggccgaggcaggagaattgcttgaacctgggaggcagagattgcagtgagccaagatcgcgccactgcactccagcttggacaacagagtgagactctgtccccaaaaaaaacaaaaacaaaaacaaaacagaaaaattgcaatttataatgaagggttgctaaaattttaaaaattttccccccttaagaaggtacagactatctcattcatatacagaaaatgagaatgttctgcataagaataaataaatcccatatataaatgggaaaaagaagctaaaactttcagtaatgaatgagaattttcaagtgacgaacgaaggaattctagtcattgacagtgctaaatttgtctatatacgaacctttttggttaggtttaggcctaataaattattttcttcatatcatattttcaacatacgtatcagatacaaaagaatatttgtcagccatttagtgacttcttaagagtgataaatacctctatccttatcaacaaggttctacactaaacactgttttactgctgtgatttgtttttaaattaatatagtcatgaaagactaccctactttatttttctttcattatgttttacttacctggcactgtattggagtgggctgtgtgtattcagatttccgaatctggtgcataagttgttcgtcaaacccaaaatgagcaaagctacttcctggtctaggaggtgcagcaccagagacctagagatagagacaactccccagaatgacttgtacttcaacattaacagcatttgaagttcaacaatacttacctggatctagcattttagctggagtatgaagtaaaaatacaagtctgtaagccaaaatcatacaatgaaaaggaaaaacctcaaatggtaacaaatataaacctcatattaaaaactccatgataaatattcccaagataattgtcatacaattttaaatgattaaaaatttcttaactcaaaattaattttctcataacaaataaaacggaaaaaaaattgttcaatgaattgggaagccataactgttcttttgccattttgcattaagtattaaccagatggtagaaaaaaattaatgtatcttactcttgaaatgaaaattccaagtgggctccaaataagacaagtctacacatgctggctaccaagatataatctactgcctccattttcagttatgcttgatgaattaaagtctcacttagtgatggtccagccactgtcaagccctgttcaaactgcacctaggtgaagaatggggcttataatctccattttgtcccccaaagtggtaacctttcaatgcttctctggtgatgttgatatttccaatcaggatttcaggggttttacttaaaatttttcttgggtcactggggagatgagtaacctcttggaaaacagacaagtgtacacacacaaatacacacccctcctggaaaacaggagtttaaacatcgtgtagcaactgataaggtgcacacaggcgagaaagttgtctatattagagtagatagcatagcatattttttctgtgtgtttcatttaccatctatcagcaccttaaaccaatgtagccaatgtgcagcccaaaactttctggtaggcagtttaaaccattctgaaattagtacatgcatatttttaaaaggtattagtttattctaatttttaaaataaagcatactatatgtaatttgacagacaagtttatcttcatttcaaaatattctaagatatcatctgttaacatctattccttttgtttcctcttcctttagatggggactcccacccttcatcactagcccatccagcacagaacatataaaactgactgaaatatgaaacaagaaaatgatcctatcctaaaacagcatctagaagactaaaacaatcaaattaagagacatgaacagaagggatataataattactctggcaaagacagttcagagaccattagaaaagaaattcaaggttattagtttagataaccaataatactaaatctggactaattaacattaatattaagaatattgagcttaatgatgcttacccgaagattgagcttatgccggagatctattaactgctgtggagtgaggttggttatctcttcatgctcattgtaaaagtttttttcaaatggtg

SEQ ID NO: 931 - DNA, 15500 bp, Homo sapiens
caaacctccggaggccggggacggaaggcgggcccgcagcagatcctggatccggaatctcccgggcaggagcggaatctgtcccgaaccgggtctgtgaggaactcgcgaacttggattaggaaatcccggagcccggatcgacaaatcccggaacccggaattaagatcgccaagtcccggatcgcggagcacagagcacggagtggactcgacgcggagcccggagtccggatcgcggcaccgcgggacgggacggagcgatgtcgggccgaggcgcgggcgggttcccgctgcccccgctaagccctggcggcggcgccgtggctgcggccctgggagcgccgcctccccccgcgggacccggcatgctgcccggaccggcgctccggggaccgggtccggcaggaggcgtggggggccccggggccgccgccttccgccccatgggccccgcgggccccgcggcgcagtaccaggtgagcaaggaggacgcgagcggacgggggcgagaggcgctgcgagggcgcccgggccggcggctgaaggggcctcgagtgagggccctggggaatgcatgaggaactccgggagacggtggagggcgggccgggaccctcgggctgcggcgggtcgcggtggagaagtgggaaggggaagcaggttctgcagcggagggctggaagcagctgggaggcctgggggcttccgcggcacagggattccgagtgactgggagatggaggagtttggggagccagtgaattgtggcgggtgggttgagaagtctagggtaggagggctggaaagtgatgagaaagtttgggaaagggccctcgctgagaaaccggggttaccctgcatcggccttggtcccagtccaagtctgccctgttttttctgattgggaactggcggagctctagcgtgtctgagatggctcccggctgctaataaggaggaaggagcctggcttcccacgggcacgggacgctgaggctagggccaggggattccagcttgtgcacgggcggactttactcctgaggcagggccaggcgccttcgctgggaggactccagcttagaccagagacggtggtggcctggcctgaggggaggcccagcccagtcacaggccggctctcttctgggctttctgcctcctgtcatcgtgtccgggagttgattagtctggacgtgcagagtggagccctgctggtctggggccggaggagtctgcgagagttgcttcaaagagtgctgtcctgacccctttggggttttgagagctgctcagattgcagcttcaaaagcccttgcaaagcagcgacttctgctcagtgtgtgaggacctcagcctgaccctgccagtgctctagtctgctgttcaggttgccccagagggcttggaaactgtgcccatctgccttgtcaccctctctgcatttttatttggccttcaggttctaactccaccacgtccgaagccatgtgcccaagcatttgacactggcttcttgctcatctacgggtttgctgtgggcttcctctgttttcgactcatgtctccaggcagaggtccttagggatcctcgtggagtatacacagcctacctgccccactgggccctcacttctaaggagatggcttaactagggacagtgactggatttttttttccttcttactcctcattcttcctcctttctcaagagaaaagagagtctgggtatgggcagagacagacctggtcccagggattccagctggggctcatctctcccaccttgctgtccccgttggggattcatgggcccagggtgttgctgagggctccctgcatcattcattgtagcccttgggcctgcccactgagacctggcctgggcaccatctgtgggcctttggccttggaaggacctggaacagacaagccgctccagtttccttggcatgcaagccataggaaatgtgcccttgggacagcccctgagaggatggattccacatgttttggtggggggtggccttgggcctgtggcaaggccaagctggctggctggttaggcctgggctgctagctgtgcggaagtaggagatggccctgagtctgggtttcccatcccactagctttcctcctcctggcaggagaggtagatgggaaggagaacccagccagctaactttggctgagtttgaagaggatcctatttgccttctttccaagtccagttgtatgactgccaggagaagggacttgagatctgggaaacaaaggggttcctgtctgttagggctcatgagatgcacttgaaaagtgagaatttgaggcccaagctgagcaaatagttgaaagaagggaagtgatgacctcccttcctccagagggtggttctagctgtggatcacagttaacagaggaacctaaaaaaagaaaaagaaaagaaaaaaacctccagggcaggatatggtgggctcacacctgtaatcctagcactttgggaggcccagacagaaggattacttgagaccaggagttcaagaccagcctaagcaacatagtgagaccatcatctcttaaaaaaaaaaaaaaaaatttagccaagcatggtggtgtgcgcttatggtcccagctactcaggatgctgtggcaggaggattgcttgagtccaggagttcaaggctgcattgagctatgatcctgccactgcactccagcctgggcaacaaaataacaaaaacctcagattgctgggttcactccagagagttcaaaaagttcaaaaaaaaaattttttttttctgatacggagtctcactctgtcgcccaggctggagtgcagtgacatgatctcagctcactgcaacctccgcctcccaggttcaaacaatcctctgcctcaagcctcctgagtagctgggattacaggcgcccaccaccacgcccggctaatttttttgtatttttagtagagacgaggtttcaccatcttggccaggatggtctcgaactcctgaccttgtgatccacccgcctcggcctcccaaagtgctgggattataggcgtgagccactgcacccggcctcaaaatcctttttactcatgggagagtgggtggtatgttccccaactgaggccctcaggcccaggttccaggagcatcagggccacatttggggcagggcaaagcacgctcaccggagccctggattcctcatctggggttcaggggattgatccaggcctacctggtcctgctgcaggcagggagttagggaggctcagagtgctggactgcttttttttttttctttaactcctgagttgtttttttttgtttgttttgttttgttttgttttttgaagtgggaggagttgctagcgcctataagccctatggagcttggcaaggctcagctgggacttgaactataagcagccttcccctggggccctgagtgagccaggggctctgggcccaggaaacctggagcagatgtctgggtggagcctattccagaccctgcctatgaggccttgtcttgggacttcctgttaccggagcacctgcccaggagggatgggtggtgctgcaggttttgtgaacactgcagcagggagcttcctggggaccacagggccctcgctcacctctgcaggacccactgcttcagttcttccctgtctttgtctcaggcactaggaaaaactagtctgggatgtctgggcctgggcttacagctgtagccacacttagtttttttctataatctcaggccagagaaagaacaatctttaaggcagagaaagaggctgtcttttgcctttcaacagctctgattaatctcttcctgatgcagagagactttggcaggactcccaaagccccagagccccccactttgaactttttattctcccaaacacttccgtcccaccctgctcctcctctccccatcctcacgtctgtgggtcatgtttctttccatctccgcatctggtcaagaatctgaccctctgtgttgggaacatgggtttagtgcgggatgaagaggttggggaagaatctcatctccatgatgctggggtgggggagggtcctttgatttggtacaagtctccaccctgccgggcttggttggctggttgtgctcgttgcataatctgggccctggggccagccctgtgaagctgccagggacagtgtgtgcaaggcagagctgccaaacaggccttgcaggcagcagccatggggaggcgggtgggggtggaggtgactcccagatgggctccacagaaatgtcagggagcaaggcctcaggtgggaaatccttctgcaggcatctaaagaagctatttctgtctcccactttcctgctgctcagcctgggcctctatccttgcctcccaggataatcttagcccccttctccagcttgggattgccagggctacacggagccagagccagtcctggctgccaggtggtgcctggaccactggcagagtccaggtgctagctgctctctttcccacaggccacccaggagccatagcttcccttctggggtcttctgtcataggggtagtagttgggcagtagggaggtaagaggagggtccagttctgggctgtgggtgggggctatgtgataccagactacagggtacagggtccctgtaccctgcccgaggccacccccaccagctggtacacgttccaagccatcctgttgcagccctgctcacctggggtgctgctgcctaccagacccctttctccctcggccacagaggatggggattggggctctgcgccattggcctactcatactatagtacactcctctgcctggcagtgacactgcccctgtgcctctcagccatgcttcttcttcatgatgggagaaagagaaggagggcagggcttggcaggactgtctgagagaatagggaccagcttgcccagggaatagggcacagcatgctggggctggaaggtagcaatgggccctgaaaagctccccaaggcccttccctctgcaggcaggaccctcctcccagcccaggttctggcaggcctcattcgctggcatggctgccagggcggttgcagggggcagggcaggtgtggtttacactctgtgctcaggcgcccactcccctttgttcctggggctccagcagggctctggtgtgctgctcaggccctacctggctgacgagagggatggagggcatgggctatgggtcccggagggccttgcccctgacctatgcacccccgttggctcacttcccccagcgacctggcatgtcaccagggaaccggatgcccatggctggcttgcaggtgggaccccctgctggctccccatttggtgcagcagctccgcttcgacctggcatgccacccaccatgatggatccattccgaaaacgcctgcttgtgccccaggcgcagcctcccatgcctgcccagcgccgggggtaagagcatcctgcttctctcactctgcctaactcagctctggtggtagcagagggtttccttctatcttaagagctttggtgactgaggatgactccaggctctcctgggggagagggtcctggagactggaggggcgttatgggagtgagtgtccttttttggaccattgacctcttaagtgggtttctgtcctccccaggttaaagaggaggaagatggcagataaggttctacctcagcgagtaagtgttaagaggacacctgggaggcctgcccagtggccaccttggggtgggtgtccatctctctcaaagctgggctgcagcaggaagggaggaaagagccaggctttggctgaagcaagctgatgagcttctgctaccttccttcagatccgggagcttgttccagagtctcaggcgtacatggatctcttggcttttgagcggaagctggaccagaccattgctcgcaagcggatggagatccaggaggccatcaaaaagcctctgacagtatgtgtggccctgaccacctctagccttcccaggtttccttgccttccacccccttgttttccaggggccaagcaagttgggctagagccgggtttttcacatgcaggatgcagcccactagtagagtacgaactcagttgaatgtgttggggccagtatgttttaaatgaatatatgacagtagaaaatcttaaaatacttcacagtagtacttaccatagtagtaaatggattctttcatgacatttttgtttctgataaatagatatgcagaccttgggtcataattgaaaatgtaaatcttatgggtggtggtcaaaagtttgaaaaccactagactaggggataaaggtagttcctttctccttccccttccccatccatagagaaattttcttttttttttttttttttttttctgagatggagtctcgctctttcacctaagctggagtgcagtgttgcgatctcggctcactgcaaccttcgcatcccaggttcaagtaattcttcttgcctcagcctcccgagtaactaggattacagatgcctgtcaccacgcccggctaatttttgtatttttagtatcgccatgttacccaggctggtctcgaactcctgactgcctcggcctcccaaagtgctgagattacaggcgtgagccactgcacccagccgagaagcttttcttaataataatgtagaacagtcccgagtggtgaagcctttccaggggactaggatattttggagccgtgatgggtgtttgggtttcatgtaagatgtgagccagagactggctgcgtgttactccatcatgccgtagcaccagtcccactgtgctggcattgttggtgatgcatctctttccccataaaatggtgagttccggccaggtgcggtggctcacacctgtaatctcagcactttaggaggccgaagtgggcagatcacctgaggtcaggagtttgagaccagcatggccaacatgttgaaataccatctttacaaaaacacaaaaaattagctgggcatggtggtgcgcacctgtagtcccagctacatgggagactgaggcaagagaatcgcttgaacctgggagtcagaggttgcaagtgagctgagatcgcgccactgcactccagcctgggtgacagagtgagaccatgtctaaaaaaaaaaaaggctgggactgggacttactacttctgattcccagtacctgacaaggtgcctggctggctcatggtgctcagtactgattgttgaatggttcatatgagaagatgcggtagcactgtgtcccagcatcttggtccacctccagttgtgattgcctttctctctttagcaaaagcgaaagcttcggatctacatttccaatacgttcagtcccagcaaggcggaaggcgatagtgcaggaactgcagggacccctgggggaaccccagcaggggacaaggtggcttcctgggaactccgagtggaaggaaaactgctggatgatgtgagttggggagggaggttctggagggaaggaggcctgtgtgggtttaagactgagaccaaggagtttgatactagcctgagcagcagagccagaccccatctctacaaaaaatttaaaaattagctgggtgcggtggcatgcacctgtagtcccagctactcataaggctgatgcaggaggatggcttgagcccaggaggtcgagcttcagtgagttatgatcacaccactgcacttcagcctgggtgacagagtgagattgtgtctcagaaaaaaaaagactgggccagacacttgggcgctcccagagaagtcctgccatagggaggggggcgctgctccaagcccgttggaggttgatttgtgtggttattacagtgttcctgcagatggcagtcgagtgtctcgaggaagtccctcgtgggctgcaagagggcaccatttccctgcctccagtctgcccagagtcctgcttccatccttcagggcccaggaatcttcagtatccggagctccagggctgaaatggggcttctctttcttgggatttagcatagcttgagatttgagagctcagcagcaccatctcacacccctttccatccccagcctagcaaacagaagaggaagttttcttcattctttaagagcctcgtcattgagctggacaaggagctgtacgggcctgacaatcacctggtggaggtgagagtgggcctggggcaaaagcaggctgatgtgcaggtttggcagggaaatggcctcagggcccttgggaggccctgtgttcacgcccacccccttggtgataagccatgcttccctccctgccagtggcaccggatgcccaccacccaggagacagatggcttccaagtaaaacggcctggagacctcaacgtcaagtgcaccctcctgctcatgctggatcatcaggtgacagagaccctggggtcatttctgggcccacagggacccctcaggaggggagctggttcctagaaacccttcctgtccctgccctattttcccactgttctactataagaacccgttctgactcccctccatccaactccagcctccccagtacaaattggacccccgattggcaaggctgctgggagtgcacacgcagacgagggccgccatcatgcaggccctgtggctttacatcaagcacaaccagctgcaggatgggcacgagcgggagtacatcaactgcaaccgttacttccgccaggttagccagatgccagcccccgttttctcagcccttgctttgccttgcctgctgggctactccttggccacagcctgcagactgctgccctcactggtcctggaatggtccactccactgtgcccacaagccaacgctgagcctttcgtatttcctccagatcttcagttgtggccgactccgtttctccgagattcccatgaagctggcagggttgctgcagcatccagaccccattgtcatcaaccatgtcattaggtaaatgcaaggagggggacaggaaggctcttctaagagcagattcacccttggcttgaactaaagccaaagaaagcatcaggtttctttttccctgagtgtgtgcagagaatgggccccagatttggcccaggtgggcaggatgaagtcagctatgtgccttccctccccatgtgctgcctgcagtgtcgaccctaacgaccagaagaagacagcctgttacgacatcgatgtggaggtggacgacccactgaaggcccaaatgagcaattttctggcctctaccaccaatcagcaggagatcgcctcccttgatgtcaaggtgggccctctggctccacagcttcctctggggcccaggattggggtgggctggctctgtccagcatttccatacatgtagcacctggaggacgggatgggaactctggctcagttgcttgcatgtaagctttgggggcacagtctgacacaggtaccctctccagatccatgagaccattgagtccatcaaccagctgaagacccagagagatttcatgctcagttttagcaccgacccccaggacttcatccaggaatggctccgttcccagcgccgagacctcaaggtgtagtcctctttcccgaggggactcctatgtaaagctctgggtgatttttacccacagcagttcccagggtggattagcccaggggtggggattatgctatggctttcctcctggctctttgcagatcatcactgatgtgattggaaatcctgaggaggagagacgagctgctttctaccaccagccctgggcccaggaagcagtaggcaggcacatctttgccaaggtgaggctctgccctgttttccctcctttggccgtgagtagcaaaggcctgagccacttggtttctcccttctccaggtgcagcagcgaaggcaggaactggaacaggtgctgggaattcgcctgacctaactgctcagggatctttcttcccagccctggagcctggagggagaccaccctctgggtccttgctggggccgcagacacgtaggctggggtgaggagtgtctgctgtcaccctctactctccagctttagtcttataaatgtagtgataggattccttgttgcttggtccccaaagccttatactttttgcattggctttaattgggttcagcagatgcctcctctgcccccctgcaggcaggcccaagtaggactgctggaggctgtgctttgacattgtaagacatttccgaaccaaaggctgctgggtttgcatgtttacagactccccctggggcgagggtcagagctggctctggggagctgggctaggaagaggaggtgcagcccagactcttcctagcctttctaaaccaaagttctttgccattcctacaagcccagccttgctgctggttttttcctttcctttgggtatttgcactattttgggagcaagttttctatgtgggagccactttttttgtacaggggtaagttgggggttttcagggagcctgttaggtgcctccttcttttctttcctcaatctatgcaagcggctctggccgccatcatctcctgggatgccagagggctgcctctccagcggcttgggccggggaggggacactccagttctctagcatggcctgaggtatggggtatgtgcatgtggaggccagggtaaggtgaatggggaggctgggaggactggtgttgccctttggagcttggtgaggagggtgggcctagggcttggcgagtgccacatctggcaggtttggaaatttccaaataaatccttttgtctattggtggtgcctggacctggtccttgaacagcacagccctcattaacagactggagtcctagaggacttggcccacagagctttattggagagatacacacaaaggctgtccactcacttccataatttcttgatggacatgtttttctcactgtccttctgcatgacctaggggtgggagagagaatgaacattaagttacgaacacacacatgccctagcccactgccccagagccaccactggcaaaggcacaaagatggaggcctataccttggctactgccatctcaaagtcctcctgagtgacatggactcgccgttctcgcagggcatacatgccagcttctgtgcacacgccctgaacaggaaaaggaaattgaggccccactgctgtgcccctcatctgtggcccttgagcccagagcttcctgcctctgccctgttttcagtgggtactccaattaccttcacttcagcccctgatgctcctggcatgagctcagcaatttttctcaggttgatcccccgggtcaggttcatcttccgagaatgaatcttcaaaatgtccagccgggcctggagatggcaaggaaaagcctgagccccacaccccacccccacagccagagccactttgcacagtgtccatcacaaacctcctcattggggggtgggaattcaatttttctgtcaatgcgccctgggcgaagcagtgccgagtccaggatatcaatcctattagtagccatgataacctgagcagagaaagcaagtggggatcagctaaacctcttcctcagcctgcgtggcacccaggccttccctgggcccatcccaaggatgctaccaccttaccttgatgttcttggtggcctcaaagccgtcgagctggttgagcaactccagcatcgtgcgctgcacttcactgtcccctccagaacccccctccagccgcgaggagccgatggagtcgatttcgtccatgaagatgatagatggagcatgttcccgtgccatgacaaacagctccctcaccattcttgcccctgtgtggaggccgagctggtgttagggagcttattagcttattagctctctaaccccctacccctacctcttgcttctcacattgctagccatggttaccttcccctatgaatttctgtaccagttcagagccagagacacgaataaaggtacagtccgtatgatgagccacagcccgggccaacagtgtcttcccagtgcctggaggtccatacagcagcactccctacaggggaacagcaggactcagggcagaaagctacacccctcatttcattcagtgaacatttaccgagtgctgggtcccttgctagatgttagggatacaaaaaaaaaaaaggaacatcaaggtcccttctatccaaaccacctcaccgccctaggaacacttccccagccactcttttcagggggagggccagcccaagcaagatgcagcctatcccggtgcctccccaacccctgcagtagggctggctggggcaggaggagtaagtacagcttggccctctcagagaagccctgctcctcaccttgggctgagcaatgcccagtgcttcgaagagctcaggatgcttaacaggcagctcgatcacttctttgatctccttgatctgtttgtccagtccaccaatcatctcataagttgaatctggtactttctccaccatcatcagtgacactaatgggtctaccttgttgggcaggatcttgtgcagagtgtagctgtcattccttagagccacccggcaattgggtgtcacctgggtgaagggggcgagtttcagaagtggtacagtaagagctgaccccaccaccaccaccacctcacctgctacactcacatcattgatgtcaatgtttttgtccacgtctacaacaaatttaccttcaggatgtacctaaagaaacaagggctcatgaccttccttgacagccaccaaatcactaatcctacccaggaagacctatgagaatcccacaataccttgacagaacacagaaccctgtctcccgaggctacacacaaaggggtgggaatgcagtggagaccgagctggtccctggggtcatgctgcttttaccttgaccaacactttcttcttatccatggcccggactacttcccccacataggagccctgctcctgcagcagctgtagctcctcccgcaataggcgaactagatggcaaacagacacagtggtcacctagctactcctttggagtctccaggacccaattctacgtgcatgagctaagcatcactcttattaaaggaaggccaaaggtcaaaattcatgtatttaaggaggctacaatagggctcaggaaaaagagatgcatgtgaaactactagatgatgacagggagaaaacagtaagcactgctgtgaagacacagtgcagggagataaggacagacctcagacaaactgcccacatgcggcttcccatctttctccactcacctttagcatttagttcgttcctctgtgcctgcagcctccggaggttttggctcttatcattcacaatcagctgtggcagacaagagacaaattccattattcaagggcaggagacaggaggaggtaggatcttggccaagacctcacaggtctgaatgagctgagggaagggcacagggcacctgcatgttgtttcagattctccagtatgatcctaatgaccctgccctgtccttcaagagtccctctggaccttacagcagccatcaaagaaggctgcttgtccaatactggtccaggagtaacagaatctaatggagaaaagttacagctggctcatgtaacaccaaatttcttgcaggaaggcaacaacacctggtggaaagattgttaggtgagaaacctgagttctagcccagccgctgtcaatcaaaagcaaagtaaaggtaagacaatctatttttaaaaatctagatctgttaccaaacggcacatgggtatagcatcagctaccctgcttcaagactactaaggtgaacgaataaaaacacatgaaaaagcattcaaaaatggtaaactaaacataatacctgcaaatgcacttggaattcagaattgtcttttgtggctttcccccatccaatttatattacagttgacacttgaacaacgcagggggttagggtgaaattgaaaatccatggacctgtccaaagttaaactactaacagcctaccgtaacagtataacgtaacactaacagactactgtttatgttgtctgtaaggcttactactggaagccataccttactgctggaagccttactggtaacacaaacatttgattaacaacataaacggtcctttttctatggtttagcgctttaggctagggctctgggttgcccaatttctttcattcagtctctatggaattagcattgtccagatccctcaatgatgcccttcctcacattctcacttcaccctcacccaacctcttggtgataaatttcaactcctgagcttatgtttcccttttataagaatccttttcattcgggcttcttccaaaagggttgacctttggctagaggtacctttactattaagatttgactcgaagatgtgtaacaaactgtgaacactaagaccctcaaagagatgggactggaggagaacaagagattgcttacttctgatacatacaccctactagctaagaaacaaacaagaaaggagaagcagcagcttcttccactgcactcccaaaggaattagatggatttgtggaagtccgtttccatcccccatcatcacccttcctagctccctctggagtccgtcctcacctggagttcttcaatcttggacagataatattggcggagtccgctgcctgccttcccctcctccagctccatctgaagacacagagtgagtcttaaacgacaggttaaacatccgagggggtaaagccacttgcagggcactttgaataaggcttgacaccaggtagctttgcgtagtagaaaaagtttggacttcggaggctcaggatctgggttctaatccctccctcccttggaaccctccattttcccaggactaaaataaaagaatgggaacgccgcctacctcatacgacttttaggaggaccgagaggcgatatgatatagacggggggcgctttgcactgcgtgaagtgctctacaagcccgaggtgtcagtactgacgaaggagccagcggaacggagccaaaggactggcgtcccgtctcctgcgacccgtgggccggccattcccgcgcccatcgcttccctcactcactccgcttctaccgcgtcttcctctcccagccttgccctgactcaccgagggcggcgctgacacagcagatccggtcgcaggcagcgtccagcatggactggtccaggcacctccgacccacccgacgctcctgccccggcccgctctccactcagatcacgctcgctccgcacccagccccgtaacctgccgggccgccactgcacccgccatacctgctctggtccgtcaagcgccatcttctctcttcagcagagaccgccggcatccgagccgtcttggcgcgcaagcgc

SEQ ID NO: 932 - DNA, 1121 bp, Homo sapiens
tttttttgtatttttagtagagacagggtttttctgtgttagccaggatggtctcgatctcctgaccttgtgatccacccacctcagcctcccaaagtgctgggattacaggcctgagccaccacgcccagcctattttgtgtttttttaaagctaactaccattaagatcattatagaagtttggtataatgaagatttgggtttttcagtccaatgagtttccatattcttgaatgaaaaagatccacatttcatcatttgcctgtttcattttcttttagtacttttgaacttagtttggtcagaaaatactagaattttagtttgatctaaagaaccagcttatataacttgctgttgccatgtacatttgtatgtctttgctgtgtcaaataactggatctgattttagctctttttaagtggtgaaagcaatgcatttttattcttcaaattcagacattgaatgtgtatcacaatgtgtgtgcttacctttaatcctctctcccacgacaattaggaacacgtttctccaattactgttggcagactaccaagaaaaatgttgaattagaatcccagcaccgggcacggtggctcacgcctgtgatcctagcactttgggaggccaaagcaggcggatcacctgaggtcaggagttcgagaccagcagggccaacatggcgaaaccccgactctactaaaaatacaaaaattagccaggcatggtggtgggcgcctgtaatcccaactactcaggaggctgaggcaggagaattgcttgaacctgggagttggaggtcacggtgagctgatatcacgccattgcactccagcctgggcaacagagcaagactctgtctcaatcaatctatccatcaatcgataagaaccccagattgtatagctacatgttttagcccccttttcaaagtatatgttctccttggtacttattttgacattctgacttttctacatatgctttatcaacctcttaattaaaccatcattgtctattttgagagataactgcgctgcttcccgttgtgtgttttaaatgttattgttcagtttgagtcaaataaaaggatatttaatctgtggtgccttgacatt

SEQ ID NO: 933 - DNA, 192 bp, Homo sapiens
aagaaatggcatcttagtgtaattataatttgcatttctcttatgaattaagttgaatttgcaaaaatatgcttaaggcacatttttacacccattttcggtgaattgcttgttcgtgtatcttactcatttttctagaatgtctagtcccctttttcttcactcgatataaaaagtattttttaaatatta

SEQ ID NO: 934 - DNA, 2981 bp, Homo sapiens
gaaatgttttacttgagttttctgtgtgttgagatgaaagtctcccaggctaaagatttctgaactgcacgcaatgtctgaagaagcgcttgaaaggcactttatttctcccaggtccccaaccatgggtttaggtttttatgccagaaaggggaccttcatgaacaaagacccccaagacctagagagaagaggaagtctgaaagagggaggtttgaattcagccttcaggaatgaagagggcagacagagcaggaggctcaggcaggggagtcaggaaccacagaccagaaacatggacttggaaaggttttcatgtaattgaaatgaagctattgatccatccattttaaaagaatttgaaaaattcattaaaatacttaattagtggcatccactaattaataaaagcatagggagtggcatctttaaccaaaaatgaaaatgaagaaacagactccagcccagggaccaggggcgattatgagggacatggtgcctcatacagccaagatgatccaagaggcatcatctttaatgaagctttaacacctggcagcctgctcattgtgttgtttaagaggtaagtatgaactggttttgtttgtagcttttgtgtggaatcaggtagtgctgtctgcagagtgtaaacctttatttctttaagtaggaataacagataaagtaattctatattaaatcccaagagttttattctaaattggtaatgtgactttcatctctcgagttttttcaaatcgtttttaatttgtggttgagtcttcacgaacttcttgtcatcaggcaatagttgattccccttttttgaaagctttcaatttcatttatccttagtgttgaaaagtgtcagaaaattgaaatggacacagatgattgtatctgccctccctttcaggaaagccatgttgactttaaaatatcaaaaaagaaagttcagttatgattgcagggggtaatgatagtttgatccacaaactatttgcagtgtaaaagtgaaataccttagctgacttagttcatttttgaaagttttgaatagctaaaacaaagttggcaaataggctcatagagtagttacagagtaagactaaattcatatttgatgcagattcctctctacctcccattctgggaggatttagttttactgtttggtgtttaggataatgattgttctgtttttctcaccctactatgtgaatatatattctgttagagatgggctgttatctgcaatgtggactcaataccatgggcttgagtttggttagttcatcattagagattttttttcagcagttggtttactttatgagaaaggatcatgagtttaattttcccactgatatatttgtgttctcattgctgagatataagtttcttaatgatttgttacctttttctattttcctagactagtattaaaattttgatggcatatgggtttggttccacttgtagagaataaatgttcacaacttactggtattagcacacacacatcacatgcagaaatggtgttttcttgccacttactctttctcataagatgcttatattcctgtgggcatttgtcttccacactacagcacataatttgatgaaactgattttctgtgcaagagcttgtgtttctccaactctggttttatggaccacttttcattggtatataggaggcggttaaaacgtggtggtagaatgcaggttttaggttagctgggtgtgaagaatcccaggtctttgggatagtcttggcaagttactcaactcctctaagttagtttcttgatctgtcagatgacagtaaacctcagagttgtgaaaattaaatggatataatgtgtgtaaagcacttagcataatgctttatacatcgtaaaactttcaaaaataggagtagtaattattacaaagaaatgtgaagaagagtcctagtgggctgcatgttaaaaatagtttttagttaatgaaaattaaatcacatcttagatgtttatcatctgcatggtacttttctggttgctgctttaacctttgtatagttgaaagtctgtaaactttctagtattctttgatttctggcccatttccctcctaccattcacgcttatattttttggttcaagtcaccattccttgcaaaactaattaaatacattcctaaatacataatattgccaatattcattcacatccaccacgtctagatccaagtcttcatcttctttatgctggtctaatttttgctgagccttagaagcaaagacagactccgggggttgatatgggacctccagaatggggattgcacagaataatcttatttttcctctattcttctagtctgttatgttctgaacccacacatgttttcggaaggaccagatggctgacactggctaatgggaaccaaaagacgagtgaaagtaacctggttgtcacatacccccagcttagaggtgcttcaccctgccccaaggtcaatttcttttttctctagagactttaccccattatatcaaaaacctttactacagcctgactttatctgatgttagagtatcattaagtcaagcagcagcatttattgagtgaaaaaagattgtacacaggactggaagagaagcatctgcctttaaaatacagtagaaggccgggcatggtggctcatgcctgtaattctagcactttgggaggccaaggcaggtggattgcctgagctcaggagttcgagaccaccctgggcaacatggtgaaaccctgtctctcctaaaaaaaaaaaaaaaaattacaaaaaatttgccgggcatggtggtgcacacctgtagtcccagccactctaaaggctgaggtacaagaattgcttgagcccagggtcagaggttgcagtgagtggagatcgcgccgctgcgctgcagcctgcgcgacagagcgagactatgtttttttttaaaaaa

SEQ ID NO: 935 - DNA, 2981 bp, Homo sapiens; identical to SEQ ID NO: 934

SEQ ID NO: 936 - DNA, 2981 bp, Homo sapiens; identical to SEQ ID NO: 934

SEQ ID NO: 937 - DNA, 537 bp, Homo sapiens
aaaatgtggtttgggtttctagtatttttttatgcttccaggtacccagaaccgcaaattttactttgagctcctcagaagaaaggtgctccaggcatctgagagaataccgttggggtgatacttacaaatttgtaagctaacactgaaatcttaaaacttccgaaaatattaatgcatttgtatgacttatttttcaactgagtatgtcaaagtactttatgaacaagtgttgtccctagtttgtactgatggggaaactgaggcatggggtgataaggtgactggcccaaggttacaaaatgagttattgacaactccggaaatagaagattttttaaattcccatactagatacatgtgggcattgacattcaaagcttccctcatgctatttcctttagtcctgtcctttggggattgcctctgagggtgagagggtagttcaggtttccaggcttgttcagcctttagtctctgtagaggcttccagcaagctgacaagttactgccaaaagtgagacagatggtattttt

SEQ ID NO: 938 - DNA, 334 bp, Homo sapiens
aattgaatagaagtgctaaagctaaagaaagtcctaaaataattggaataggcaagtttctgaggcttcatgaaagaggtaattctcaagcatatggaagaagattgatataattcaacttgtgtagtcaaggtgttccaggtttagagagtgacataaagatacttaggagtcgttatagacttctaaacaaaaaaatgatttagtagctgacttttcctgacacaatgcaaaagacaagttgactaagtaaaaatagctctagcctagaattacataaattaatccaaatggtagagacagccctgaaggcccagcaaatgagaaaactgca

SEQ ID NO: 939 - DNA, 334 bp, Homo sapiens; identical to SEQ ID NO: 938

SEQ ID NO: 940 - DNA, 537 bp, Homo sapiens; identical to SEQ ID NO: 937

SEQ ID NO: 941 - DNA, 537 bp, Homo sapiens; identical to SEQ ID NO: 937

SEQ ID NO: 942 - DNA, 328 bp, Homo sapiens
  misc_feature (278)..(278): n equals a,t,g, or c
aattgaatagaagtgctaaagctaaagaaagtcctaaaataattggaataggcaagtttctgaggcttcatgaaagaggtaattctcaagcatatggaagaagattgatataattcaacttgtgtagtcaaggtgttccaggtttagagagtgacataaagatacttaggagtcgttatagacttctaaacaaaaaaatgatttagtagctgacttttcctgacacaatgcaaaagacagttgactaagtaaaaatagctctagcctagaatacatanattatccaaatggtagagacagccctgaaggccagcaatgagaaactgca

SEQ ID NO: 943 - DNA, 5153 bp, Homo sapiens
gaaccttcacataaagtgtatttacagcgtctgtggtagccagcccttcctcctctactttctaggaggggatagccaataactaggaatttaatgacagatttttttttctttgaaataaatggccagagtttctccattttagaattttgttgtcctccttaatcatctgcttacctagtcattactcaatctgcagaaacttcataaaggaaaagtgctgcattgtttttacaaataacagtttgtagggaaaatatgacaaacctcaactatgggagttgtccacaatacaaaattttgaaaaaacattacatagtgataatatcatacttggttgttaggcttgttgcttccccacatcagaggcatctaatgatttatcttttgtaattgctgtgaacttttttaaataagccatttagtgtgaaattgtcatgtatcaaatggctattggaaatggactttactcaattttaattccactgtaaataaggacggagtcattcctacaaggctctcttcagagaaatagattaaaagtccaatttccaggtattattagtatagttatgccgctgggccacatcctcaacaacagctgatccctcttgtataaatatgttaactgtgcagaacagttatgttatgggacaaatataatggtcattatggtcagattggttgatgccacaccagtcaaggtagagtctgatagggcagtatcttaataaccctacccatgacttaactgttggatttgaaaggaaaacgtaggatttgctcttgtccccttacccgccacaaaattttgataatttgtttaaaagggagaggcagaggaaaagactagaagcataaatagctgctttaggtttgccagaggcacatagcttaacattagttcttaatatcgatgttatttttactaatgtaattaatcaacagagcaccaagattctttcatggtgaaaagggtgggcttctgttttggtatcttaaaatgtttcttttaaaatatacatcacctgtgtgagaaccaggaccacctgggagagtgatgaatcattggctccactcaaaagcattgctttactgagttttaaatttcacactgttttgccgctcaagaaaggtcttaaagtagttaaaggatgccagcaatagtgcgaatagaattttcggttgtctgcataataaaaacacccattgcagcatgattggtatgttgctcttgcattattgggaatggtaaatcagttatgggctagaaactatggaatggccgtcctcatatgtgatgggattgctgattcagacttccctattttccatacaattttgttatgtgcagagttctaaagccattttataatactgcagtatcccccccccccccacctttttttttttgagacggactgtctgttgcccaggctggagtacagtggcgcaatcttggctcactgcaacctccacctccctggttcaagcaattcccctgcctcagcctcccatgtagctgggattacgggcgcacaccaccacacctggctaatttgtattcttagtagagacggggtttcaccatgttgaccagactggtctcgaactcctgacctcaggcaatctgcccgcctcagcctcccaaagtgctggaattacaggtgtgagccaccgtgcccggccaagtatctcttttctacagccttattaaactaactacaaacatttattttccaatttagttttactttcagtgcatatcaaagttgttgtactcttcagaccaacaaattaacttgagggcaaattacatagctttccatgtacccttttttcctcaggtgctaatcaaaggctctgaaaatggatactgctttagtgatgtctgctttattcttaaaatgcttatttcttttgctagatgtaaagatttggtgttaacaaaagtggttttaatatgtaaatatgaatgaatgcctttagtttaccctgtttgtctattattaatctgttttcatttatccttcatagaggaggatcctttcatgatcttgaatacatttcattagatattgttgcattttaagaatgaaaatacaactgttttctgtcttagattaatcctgctgctatgagaaactgaaaatcaagaatgtgatgcactttttacattactatataccatacatataccataggttgctttgatacctttcctgtagcacagccactaacaagagtgaatgaattataaaattctttttgggagggaatcaatacaagtaactaattcttagctgatattgtcctatgaaggacaataacttaggaatataagaattctgttaatagtacactttttggccttaaatgtcttctactactgaaaatagtttaaatcttagctttgtttctattattccctctctctgcctcagaaagaggaattgggaagaatggcttaaaggacgtggtgtcattgatttgttgctgatcttttagaaaacatttgtctatgtaagctggggacttattttttgtttgtatatagaggggaaatagtgctgccctgaaccaatcagatttagtttaaatcaaatcaatcaaaactccagctgtttctcttgtctttttacttagcaaaggaaaactttagtgaatgctacttgacaagaagaaaagtcatttctcaagcacatacccaaacttgaaggtgattgaacccaaaataatgggtgggaaacaccaaatgaggtggaggaatgagaaagatgtgtgggccaaagctatctggttatattttgatgttgccaatatcgcaaagccaaaattttaatttgcttatttaatatatttgttggccagagatctatttttatatcaatgtgccttgcatgtatattaaaaaaaaaaaattggaaacgccatgtagtaatgcctgagatagtcgatggttcttaccacctcactaatttttatgcagtatgaaatgctcattctattgcccaactggtgctctctgtttaaagttacagatcttgcgaaactggaactattttataagctggggaagtgatttactttttttgttgtatcttttttgttcttagtctgttagtggctgtcctgtagtgggaaatagtaaaaggattcttcactcccttctcccctcagcaccttcttcaagtaaacatttcttgtgtgctttgaaaaaagtttcagcttgctgtctcttttagtgttttaaagaagtgttatacaaagcattgtttgcaaaatatagggagataatggagtccactttaatttggaattctgtgtgagctatgatccaagttatcagctctttccaactttaaaaattttgttaaaagcaccttgcttagaaaattttaaatatttatgtctgcaacaattgtctcaaaataataaactgtgcaattcttgtcattaaaaaaaaaaaagatctgaattttccctaatgtgacttgttagtttctctctgtatttcctgccagtgtaaatgtgaaagctttgcttgcattacgttttagaaatgcattttgcacactcgaattttgccgaagctccgtgaaaaggttagatctaagtagatgaataaagctatgcacatgttttgaaagtttaatttgtgtgtcattaccaaaagtgaccgatttgtccttactactttgctgttgttagctttaccatctttggaaacttggctcaaagttacatagttctgggctagctcatcagtggaactaggagagaggaaaactggcacctattttaataaagttcaatttaaacgagagcttgacttgtatctattaaagagcttttcttgaaacagggcagttttatcagctttacaaatcattggatgctcttccttagtaatattttggtttatttgatcaaatagaaatggaaagtaattcaaactgaaagacccttttttgtcatatggaacttggtgacgattttttgtcttaaagctggtttaaaggtaggataggcttttacctttattgctttagcataaatttggtttactgaattgactggcttgagattagaattattcagttgtttgtaagatcaaagcactggttgttttaaagataacgtgtatcttttaaaaaattgcccaagctgattagaacaagtttaggagttgggtacatttggttcaagtgctgcaatctgtatgtactaaatagctttactttgtgtatgtgtacttataatgtgtagatgtactactacccaggttttgtcaaatcatcttttttaaagtttttttttttttaattggttcaggacctttgtaggagaggctaatatgtttaagtagaagatattactgatagcattttccccatgctcctacataaaaaataaatatttccattttatagctttttcaatatacagaagagggttacttcttcatcaagtatattgttgcctttgaggacacagcaaaacccttctatatgtatcttcattgatagtggcagttaaaaactaagttatccagttaagacttaaaaggtgacccatattaattgcatggccttaaaaggcagaaatgcaggagtgtagcaagcatcattttagatggctatggttcctcttccgcatctgtcagtagttcacttatgttcagtcttagaacctactggaggagtgaagtaatttctctgtctcgtgcagaggcactaaggagctgagttacctcttaatctgggggaatggataataagtggagtacagttatgttaaaggatgttccccccgctcaaaaaaaagtttcaatgtttgttttgcccagtcaaaaatataggtcttttctacatataagaacagtcaccagaaattttcccttttgctaaatgcttaggtatttgctatagctgtttctgatgtcatggattctgaggaagtgtcatttacgtgatgatcttcctttattgatgtcttcatcatgttcagtgttttaaaaatataaattacaaacactctacaaccatacccagatttacttattttatcagaaaaaaaacttgagaaatttgtagatcaaattgagagacaataagtgtacattgttgaataaaaaattttaaagtttctga

SEQ ID NO: 944 - DNA, 5153 bp, Homo sapiens; identical to SEQ ID NO: 943

SEQ ID NO: 945 - DNA, 25012 bp, Homo sapiens
tgatggaggtgacatttcaaggagaatatcctgctactttggtttcacagggtgctgaaataattccctcaggaactgagcatcctgtgtttcccaaggcttacgagctggagaaacggactagtcctcaagttctgggtagcattctaaaatctgggactactagtgagagtggagccttatccttggaacccagtcatataggtgacctgcagaaagcagacaccagtagtcaaggtgctttagtgtttctctcaaaggactacgagatagaaagtcaaaatcctctggcctctcctacgaacactttgttaggctctgccaaagaacagagataccagagaggcctagaaaggaatgatagctggggttcttttgacctgagggctgctattgtatatcacactaaaggtaactcatttgtttcctatacaaagatttttattggccaatttagtatattgtttatattaagagaattttaagagaattagttgttcatattaagagtattttaagagaatgacaatgtggataagcagctggtgtcaaactaattcagggtccttggaactagtatgattaaaatttagaagaaatgttcacttttccaacttaaaaggatttttaaaaatacaaacataattgacctacctggttcaaagaacagaagtgaggagaacttgcttaaaggtattgatgttatattttctcttgactgagtgcttgaaaaaaaattttattgaacatatgttctccttccgtggcttttttgtctttgcttttttgttttgttttgtgttttttttctttgagatggagtctcactctcttgccaggctggagtgcagtggcgtaatcccggcccactgcaacctccacctcccaggttcaagtgattctcctgcctcagcctcctgagtagctgagattacaggcacgcaccaccatgcccggctaatttttgtatttttagtagagacggggtttcaccatgttggccaggatggtcttgacctcttgaccttgtgatccacccacggcctcccaaagtgctgggattacaggtgtgagccaccacacccatttgcttatttgtttttgagacagagtctcactctctcacccaggctggagtgcagtggtgtgatcttggctcactgcaacctccgcctcttgggttcaggtgattctcctgcctcagcctcccgagtagctgggattacagccatgcgccaccacgcccagctaatttttgtattttcagtagacacgggtttccccgtgttggccaggctgatctcaaacttctgacctcgtgatccgcccgcctctgcttcccaaagtgctgtgattacaggtgtgagccaccgtgcccagcctctcctttgctttttatatcatatgcgtctttaatagtgagctcatttaatagttctaatttgattaaaatgagtagaagcactgtttttgaagaggagactgataagtcttggagtaatggatgccagtttgtaactggaaaataagttagacaaatcacagtgtcaagtatgattagcatagttgagaccaggctcttgggattctccttttcatagccctaaagcccaagtttaaagggaaccaggtatctttcaagtttcacgctaataactttcttttcttttttttctttttttttttttttttttttgagatggagtcttactcttgtcacccaggctggagtgcagtggcgcaatcttgactcactgcaacctccgcctcccgggttcaagtgattctcctgcctcagcctcccacgtagctgggattacaggtgcccaccaccacgcctggctaatttttatatttttagtagagatgaggtttcaccgtgttggccaggctggtctcaaactcctgacctcaggtgatccacccacctgggtctcccaaagtgctgggattacaggtgtgagccaccgtgccaggcctcatgttaatcactttcttagaatgtggtttgtttgtgtcttaaagaaaaattcgctgtatggcataactgtaatctaaatccttagagcaaataatgaggtttaacgatgatgtttatatccttttgcttttgagaacagtgggtttcagtcttcccatctttcctacctcttcctcctttctctaacagaaatgtatgctccatgcatgcatgtacacacttaatacatagtgcacattcccattttaacagtggctcatttaggcagtgacttacaattgcagggaaaggggaccataccagattgtgggaattgggtaattaccatattctctctggaagaaatactgcctcagggatgaataacaaagtgatttgtgacttctaagcaaatttcctagtctgcatacgtttccttatctgcaagctggaagacattgagtataataaatagatgtccttttaatatcattttacttccttaaaaatggaagtagtagaattgcttaatggaagtttaggaatcctcacagataacatttacctgatttcacttattctccagctctgctctttgaaggtaaatacaggagttggttgtttttagcaatgttagggcaaaaagataaatgcttcgttttttaagacatgtgttatacattagttaacctctgccaggagagttgggttttttggtattgttttctgtgccgtctgccctctagagactattactggaaaatgtttaccgaagtattttgcactggcgatcattgtgtgagcctgagagggtatctggttgtgttgtgttctcttaccacctccaaaatattctgggaggcccagtgtggtgggtcatgactgtaatcccagcactttgggaggccgaagtgggaggatcacttgagctcaggaatttgagaccagcctgggcaacaatgtgtagtcccagctacttgggaggcttaggagggaggatcacttgtccctgggagatccaggtctgcagtgagctatgtttgcaccactgcactcaggcctgggcaacagagtgagaccgtgtctcaaaacaaaacaacaaaatgtgtaggatatgttccattaggtaactggttaatagttcttatgtacaatttctattaggtggaattgcaggccatttttaaattggaatgttaacctgaatttactctttatgcattttccctatccatgggctagctgaatatgaaatcagtggtatttatataagctgaatacccctatatgggtgcagttatatttagttttgctggtattaatgaaaaaatttgctgtaggtaaagtgtcatcttgagttctgtatttggacatgattggaaattaatcagattggcatcaaaatttttacccctctagaacaataaataatactcagttcaattgggttccagagtagcaagttctttgaattcctgccaaatgttgattggtccattagcagtccattggccactcatttttctttacttgaattatatttggagatcttttataagtgaagccttttttttttaaagttaactctaaaagaagtaataatcagttgggctactggaatatcctttaagaacatctgtattattttctttgtgctttagtgtagttttcagatgttcagtagtaatctctaagtgagtagttgaagttgggcttagaattggaagttctctgcatttctcctgacttcaaaaataagcccttcagcaacttaatttggaaatagtgggtaagagagtgcgttatgtcacttctttaagaatggtgcactatttatttaacttatataaagaaaggtgtttttattttgttttttggtggttttttttttttttgagatggggtcttgctctgttgcccaggctggagtgcagtgtcacagtcttggctcactgcaacctccgccccctgggttcaagcgattctcctgcctcagcctcctgagtagctgggattacaggtgcacgccaccatgcctggctaattttgtatttttagtagagacagggttttaccgtgttggtcaggctggtctcctgacctcatgagccacctgccttggcctcccaaagtgctgggattacgggtgtgagccactgcacccaacaaagaaaggtgtttatttgactcaaggttttggcggctgggaagtccaagtgcatggcggcagcttctggcaagggctttttttaatacaggaagtttttagattaagcaattacttggaaccttaagcgtactatggatttttaaaaatttgagtgttaagtacaattgagggtatgaagtaaagatacaatagagcataaaaaggggatttgtgctgggtgcggtggctcacgcctgtaatcccagcactttgggaggccaaggagggtggatcacgaggtcaggagatcgaggccatcctggctaacagtgaaaccccatctctactaaaaatacaaaaaattagccgggcgtggtagcaggcacctgtagtcccagctacttgggaggctgaggcaggagaatggcgtgaacccgggaggtggaagttgcagtgagctgagatcgtgccactgcactccagcctggacgacagagcaaggctccttctaaaaaaaaaaagggtggggggtggcgggatttgtgtggattctaattccttgtgtgggattttccttttagctgttttttttttttttttttttaaagagacaggatctcattgtcacccaggctggagtgcagtggcactatcgtagctcattgcagcctggaactgggctgaagctctcctccttcctcagcctcctgagtagctagtactacaggtgtatgccaccatgcctggcctcttttagctttttatataatatgttatgccattaacttttctctttttttttgagacagggtgttgctgtgttgttgaggctggagtacagtggtgtggtcatagctcactgtagccttgagctcctgggctcaagtgatcctcctgcctcagcctcctgagtagctgggaccacaggtgtgcaccgcaatgcccagctaatttttttatttttatttttttgagatggagtctcacactgtcgccctggctggcgtgcagtggcgtgatctcggctcactgcaacctccgcctctcaggttcaagtgatttctcctgcctcagcctccctagtagctgggattacaggcatgagccaccgtgcccggctgcccagctaattcttgtattttttatatatgtatatatacatatagtgacggtgtctgtgtattttacccaggctggtcttgaactcctggcctcaagggatcctcctgcctcagcctcccaaagtgctaggattacaggtgtgggccaccatgcctgtcctaacttttcttttcctttcttttttttggagacggagcctcactctgtcacccaggatggagtacaatggtgcgatcttggctcgctgcaacctctgcctcctgggttcaagcgattctgcctcagcctcccgagtaactgggattacaggcatgtaccaccgtgcccggctaatttttttgtatttttagtagagacggggtttcgccatgttggccagactggtcttgaactcttgacctcaagttctccgcccacctccgcctccgaaagtgctgggattacaggcatgagccaccacacctggctgtgatggctcttttttaagagacagggtctcaccctgtgactcaggctggaatgcagtggtatgatcctagctcactgcacccttgaactcctgggcttaaggaatcctcccgcctcagcctcctgtgtagctgggaccataggtttgcgctaccacccatgttgtctgggctggtctggaattcctgccctcaagtgatccttctgcttcagcctccttaagtattgggattacaggcatgagccaccatgcttagcttgtgatggctcttagtgtacatacctgggacatataactgtgccttcttaaaagtagttatctcagaatgcttagcaagcctctctttgacttgactttaaaagctttgaacactagatcctaactttttgaagtaaacttttgattttgaaatggttgaaagtcatttgaagccaagtctttggaaataataattgatatgagttgtgtgtttggtcacagtgccaatttaaactgggttgatctgtcttacatggctgttatggcactgaaggatatgaagcatttgaaatgctgacattttggaatattcatttaaaaataggctggggccggacatggctcacacttgtaatcccagcacgttgggaggctgaggcgggtggatcacctgaggtcaggagtttgagaccaacctggccaacatgacgaaaccccatctctatgaaaatacaaaaattagccaggcatagtggtgcaggcctgtagtctccgctaattgggaggctgaggtgggagaatcgcttgaatctgggaggtggaagttgcagtgggctgagatcacaccactgcactctatccagcctaggagacacagcaagacttcacctcaaaaaatgaaaataaaaatagtctgggtactgtggctcttgcctataatcctagcatttttgaagtgaggcaggaaaatcacttgagctcaggagtttgagatcagcctgggcaacatagcaagtcctgatttctacaaaaaaatttgaagcattagctgggcatggtggcatgtggaggctgagatggaggatatcaccaagcccaagaggtcaaagatgcagtgagccataatcgtgctgttgcactcaaggttgtgcaacagagtgagaccctgtctcaaaaacatacaacagttggtattaagcaattacttacagatctgtgttgaggtagattaatatggcaccaatttgggtagactggaagccatttttctgttgactagaagatcagtttcttggaatagtgcaggcagaggtataataaaggtcttctgctttgtattttcaaccatgtaaatgatctgaattttaaaaaaaattttttaaaaagcttttagattgggaaagggcataagggaacagataagattacataacaagatttgggaaacaggatatgaagagacaaattatgattaatccataaaattgacaaggactaggtgtacagtttggacattgttcagagaaggatctgaatattaaattttctcttctaaacacaatgtgaataagtattttcacgtttactgcatttcattgcaattgcttcctgaatgcctatttgacatcacagctgtctttctaataatcttattaatgtgtgcctgcaaatttgacagttttaagatttgccttggttttagccctggttggattccctagatttggaaagggtacttgtttatgaggatataatgatgtgggacatatagtaatgaatataacaaataattcctaatatgggataaggtcccctttctcccagtgagagaactcatactggctgtttagtacccatactgactgcttgatgtttcatgatgtctgctttatgaatacagtaataatatattcaccttgatactggtgaaagatcacttgtaaggaatttttggaagttaaaatttaacttccagatttcactagcttaagtcctgagtgtgagggaaataaccatctatgctgtaagaagagcagacactgttactataatgatagtagcaaaaccagaaattgtttattactatcatagtagtagcagtttcattccaagctattactatcatagtagtagcagtttcattccaagcaacttttacccttataaagcacatggggggccgggcgtggtggctcaattcctgtaatcccagcactttgggaggccgaggcgggcagatcacgaggtcaggagatcgagaccatcctggctaacacggtgaaaccccgtctctactaaaaatacaaaaaattagccgggcgcagtggcgggtacctgtagtcccagctactcgggaggctgaggcaggagaatagcgtgaacccgggaggtggagcttgcagtgagccgagatcgcgccactgcagtctagcctgggggacagagcgagactctgtctcaaaaaaaaataataataaagtacatgagattagaataagagcaatagaaaagagaaaaataacaaaaacaacttgagttccgagtttctatttaggagtagtctggataattcttcttatcctggattgttgtagcttcagaaaagagttcattaaggggtctactgaaaaggtggtgacttctaactaccttaattcagaattacttgaaagcatgctgtatttctttttcttttctttccctttccctttttgattgagtttcactctcgttgcccaggctggagtccagtggcgcgatctcggctcactgctacctctacctcctgggttcaagcgatctcttgcctcagcctcctgagtagctgggattataggcttgcatcaccacgcttggctaattttgtatttttagtagagactgaggtttcaccatgttggtcaggctggtctcaaactcctgacctcaggtgatccacccacctcggcctcccaaagtgctgggattacaaccataagccaccgcacctggccggaaaacatgctatatttctctctgggtattgtcaaactgaaaaagggtggtagaaatttctgacaagcttctttgtaaaagaataggcacaagtatggcagactggttaagaaaaaggaaatcagaatagcaaaacatggtacaataacctgtaatcatccaaaaaatgggcaaatctgaattaggagggggaaagcagaattttaatttaccatgtcaccatccttgctgaattttacagaatttgatccaaaatggcttaataagggattggaaggcatgattagtgataaattgatttgggggttctcagttgtgggagtcagtttgtttggcattatgttgatttgttatctatctctggtggagccatttaatttagatgttaatttttaaaagatgttctaggttcagacgtggtggcacatgcaaatcccagcattttaggaggctgaggtgggcagatcccctgaggtcaggagttcgagaccagcctggccagtgtggtgaaacccggtctctactaaaaatacaaaaatgagccgggcatggtggcacgtgcctgtagtcccagctactccggaggcttaggcaggagaatctgttgaacctgggaggcggaggttgctgtgaaccgagattgtgctgttgcactctagtctgggcgacagagcgagactgtctccaaaaacaaacaatgttctattagctgagacaatagtattattcatttttaaatgcaaaaaataagcttctagttagctttagcccttttagcttcagtctttttccttgagggatttaataattaaatgctgtatctgttcagtttgactatatgaaattgctgtttttgtaggtcagaagaagttgagtgtgagcaatgccaaatgggtctgcctaatactgtttacagttacattattacttcctggctgacttatgaatagtatttgttcaaatcagtatctacttactgcaccaagccctgtgagaagcagtagtgataaatagatgagaggtgagagtttgtgtcattaagaaacttggtctaatagtgaaacatatggaaagaaatgtattactattgttggctgggcacagtggctcacacctgtaatcccagcactttgggaggccaaggctggcagatcacttgaggtcaggagttagagaccaccctggccaacatggtgaaactcccatctctcctaaaacaatatacaaaaattagccaggcatggtggcgcgtgcctgtagtcccagctactcaggagactaaggcaggagaatcgcttgaacctgggaggtggaggttgcagtgagccaagattgtgccaagtgtaattggaacccctaagatgggggcaaggtgagggaagggcagtcaggattccgaaaagaagtgggcattagtctgtttattgtgcctggagagtaagattactttaggtggaggaaataatagtgtttgaagattgccagccattcagtttgtttaaaggaagatgaatggtacaagtttaaagtcctttaagttagttatctaattaatctgttgatgtactagctattgtgtcaagtgctaggagacacaaattcaatttcacagtgctagtagcttttgctgtaggcagtgagaatccattgaaaagttttgagcaatgtggtcactttcagatatatatatatatatatatttgagacggagtcttactctgtcacctaggctggagtgcagtggcgcaatcttggctcactgcaacctccgcctcctgggttcaagcaattctcctgcctcagcctcctgagtagctgggattacaggcacgcaccaccactcccggctaatttttgtatttttagtagagacggggtttcaccatgttggtcaggctggcctcgaactcctgaccgcaagtgatccacccgccttggcctcccaaagtgctgggattacaggtgtgagccactgcacccggctgtcagatttacatttttaaaggaaaagaatggttagccaggttgtagaagacagaaaatgaggcctgagtaatggcaaaggaggccagttaaaaggcaactgcataaatgttgaaaagatactactgcttgagccagggcaatgacattgggctggagaaaaagagatgactagaaagttgcaagtgtcttacctttggttaagatttaccagagttgaacattgcctctgtaaattccttagtttgaatttccttgactctacccactcttatatcctatacctttactataaccttcctggggtcattctctgtttctcaaatgttgttccttgagttcccttttcatgttacatcaatttccctggataatcttgtccagttctgttactttatatactaggcttaagacttcttcagaggccaggtatggtggctcatgcctgtaatcccagcactttgggaggccgaggcaggtggatcacctgaggtcaggagttcgagaccagcctggccagcatggtgaaaccctgtatgtacaaaaaaaatacaaaaaattagccgggtatgatggcatatgcctataatcccagctgcttggggggggctgaggcaggagaattgcctgaagccaggaggtggaggttgcagtgagccgagatcgagcattccagcctgggtaatgagagtgaaactccttctcaaaaaaacaaaaaaaaaactgagttcagaccgtatatattccatatcattgctgcaattctatgtatattaaattgaattcattctcttccaaaacctgctttttctttcttgctcttagtgaattagcattaacccaattttttgtcattagatgatatggaccatttctctaagatctccatttttttcttttctatctcgcatactgtcttcatctcttcttaacatttattggactctctgtatattattgtcacttcatctgttctgttcattacctggaagaatcatcactatttagtacaataaccttagatttcttcagtggcttcccttcacctatataatgaaataacaaactttacttcatatgtagctttttactctgtcccctgaataatgttctttctctaaatctctcattcttagtgactttgtgaaccgtagcatctttgttgcaaccactcaatacttggttctgcattatagctcaaaagcagtcatagatggtacatatacagtggatgtggctgtgttcaattaaaactttttttgttgttttttaagacacggttgtctcactttattgcccaggctggagtgcagtggcatgattatagctcattgcctccttgaattcttggactcgagcaatcctcttgcttcagcctcctgagtagctgagactacaggcatgtgctgttagcacacccagctagtttttaaatgttttgtagacatagggtctcaccatcttgctaaggctggtctcaagtgatcctcccacctctgcctcccagagtgctgcaattacaggtgtgaaccaccacaggccctcattaaaactttatttgcaaaaacagatggtggatagtaattgtttgttcacccctgctcaaacacaccttgttaaagcacacacataccaccgacctttgttcattgctgatgctcttactgataacccaccctcccagtgaagttgcttactagagtaagctcacagagggcagactctttggttttgcatctataccctgagctggtgagtagtatttttttttcataccctgagctggtgagtagtatttttttttcaatcaacttggaattaagaacttgtggaaaactggacatttcgctataggaagcattgtgatagggaggtattatgtagaaagtctgctctaggaaattgaacattaacttttcatttgagtggcatagctaaatataagttttgatgtaaagaaatttcagattgggtggtggtagtggtttaaaatacagaattttaacaaaattgcctacttggtatatcttaagagcaaaaacttttacttaggttctattaggtctaattgcctacttgggtatatcttaagagcaaaaacttttacttacgttctattaggtctggccctgtgagcatttctcaataaatatttgcataattagatgctgtgatcactcttcaaaaagaactggcaagttagattttgtgctgtgtgtctgtgtgtgtgtgtgtgtgtgtgtgtgtgtagaagagagcagtgttaaaagatcaaggctgggcgtgatggctcacgcctgtagtcccagcactttgggaggccaaggtgggtggatcacctgaggtcaggagtttgagactagcctggccaacatggcggaacctgtctctactaaaaatacaaaaattggctgggcgcggtggctcacgcctgtaatcccagcactttgggaggccgaggcgggtggatcacgaggtcaggagttccaagaccagcctggccagtatggtgaaaccccatctctactaaaactacaaaaattagctggtatggtgacgtgcacctgtagttccagctacttgggaggctgaggcagaagaatcgcttgaacccaggaggcagaggttgcagtgagccgagatctcaccattgcactccagcctgggtgacagtgagactctgtctcctatatatatatatgtgtgtgtgtgtatatatatatatatatattagctgggcctggtggcgtgtgcctgtaatcccagctatttgggaggctgaggcaggatagcttgaacccaggtggtggaggttgcagtgagctgagatcgcaccactgctgctcttcagcctgggcgacagcaagactctctcaaaaaaaagaaaagaaaagaaaaaaaaaaaagaatcagttactgaggttgaccatcccaaatctgagaatctaagatccaaaatgcttcaagatccaaaatttttcagtactgacatgatgttcaaaaaggaaatgctccttttccaataatataatggaaacattccaaaatctaaaacacttctggtcccaaacatttcagataaggatactcaacttgtatgtgtatgatgattttgtataattcaaattgccttccttagccttctttatactattcacttgttttgcttctcagggatagtcaaaacattaaatcacacaaacgaggggccaggtgcagcggctcacgcctgtaatcccagcacttcgggaggccagggcgggcagatcacaaggtcaggagatcgagaccatcctggctaacacggtgaaaccccgtctctactaaaaatacaagaaattagccgggcttggtggcatgcgcctgtagtctcagctattcgggaggctgaggcgggagaatggcgtgaaccctggaggcagagcttgcagtgagccgagatagcgccactgcactccagcctgggtgacagagcaagactcttgtctcaaaaaaaaaaaaaaaaagaacacatttcatatttaaaatctgaattgagatttttgtaacctttttttgaggacagaaggtaatgtcagccctttcctatgtgttctatcgataatgtcatttgtttctttcttttcttctcttctcttctcccctcccctcccctcccctcccctcccctctcttttcgacagtctcactctgttgcccaagctggagtgcagtggcgtgatctgggctcactgcaatctctgcctcccgggttcaagtgattctcctgtctcagcctcctgagtagctaggactaccggtgcccgcccccacacttggctaacttttttgtgtttttagtagagatgggatttcaccatgttggtcaggctggtcttgaactcctgacctcaggtaatccacctgccttggcctcacaaagtgctgggattacaggtgagagccaccgcgcccggccatgtcatttcttgttagtcttgttaaggttaagcatagcatcatgcaaatgctgtttgattcattttccctttctgatcctaaccttgtttgagtttcagggaaacttttaaattttgatcaagtaaatgaagttgctagtagtcaaagaagtaattaatattaagtaacaggaagggaaattgcattcacttcttagttcagcatttctgataatgctgatttctttctttacttttctttttttttttttgagacggagtcttgctctttcgcccaggctggggtgcagtggcacgatctcggctcactgcaacctccgtctacggggttcaagtgattctcctgccttagcctgctcagtagctgggattacaggcgtgcaccaccatgcgttactaatttttgtatttttagtagagacggggtttcaccatgttggccaggctggtatcgaactccttacctcgtgatccacctgcctcggcctcccaaagtgctgagattacagatgtgagcccctccgcaccaggaatatgctgatttatttctttgctagaagcttggcttgcttcatagctagttttataggtacatcatacatccctatttccccctcagaagtcatgatcaaactcactactctagagctcacatttaagggtaataacattttatcataaatcatttttaaatgtatagtatttgagtaaaaccttaagctgcagtaaagaagtatcttcaacttgggtgtttgcaaatagttgttttgccttctttattctaaaatatgtatgtttgctttgtttttaaagtagtgttgttactgtgactctgaagtgtattctcaaaaaaaggggaaagtgcagggataggttgagtttccagtggggaagaaaaaaggaaatgttacttataggtggttaacatgaaaagttggattaactttttcttttctttcttttttcttatttattttttaataatagacacagggtctccctatgtttcccaggctggtccctcaagtgatcctcctgctttggcctcccaaagtactgggattacaggcgtgagccactatacctggccaattttttttttcagcgtatgactaaatatagatttatctttgcagtagacaaaatgaatatcaagttattactatatacataattcttcaggaatttatttgctacaaaatatgaaatttctgtgctttaaaataaaaaatattggttgtattggatcaatttttttttttgcagtaggtcaaccaagagaaggcttgtatttggacttttaaaaaataggccattctgaaatccagaaattcgtaagataataaagaacatttaactgttcctcgttgtttgaaactaatggaataagaaattatattggagtgataagtgtgatttctgtgactagaatttccgatcgtcatctttttttttttttttttctccaggttagattgattatagttctcccctttttagacctctcaggagaaagggaattttcctgcctttctttggataggtgtctgcgcagagatttgatggacataccatacaactaagcttggacaattggcacctttaaactcccagatttggtttaatcactgtaatatcttgaatgggattttatctggataattatcttattcatcctgaattattaattgatcccagtatatggatctgacaaattttcaaaaagctgagagtactgtaaaaaatattttttaaaagtgccaggcttggccaggcgcggtggctcacacctgtaatcccagcactttgggaggccgagccgggtggatcacaagatcagaagttcgagaccaccctggctaacacggtgaaaccccgtctctactaaaaatacaaaaaattagccaggcgtggtggcaggcacctgtagtcccagttactcgggaagctgaggcaagagaatggcgtgaacccgggaggcggagcttgcagtgagctgagatcgcgccactgtactccagcctgggcgactcaaaaaaaaaagtgccagacttggtggctgaggtggaaggattgcttgagcccaatagaccagcctgagcaacatagcaagaccccatctctacaaatggcatgtgtctgtggtcccagctacctgggaggctgaggcaggattgcttgaacccaggagattgaggctgcagtgagccatgattatgccactgtactccagcctgtgctatagagcaagaccttgtccccctgtgcaaaaaaaaaaaaaaatttggtttttacagttttaatttttgctaggggagtagggagagagataggaatgtgattctaccattccctgcccctatttatacacatacaatcagaaaataataattttagatctgtatcttattttgtcctacggagggattatgttgtgccttaactgtaacccaagtctagatgtatcccatcttaatgagtttcagtttttccttttctttaattgattgctgttaaattggaatgtagttacacataatagttaagcagggttaaaataatctttttgtcctttcaaaatgatagttttattaccacagaagactacttatccttaatgtttgttatagttcatttttgttactaagtagtttgtgttaatctccagatagaatatttcctttcaaggtccaattctttggttcttgtgtaatagtcaattactgttgactatatatagccccctgaagctttcatgtatcacaggtagagtttttaactgcattctctgtgtatgtcgctataatttgtacatgtacataattttcttattttaagatgccaaactaagcacattgtagacattttggatgaaattagaacaaatgattgtgtgccattaataatagatgtggattggcattctgaccttaaaggataaaataagaggtgtggttagggctgggtgtggtggctgatgcttgtaatcccagcactttggggggctgaggtgggcggatcacttgaggttgggagttcaagaccagcctcacaaacaaggagaaaccccctctctactaaaaaaaaatatatatatacaaaattatctgagcatggtggcgcatgcctgtaatcccagctactcgggaggctgaggcaggagaatcgcttgaacccgggagggggatgttgcggtgagccgagatcgtgccattgcgctccagcctgggcaacaagagtgaaactccatgctgggggtaaaaataaataaataaataaaaataaaaaagaggtgtggtttagaggttagaactacttgcctgaatggttaaactaattaaacatcaattttaattagtcaaatttgatgaatgctttgttcaaaaaatttgggcacctcattgaggagtcagtggattaccaagaaatacttggtgttttttaaataatgatgagctgttatgagaagtattattttatctgtagcatgtgtcttgcatgtccttgcaatttgtgaagacaaaattattctggcaatttgatttcaggtaataatctacatgacacttaagaattataagagccagccgggctggcacagtggctcgcgcctgtgatcccagcattttaggaggccgaggtgggcggatcacctgaggtcaggagttcaagaccatcctggccaacatggtgaaaccccatctctactaaaaatacaaaaattagctgggcgtggtggcgggcacctgtaatcccagctactcgggaggttgagacaggagaagcgctggaacccgagaggcggaggttgcagtgagccgagatcaggccactgcactccagcctgggtaacagagcgaaactcagtctcaaaaaaacaaaagagttacaggatccaggctcacgcctgaggcaggaggaccagcctgggcaacagactccatctctaccaaagaaaaaaagaaaaattagctgggtgtgatggcatgcggctatagttgagaggctgaggtgggaggataacttgagcctgggagtttgaggctgcagtaacagagcaagaccctgtctcttaaaaaaaagaaaactataggaaaatatgaatgctttatctgaacttcatagaattttgccattttcaaccctacctccagtctggcagtaatcagtctaggatttttagatttaaaatgaaaagcatcgcttcagactttgctcaccaaaacttagtatgtaattctctttttttctttgcagaaatggaatctatttggaatttgcagaagcaaggtaagaatgattagattacttaaaatgtcactaataagtaaccactggacattatttttgggtgggattaacagatgggtggtaatttaccaaatagactttgtattttgagttatttaataactgcaatcaaaaggcactagcagctgggcagggtggctcatgcctctaatcccaacactgtgggaggccaaggcgggaggattgctgaagtccaggagttcaagaccagcctgggcagcatagccagaccccgtctctattttttaaattaaaaaaaaaaaaaaaatgtagggccgggcacggtggctcacgcctgtaatcctagcactttgggaggctgaggcgggtggatcacccgaggtcaggagttcaagaccagcctggccaacatggtgagaccctgtctctactaaaaatacaaaaattagctgggcgtggtggcaggcgcctgtaattccagctacttgggaggctgaggcaagagaatagcttgaacccaggaggcagaggttatggtgagccgagattgtgccattgcactccagcctgggcaacaagagcgaaacgccatctccaaaaaaaaagatagtattaagagtgaatacgaaaaaagaaaacagcaacaaaaagacactaccataccaggactggcgaggatggggcaatactgtaagtgaaaaaaacagatgaaagtattatttacctactagatgaagatatgaatgatttttttcccctcctggttatgaaagtaagacaagccataaatgttattaatgtaggaaaccaacaagaataagtatttccacttttggctggtctttctctgtatttgtgtggtagacaacaaacagcctaagaattgaaattcatagttcagaaaaatattagctgttataggagcctgaattgtatcctattcattttgaattgaatagtatacaattcctgaattgtatcctattcctcatttactttgctaattaatgtaagtgaatttcagatggatgtgaaattcctagaatttcaggacttgaaatgtgtagaaatttctcttattttacatattaggaaagtgaggcccagtgaggttcctgtaaactagaaagtggcaggactagaatgtagcttcccctgatttcccaatgttgctctttcttccggagttactttctgtgtatcttaccaaacaaatgaaaaaaacatagactagaaaatacaccctgcaggctgggcacggtggctcacgcctggaatcccagcactttgggaggcggaggcaggtggatcacctgaggttcaggagttcaagaccagcctggccaacatggtgaaaccccatttctattaaaacagttagccaggcgtggtggcacatgcctgtaaatcccagctactagggaggctgagccaggagaatcgcttgaacacaagagatggaggttgcagtgagctgagatcacgccattgctctccagcctgggcaacaagaacgaaacttcgtctgaaaaaaaggaaaagaaaatataccctgcaaagtagacctacctgtttttactgtaaaatggccgttaactcttaggaatgagcatgttcttcatggcagatttccaatgggtggccctaggagtcccagaaaggatattattatattatctctggactaaactagattgattcttagctgaagtggacttgagtttttctgatactattttcaggcctttaaaattttccattgggtgaccagttgtattgacttgccttttttttttttttttttaagcatgtatacttgaaaaagttcttagggaaggtagaaattatatatgtgtgtgtatatatataatataatatatataataaaataatatataataaaaacagttccctggccgggcgcggtggctcacgcctgtaatcccagcactttgggaggccgaggcgggcggatcacgaggtcaggagatcgagaccatcctggctaacacggtgaaaccccgtgtctactaaaaatacaaaaaattagccgggcgtggtagcgggcgcctgtagtcccagctactcgggaggctgaggcaggagaatggcgtgaacccgggaggcggagcttgcagtgagccgagatcgcgccactgcactccagcctgggcgacagagcgagactccgtctcaaaaaaaaaaaaaaataaaataaaataaaaaaataaaaataaaaacagttcccctccagaagaggggagcatgcagcttaaatagtaagaatttagaataaccctggagtcttcttccagacacattctaacagttttatgttttgaatctgaaagatccatagtcttttgttagtgctgagaataaaggctggtgttactgtgggaagttgagtcagtcttgattaggactgaattggcagttttgctaattaatttaacgtcaagtttttggtggcaggttttacttagatagttcccacactggttaaaataaattttgacttcatttgctgggaacagcaaaagaaaaatccaagtgtttcttttaatattggattattggtgacaagcttttttctttggctgctgtattcaaatacactgcttttgtaatcagtagaagtacataaaacccttaagtgaactcaaccatctctgatctgcaggagttgaggccctcactggctagaggaccctgtacttggaattcattggaattccaaatagctacttccaggttgagaaactggatcatacatgtgttggtacaaggaggaaatgggcttgaagttttgttttcataaaaaaattggtcagtttaaatgatggttatttgggattgttattggaatacgggcattttgagattctagaccttatttttatttatttttttaacctttctagatcccaaaaggataatcacttacaatgaagccatggatagtccagatcaatgaaggaccagactgcctattcgtaacctttctgcagcattagagccatcgttcatgggggacacaaggcttttatgctcctagatcttcaacgcagcagaggaaccataagtagaatcacaggataatatatacaaatatatatatatacatatatatatatatagttatttaaaaaaggcaactgaaagtaattagacttcttaaggaatcaaatttatttcaagagactacacatggttatttaatctccggtactgaataggttttttttcttctgttagtttttgtttttaagtgtgaatgcaagtgattaatgaatacagacttaacaagtgtggttctaaagttcctgctgtcatcaacttgggcaacaaatgacccactggaaaggcaaatccacttaaaagatctctgtatcttgttctgtgactgaagtgatacactaatcacggggaacccagaatgattcaacattttccccccactcctcccttgatctttttggttttactttaattaagccctgcgagaatgctggataaatgccttgaagttagcagggtgtatttttttagcgaatatgatttgcatgtcttgccaggagttaagcggcctctggggtgttggggaaatactttatttctttccatttattttttgtggggcggggataggggagggcattgaagttctacaattctggaatagttagttgatggtacatagttaacttggcttcggttacatattggactttaacaactgaagaatctatgcgtgtcatttaaagaaaagttgcagaacaagcaattggcttagatatacaatctggaaaaatattcctgtgcccatattttaatgtaattgtataactgggagcaaaaatatattctgcttttcaactgtaggtgctccagacttgctctccgtcactaacactaaatgtgctgttttccttgtttttcatcaaacatttaagacaaacttagacctttctgtaaattatcttttaatttctcagcaaaatctaaaaggggaagaaaaaagtccatgaaaactaaaacttttcatgtttttagccagtgagaagataataaaccctgactgtagaaggtgtgttttcatgcaaactatacttctgagcttgttagcttctaattatatcttaataaatatattttattactagagcaagatgggtttttaaggaaaataatgtgaaattctggaaattttctttggggcagagaagagcattagccctgtcttatcattacattgccatcctgttgcactgcagcttgtgtatagcatgctaaaataaatttttgtgtgtgtgtgcagaaattaagggtccaattgagattgggtgatgttagtaacataataacaagttgtctggcctgacacagcatcacatcacacacacagaaattagtatatccatgtatgtcaaatacaggttaaaatatcagggcatttatataaagagttgtagtcttctgataaaagtagactggatcccctggggtatttggggagaaagtaactactttggctctacccctagaaatgtccagttttgagtgactgtagtatggatgggttttcttgttttgttgattatttgaggcttttaaaacaagtagttcatgaaagaagctgttggactcaacatagagtagagtaactatctttttagtctggatttctgccctgcttagattttaaaagtataagcatggattgccaattccacttgatgtaaacaaaacttttttttatacataatatatatatatatatataaaataacttattgtatcagtccaggttcagaaacttgtggtaggccagttccagatagtttcatttcacctgtaaactgtatcactttgactgatattgtaattttcaaatgtataatatgtttacagatgtgccctgcatttagtctgccttgttcctattttgatttttgttgagtctcctgcctgcttgccaaaagctaggatgcttcaggcccatgtacaattgaaagcagaggcatccttgagctttaaagcattgaacaaactggaaaatgcaacataccacataactgaagtgaaaaaagtctgtgtttttgtgtttttttaaataaaaattttcaaaaagttaaaaaaaaagacatataaggttgattaaagggaaaaaaggctccagtttgttttacaggttttaaagttctgctgtgtgttcaattgccttgtgtaaccacttgtcgccttagggccagattcccctctctagtccccttttttaaatgtccattttgcttgcctggaattttaaagttcttccgtctcacaactcacaagaaactttctgggtttgtgacatacagaggttgaattgagtatatatttgaaaaggaaaaaacaaaaaacaaacccagaccccacctgaattgggctttttaacttagaagcaacacttgattaaacatctttagaaagctattgcttttctaatttccttccatatccctcaggcctcagtgttcagagaagccaaaaagaatgtatcacttctctgtctgtccaaaggtttttgagagtctcacttctaaatgaaacaatgcaacatttcactttgatttctccactgaaatttccttgattatatggttagaggtatgtagttaggaatgtctgttaactttctgagaaccctagtgccccatcatattaactgtcagtattttgggggcattaggttaatagacttaattgcctaggtacaagcaggactttgggacaaatctctttgtgctgtttggtaacacttaactctatttgttgcaatctttctccttaggtcctcacacaattccttacagagcacttattaaaaaaaaatcttaagagttgatctgttttctgattattttgtgtaagcttctaaacaaacttcagctgtgattaatttagcacatttaaataacgtgttattgtttggtataaagaattttccttcaactcagagtattagtactgtagcataaaccaaatacagtctagaggggatttttaacatccctccattataaagactgaaaaaggggtgtgtgtgtgtgtgtgtgtttatgtatgtatgtatgtgtgtg

SEQ ID NO: 946 - DNA, 134 bp, Homo sapiens
cgggcagatcacctaaggtcgggagttcgagaccagcctgaccaacatggagaaaccccgtctctactaaaaatacaaaattagccaggtgtggtggtgcatgcctgtaatcccagctactcgggaggctgagg

SEQ ID NO: 947 - DNA, 134 bp, Homo sapiens; identical to SEQ ID NO: 946

SEQ ID NO: 948 - DNA, 3201 bp, Homo sapiens
agatcccaaaaggataatcacttacaatgaagccatggatagtccagatcaatgaaggaccagactgcctattcgtaacctttctgcagcattagagccatcgttcatgggggacacaaggcttttatgctcctagatcttcaacgcagcagaggaaccataagtagaatcacaggataatatatacaaatatatatatatacatatatatatatatagttatttaaaaaaggcaactgaaagtaattagacttcttaaggaatcaaatttatttcaagagactacacatggttatttaatctccggtactgaataggttttttttcttctgttagtttttgtttttaagtgtgaatgcaagtgattaatgaatacagacttaacaagtgtggttctaaagttcctgctgtcatcaacttgggcaacaaatgacccactggaaaggcaaatccacttaaaagatctctgtatcttgttctgtgactgaagtgatacactaatcacggggaacccagaatgattcaacattttccccccactcctcccttgatctttttggttttactttaattaagccctgcgagaatgctggataaatgccttgaagttagcagggtgtatttttttagcgaatatgatttgcatgtcttgccaggagttaagcggcctctggggtgttggggaaatactttatttctttccatttattttttgtggggcggggataggggagggcattgaagttctacaattctggaatagttagttgatggtacatagttaacttggcttcggttacatattggactttaacaactgaagaatctatgcgtgtcatttaaagaaaagttgcagaacaagcaattggcttagatatacaatctggaaaaatattcctgtgcccatattttaatgtaattgtataactgggagcaaaaatatattctgcttttcaactgtaggtgctccagacttgctctccgtcactaacactaaatgtgctgttttccttgtttttcatcaaacatttaagacaaacttagacctttctgtaaattatcttttaatttctcagcaaaatctaaaaggggaagaaaaaagtccatgaaaactaaaacttttcatgtttttagccagtgagaagataataaaccctgactgtagaaggtgtgttttcatgcaaactatacttctgagcttgttagcttctaattatatcttaataaatatattttattactagagcaagatgggtttttaaggaaaataatgtgaaattctggaaattttctttggggcagagaagagcattagccctgtcttatcattacattgccatcctgttgcactgcagcttgtgtatagcatgctaaaataaatttttgtgtgtgtgtgcagaaattaagggtccaattgagattgggtgatgttagtaacataataacaagttgtctggcctgacacagcatcacatcacacacacagaaattagtatatccatgtatgtcaaatacaggttaaaatatcagggcatttatataaagagttgtagtcttctgataaaagtagactggatcccctggggtatttggggagaaagtaactactttggctctacccctagaaatgtccagttttgagtgactgtagtatggatgggttttcttgttttgttgattatttgaggcttttaaaacaagtagttcatgaaagaagctgttggactcaacatagagtagagtaactatctttttagtctggatttctgccctgcttagattttaaaagtataagcatggattgccaattccacttgatgtaaacaaaacttttttttatacataatatatatatatatatataaaataacttattgtatcagtccaggttcagaaacttgtggtaggccagttccagatagtttcatttcacctgtaaactgtatcactttgactgatattgtaattttcaaatgtataatatgtttacagatgtgccctgcatttagtctgccttgttcctattttgatttttgttgagtctcctgcctgcttgccaaaagctaggatgcttcaggcccatgtacaattgaaagcagaggcatccttgagctttaaagcattgaacaaactggaaaatgcaacataccacataactgaagtgaaaaaagtctgtgtttttgtgtttttttaaataaaaattttcaaaaagttaaaaaaaaagacatataaggttgattaaagggaaaaaaggctccagtttgttttacaggttttaaagttctgctgtgtgttcaattgccttgtgtaaccacttgtcgccttagggccagattcccctctctagtccccttttttaaatgtccattttgcttgcctggaattttaaagttcttccgtctcacaactcacaagaaactttctgggtttgtgacatacagaggttgaattgagtatatatttgaaaaggaaaaaacaaaaaacaaacccagaccccacctgaattgggctttttaacttagaagcaacacttgattaaacatctttagaaagctattgcttttctaatttccttccatatccctcaggcctcagtgttcagagaagccaaaaagaatgtatcacttctgtctgtccaaaggtttttgagagtctcacttctaaatgaaacaatgcaacatttcactttgatttctccactgaaatttccttgattatatggttagaggtatgtagttaggaatgtctgttaactttctgagaaccctagtgccccatcatattaactgtcagtattttggggtcattaggttaatagacttaattgcctaggtacaagcaggactttgggacaaatctctttgtgctgtttggtaacacttaactctatttgttgcaatctttctccttaggtcctcacacaattccttacagagcacttattaaaaaaaaatcttaagagttgatctgttttctgattattttgtgtaagcttctaaacaaacttcagctgtgattaatttagcacatttaaataacgtgttattgtttggtataaagaattttccttcaactcagagtattagtactgtagcataaaccaaatacagtctagaggggatttttaacatccctccattataaagactgaaaaaggggtgtgtgtgtgtgtgtgtgtttatgtatgtatgtatgtgtgtg

SEQ ID NO: 949 - DNA, 10598 bp, Homo sapiens
cttggagagagcagacgccttctggattcaagaagacgaggtgagctgaggtacctggctttagtgaagaccctgtgggggcttcctggctgcggcttcgacgtgcctgactccacacgcccctaaggtttgaagaaaacctgctggaggtttgggacctaaccgcatcaaagtcgcctttagcggtgcctggacccagttcgcacgggaggaagtaggaggcagaatcccctttgggccacagaaagtaacgatctggactcggttcgggccgtgaaagggagggatgcagacctagttgggaccgcagaaaggaaggatcgagaaatccttcagacggtagcaagaggggaggaggatacacacagttcgggagggagataggagacggcaggactccgtttaggctggagaaagggggcagtaccccgtttgggccacagaatggagggatcgggacccagagataagagtgggcagcatcccttttgagcaacggaaaggaccagactcagacaggagaaaggaggggatatgacccggttggttccggtttgaaagggaagagacaggacctggtagggtttgagaacaggaatacacagaaggttcatacagttggatttgggggtgaggtattcatgttgcagaaagggcggagctgcacacttgcagacgtggaaagaggggggagtggtgttggttggggaaggggtggtgcagagacgtaccgcagagcggagggagggggcttattaaaggaagggaagatgaagagaaatgctgcagagcggagggaggggggtgtattgggaaggggcggtgcgtggcagtaccgcagaggagagatgggcggtgttggggtaggggcggtgcggagtggtactgcagagcggagggagggggctagtgttgggggaagggttggatcgagatgtgatgcagttagaaagagtgggtcggggtggcgccaagatgttctgttgctctgagagcagggggcagatgtgggattgagctggttagaaactgtccggtttaccaaggcgcatgcgcgcggagggcattgaagaatggttcttttgggatagaggtgggcctaagatggggggtgggggcgcctctagtcggtgcgcatgcgcactatcgagttgcggagggggcgtgtaaaggggtggggtcgtagaactgactctctcggaggcaaaaggagctgggccttggaaaccagatggcctgggttttttaggtatgaaaacccaggagttgaagggattagggcccaaggttacatgagactcccctaagtcaggataggtgagatgtctgatgaatctccccctccctctcattctctaactcaggcccattcccctcaggctcacctgttactcggcctcccagaaagatggataggagaaatgactacggatatagggtgcctctatttcaggtgaggcctctctgcattctctctaggccatctgccccatcctgagttcacttactgctcttcagaccccttccaccgtgtagtttcataattccctgcctaactcgtctcagtcctcccttacatggtgaaggagaggagaggaaaacctgcctgactctattccttccttgctccctaccccattttaattaaccactgctcagaggaagggaaggcctttgtggaaagggatgggctttagcgaggccaaatggcccagaggatggtaatcctaagtgtgtagggccctctgcctcccccggggagcctggggcttcccttccctccagatatacagactgagaccacagaagaggacagtgtcctgctgatgcataccctgttggcggcaaccaaggactccctggccatggacccaccagttgtcaaccggcctaagaaaagcaagaccaagaaggcccctataaagactattactaaggctgcacctgctgcccctccagtcccagctgccaatgagattgccaccaacaagcccaaaataacttggcaggctttaaacctgccagtcattacccagatcagccaggctttacctaccactgaggtaaccaatactcaggcttcttcagtcactgctcagcctaagaaagccaacaagatgaagagagttactgccaaggcagcccaaggctcccaatccccaactggccatgagggtggcactatacagctgaagtcacccttgcaggtcctaaagctaccagtcatctcacagaatattcacgctccaattgccaatgagtcagccagttcccaagccttgataacctctatcaagcctaagaaagcttccaaggctaagaaggctgcaaataaggccatagctagtgccaccgaggtctcgctggctgcaactgccacccatacagctaccacccaaggccaaattaccaatgagacagccagtatccacaccacagcagcctccatccgaaccaagaaagcctccaaagccaggaagacaattgctaaggtcataaatactgacactgagcatatagaggctctaaatgtcactgacgcagctaccaggcagattgaggcctcagtagtggctatcaggcccaaaaaatccaagggcaagaaggctgccagcaggggcccaaattctgtctctgagatctctgaggccccacttgccactcagatagtcacaaaccaagccctggcagccaccctgcgggtcaagagagggtctagggctcggaaggctgccactaaggctcgggcaactgaaagccagactccaaatgctgaccaaggggcccaggccaagatagcctctgctcagaccaacgtaagtgcccttgagactcaggttgctgctgctgtccaggccctggcagatgactatctggctcagttgagcctggagcccacaaccaggacccggggcaaaagaaaccgaaaggtgagatctctgacattgccatccttaactttgtgcttcttttccatttctacccttctagtttgttcatttcttctataaaagttttactttgagctagtccctgtgttcagataggctgtggaagatgctgagaagaaggtgatatagtttctgctccctagcagttcacagattggtgaggaaataagacatccatacactcagctacaacctgtatgtaatactacttgtatttaaatagtagttaccacgtgccaggctttgtgttgggtacagttacacagggtatgtctgaatgtcttgaaagtaactcttaccaacaagggatcataggtcccagttttacacttaagaaaactgagtctcagagaaatgaagtgacttgtccaagaggtaccagccagcataattggtggtagccagaggaagagaaagacccttaggctcttatcttgagttgttcctggcctggcagaggaacgaaactccttcctggaagacagtgaaagataagctcaggactcagggtggccaatggcaaggtcaggatcaggctccactacagcaaggctgagggagggggttagagggactttctgtctggagcaggcaaggtgaggagacagagccatctctttcacctggtgactctggaccttccttctttctgatgatgaagtccaagcatctgaatggggatgagagaagtggcagtaattacaggcggatcccatggggccggaggcctgcaccaccgcgagatgtggccattttacaagaaagggtaagaatccaatgctgtccagtctcttctcttcttcacttgccctcttctctgcctccttccaagttttctgcaagcatgttaagatctctccatctattcctctcctcccaggctaataagttggtgaaatacctgttggttaaggaccagacaaagatccccatcaaacgctcaggtagtgtcctaccaaccctcctccttgagctctcctctccactcccctctcctcccatagtctgggagtaacactttatggcctctttgttctgtcatatctccacacctgccctccttgcactctgccatggctggcatctcccattaactcacttcaggtctctgattgcactgacccaacaggactggcaaaagggctgcagctctgtggcccctgctaagctcagctactctcacctctccttttctacagacatgctgagggatgtcatccaagaatatgatgaatatttcccagaaatcattgaacgagcaagctacactctggagaaggtgaaggggcagtgctggcggatgggcgcaatggggaagctttgaatcgagcaaagacatacatgtcccttttggagagaatcacagaaacatgctaatccagccccattactgtgtgaatgggcagacagtggcctagggagaggtgtagatttgccatgggtcacacagcatgtcagtgatgaaaacatggctaggacagaagccactcaaattagtctcagcttctattcatagttggacatattctgcatgtatttcagatctcacctctcccttgtatccccattttctgtctccctagattcctgctcatcacaaagatgatgttgatgacaatagtacatttgctgtgtgtttactgggtgccaggcacttggctatgtgctttatgtgcattatctcactgacttcttacacatgcagaccccctaagtacactgggagttttaggatgcccggaaagttcactgatacctaagctgaattttgtgatctcacaggctattcttttacttggcagatgtttcgagtcaatctgaaagaaattgataagcaaagtagcttgtatattctcatcagcactcaggaatcctctgcaggcatactgggaacgtaagctgggaaagggctggagtgggaaggaagcttctgcttttatctgtgctgctaccccttctttgtcctacttcccccatcctcttagagagtcaggaaaaacagggtctcaaaagccctgtctcagcacctgcacatagttggagccctgctcacagtagtggcacctgattatgattgactgaagggtataggagcctagggtgggacattcctgctgtcaggtttgctgtctctgtagaagcttcccaggaaagcaggcctgtcattgcttgcctcttccgatggagtgcctggcctggctttgacagagtggttctcaaggagggcttcctggtgtggctggatcagtatgcatgaagcgcaagagtgtcagtggggctgaaggttctgggagagaaagaagggactcacattgactgagtgcttgtgttgtaccaggttgacagccattcttccatcttcttggcaacctgaggaagggagaatatgattttcccattttactgaataatagaccaaggcttgcaaggtctaagtgccttgcccagggtggcatagagctggaagcagagactgggcagaattctgtatctgaggaatctgggagaggttagcctggtgagctggctggtgtatcttttgcggatggctgctgaaacataaaccttctttctgtcctgttgaaacataaaccttctttctgtcctgttattcccttaggaccaaggacacacccaagctgggtctcctcatggtgattctgagtgtcatttttatgaatggcaacaaggccagtgagggtgagtggctgggcatgcagctgaatgggcggccatggtctggattccatgtgttcaatttctgtccctgtctcctcttgcctcccctcacagctgtcatctgggaggtgctgcgcaagttggggctgcgccctgggtatgactgggctctctcagcgcttgctgtccgtgttgtcctttggcaagagaggatggtcctaggattgcatcagtctggtggtctggtggagcgggtggggtgctggactgggtagagggcccagggttctgacctgggtggatgacgggcaaatggtcctgaactctctgctgtctctctccttaatgtcctctgtctgttctaagctgagatgttagatagaccttcagggatccctgacaaagaggcatctggtcttaactgcttgcttctagtggccatgtgctcattactttcttcacttcattgagactgccccatgtgctagagaggtctcttccatgttgggaaatgcctctgccctcatctgggcagttctgatctgtgttcatgggttatttttcccattgtcagggtgaggcattcactctttggggaagtgaggaagctcatcacagacgagtttgtgaagcagaagtaagtggtgtttggggctttgtctggccctgaagtgttctgggtatactgatctggttcagaaagtgcttagtcagtgcctttcttatactagctttagagggatgggcatcctgtgtcctagaactgatactgtctaaaattcccatgggcagacctttccaggactgggccagactcaacacaaggcccttgcagtggggtgcgctcagagcagagggccttaagaatggctcctctgtttacaacacacccaacaggaatctgggcttactcctcacaggtggcatgatactttggccttcctgtgacatcatgccctatacatgtctcccctggagaagcccaagggactgctttgcacagggccagtgggaaatggctcagtattggaggccaagaccataaactgtgtttggtagtgagtctggggctggagggtcttagaaatccctctccaggggctgtttgtatttgtttggaggaggttgccacctggtgtctagtgcttagacagcagggttgcttggttagaaacaagtttcatttcctttttccaaggtacctggagtacaagagggtccctaacagcagaccacctgaatatgagttcttctggggcttgcgctcctaccacgagactagcaagatgaaagtcctcaagtttgcatgcagggtaagaggagagctgcccgagcttggcatattaaggcaatgggatacccttggctggggcaggcaatgcacagggatgggcaggtacagagcagcctgcagctcatatataaacatgtggagcctcctttatgtcccagggtgctgctagatatatagtttacatcatctcattcattcttcatactttgtattaatcagcatgggctgccataacaaaataccatagactgggtggattaaaaaacaaatttattttctcatagttcttgagggcgagaatcctaggtcagggtccacgagggtcagttcctgttgaaggctctcttcctggcttgcagatggctgccttcttgctgtgtcctcacatggctttgtgtgtgagagagaagagagcaagctttctggtgtctcttcttataaggacactaatcctgttgatcaggaccccacccttatggcctcatttaaccttaattatctccataaaggccctatctccaagtacaatcacactgggtgttagggattcaacatacgaatttgggggcgggcacaacccttcagttcataacatatttacgctctatcatttcctgtaattataaagacacttaggctaagtgaggttaagtaacttgtccaaggtcatatagcacgtaagtcagcagagctgaaactggagttcagaactgacccatgatagagccccaataactgagaagtttaaaaaagtattgctactagtttaatacaaagcccgtaggttaatacatgattactagggttgttttcttattatgattatcatccccatttcaggtgcagaagaaagaccccaaggactgggctgtgcagtaccgcgaggcagtggagatggaagtccaagctgcagctgtggctgtggctgaggctgaagccagggctgaggcaagagcccaaatggggattggagaggaagctgtggctgggccctggaattgggatgacatggatatcgactgcctaacaagggaagagttaggcgatgatgctcaggcctggagcagattttcatttgaaattgaggccagagcccaagaaaatgcagatgccagcaccaacgtcaacttcagcagaggagctagtaccagggctggcttcagcgatggtgctagtattagcttcaatggtgcacccagctccagtggtggcttcagtggtggacctggcattacctttggtgttgcacccagcaccagtgccagcttcagcaatacagccagcattagctttggtggtacactgagcactagctccagcttcagcagcgcagccagcattagctttggttgtgcacacagcaccagcactagtttcagcagtgaagccagcattagctttggtggcatgccttgtaccagtgccagctttagtggtggagtcagctctagttttagtggcccactcagcaccagtgccactttcagtggtggagccagctctggctttggaggcacactcagcaccacggctggctttagtggtgtactcagcactagcaccagctttggcagtgcacccacaacgagcacagtcttcagtagtgcgcttagcaccagcactggctttggaggcatactcagcaccagtgtctgttttggtggctctcccagctccagtggtagctttggtggtacactcagtaccagtatctgcttcggtggctctccctgcaccagcactggctttggaggcacacttagcaccagtgtctcctttggtggctcttccagcaccagtgccaattttggtggtacactaagtaccagcatctgctttgatggctctcccagcactggtgctggctttggtggtgctctcaacaccagtgccagctttggcagtgtgctcaacaccagtactggttttggtggtgctatgagcaccagtgctgactttggcggtacactaagcaccagtgtctgctttggtggctctcctggcaccagtgtcagctttggcagtgcactcaacaccaatgctggttatggtggtgctgtcagcaccaacactgactttggtggtacactaagcaccagcgtctgttttggtggctctcccagcaccagtgctggctttggtggtgcactcaacaccaatgccagctttggctgtgccgtcagcaccagtgccagcttcagtggtgctgtcagcaccagtgcttgcttcagtggtgcaccaatcaccaaccctggctttggcggtgcatttagcaccagtgctggcttcggtggggcacttagtaccgctgctgacttcggtggtactcccagcaacagcattggctttggtgctgctcccagcaccagtgtcagctttggtggtgctcatggcaccagcctctgttttggtggagctcccagcaccagcctctgctttggcagtgcatctaatactaacctatgctttggtggccctcctagcaccagtgcctgctttagtggtgctaccagccctagtttttgtgatggacccagcaccagtaccggtttcagctttggcaatgggttaagcaccaatgctggatttggtggtggactgaacaccagtgctggctttggtggtggcctaggcaccagtgctggcttcagtggtggcctaagcacaagttctggctttgatggtgggctaggtaccagcgctggcttcggtggaggaccaggcaccagcactggttttggtggtggactgggcaccagtgctggcttcagtggcggactgggcaccagtgctggctttggtggtggactggtcactagtgatggctttggtggtggactgggcaccaatgctagtttcggcagcacacttggcaccagtgctggctttagtggtggcctcagcaccagcgatggctttggcagtaggcctaatgccagcttcgacagaggactgagtaccatcattggctttggcagtggttccaacaccagcactggctttactggcgaacccagcaccagcacgggcttcagtagtggacccagttctattgttggcttcagcggtggaccaagcactggtgttggcttctgcagtggaccaagcaccagtggcttcagcggtggaccgagcacaggagctggcttcggcggtggaccaaacactggtgctggctttggtggtggaccgagcaccagtgctggctttggcagtggagccgccagtcttggtgcctgtggcttctcgtatggctagtgaggtttcaggtaactgcaatatttccatagccaggacccacagggatgggtacaagagctgggagatgttgtaagaaacactaaggcaggacagcagggtggaaaggtgagggcaattaaggaattatgagaagacagtgtatttggtgctaaaatgtgttcctatttgttttgttttcagatttattccccatgtttacagataccgctaataaattgcagtagtccttcccatggagccaaagtacatccttggaatctttgtccacacagcagtcaaggcagttatggccaatcagctgagggtgtcatgtgatggaaaaatctgtttgctgttcctgctttattgtttgctttctgtgtgctgtcatattttggtatcagagttacattaaatttgcaaaatgaattgga

SEQ ID NO: 950 - DNA, 14809 bp, Homo sapiens
catgaacagacgcttctcaaaagaagacatttatgcagccaaaaaacacatgaaaaaatgctcaccattactggccgtcagagaattgcaaatcaaaaccacaatgagataccatctcacaccagttagaatggcaatcattaaaaagtcaggaaacaacaggtgctggagaggatgtggagaaataggaacacttttacactgttggtgggactggaaactagttcaaccattgtggaagtcagtgtggcaattcctcagggatctagaactagaaataccatttgacccagccatcccattactgggtatatacccaaaggactataaatcatgctgctataaagacacatgcacacgtatgtttattgtggcactattcacaatagcaaagacttggaaccaacccaaatgtccaacaatgataggctggattaagaaaatgtggcacatatacaccatggaatactatgcagccataaaaaatgatgagttcatgtcctttgtagggacatggatgaaattggaaatcatcattctcagtaaactatctcaagaacaaaaaaccaaacaccacatgttctcactcataggtgggaattgaacaatgagaacacatggacacaggaaggggaacatcacactctggggcctgttgtggggtggggggaggggggagggatggcattaaggatatacctaatgctaaatgacgagttaatgggtgcagcacaccaacatggcacatgtatacatatgcaactaacctgcacattgtgcacatgtaccctaaaacttaaagtagaataataaaaaaaaaaaaaaaactaggagttaggtacaaagtatagttagatagaatgagtaagatcgagtgtttgatagcacaacagggtgactatagtcaacaataatttatagtacattaaaaataactaaaatagtataattggaatatttgtaacacaaagaaatgcttgaggtgatggataccctatttaccctggtgaaattattacacattgtatgcctgaatcaaaatgtctcatggaccgtacaaatatatacacaatctaccaataaaaataaaaaataaaaacatctaaaaataatgaactttttgagtaagtttagatttacagaaaagttgcaaaaatagtacagataattgctgtatacctctcactaagtcgcccctaattttatcatcttatttttaccatgttatattcactaaacctaggaaaccaacactgatatataacagaactctacactttcatgtttgtccatgaatgtcctttttgtattccaggatccaatccaggataccacattccatttagttggcatgtcttgcagtatcctttgatctctgatagtctatttttggttttcatgagcttgacggttttgaggaatactggttagcctttctgtacaatgtccctcaatttgggtttgtcttatttttgtttacttgattaaactgggtttatgggattttacatcataacagggagtacaggatatccacatgacatcattagtgatgttaactttgattacttggttaagatactgtttgctagatttattcacaaccctattcacaatacaattactattttcccctttccatactttgttctttagaattaagtcactaagttcaatctacaatgaaggggtagttaacctccacctcctattagtacagaggggctacatattctacttgaaattcttctttaggaaagacttgtgtcttctcctacattgatttattcattatattatttatcagtatggccacatgtatatgctttaaattttattttattatccatattttttgaaatccaatactacatcatttattttcttgctcaaattgtttcaactttggccactgggagctcttttgagtgggctctagtgaccttttgacatatcccattcctttgttttttgagtatttccttactttctggtactacaagatgtcacaagttcactttgtattttttttaaagcccagtcctagaatcagtcatttctccaaagggctctggttccttttattggaaaacaatatttagaaatcactaagtgatgggtttactaattgttattgggggtgttattatttctaggccttctcaatgagagctagggaatgtatttcttctttatgcttaaaccatacatgcatagatatatttaattgtttctgtattcatccatctgtgtatatattaaactaaacattttttttttgtttctgttgcccaggctggagtgtagtggtgcgatctcggctcattgcaacctccacctcttgggatcaagcgattctcctgcctcagcctcccaagtagctgggattacaggcatgtgccaccatacccagctaatttttgtattttcagtagagacagggttttgccatattggccaggctggtttcaaactcctgacttcaggtgatctgcccaccttgtcccaaagtgctgagattgctggtgtgagccactgtgcctggccaactaaacataatttcatactgcagtttctgacttcaattcaggactgcatgctgagttctagcctacccatcttacttatctgtaacttctctctctgatggtaagaagtctggctcccaccatctaccatccctttacttatttattcaaccccagtatacatgtaaagcagtttctaaattactaacccacactacaatgatgaaaataatttataacctaaactacagcatgtatgtaaagttccttttgtttttagcctttcagtttccagtcaaaacacagttttccaaagttacttgggtaagctcttccttttcttcacatcttcacaaagttacttaggtaagctcttcctttttttgtccttcacttcctttttcaaccttcactatgcaaatatatgtcattgtagcatatatttgtaatatagttagattcatttgtcattgtctatatgtcatccagggatccctgtatatcctggctaattgtttcttttttttttttttttgcatatattgatgtttagtctttgtgatgtatagttctatgggttttgataaatgcatagagttatgtatccatcaccccaatgccatatagaacagttcccagcccaaatgcctatcaatgatagaccggataaagaaaatgtggtatatacacaccatggaatactatgcagccataaaaaggaatgagatcatgtccattgcagggacatggatgaatctggaagccatcatcctcagcaaactaaaacaggaacagaaaaccaaacactgcatgttctcactcataagtgggagctgaataatgagaacacatggacacagggaggggaacaacatacactgcagcctgtccttggggggcgaggggagggagagcatcaggacaagtagctaatgcatgcagggcttaaaaccaaggtgacaagttgatagttgcagcaaaccaccatagcacacgtatacatatgtaacaaacctacatgttctgcacatgtatcccagaacttaaagtaaattttttttagaaaaggaagtatgggtaccaaaacagagatatagatcaatggaacagaacagagccttcagaaataatgacacaactctctgatctttgacaaacctgagaaaaacaagcaatggggaaaggactccctatttaataaatgatgctgggaaaactggctagccatatgtagaaagctgaaactggatccctttcttacaccttatacaaaaatcaattcaagatggattaaagacttaaacgttagacctaaaaccataaaaaccctagaagaaaacctaggcattaccattcaggacataggcatgggcaaggacttcatgtctaaaacaccaaaggaatggcaacaaaagccaaaattgacaaatgggatctaattaaactcaagagcttctgcacagcaaaagaaactaccatcagagtgaacaggcaacctacaaaataggagaaaatttttgcaacctactcatctgacaaagggctaatatccagaatctacaatgaactcaaacaaattgacaagaaaaaaacaaacaaccccatcaaaaagtgggcaaaggacacgaacagacacttctcaaaagaagacatttatgcagccaaaagacacatgaaaaaatgctcaccatcactggccatcagagaaatgcaaatcaaaaccacaatgagataccatctcacaccagttagaatggcaatcattaaaaagtcaggaaacaacaggtgctggagaggatgtggagaaataggaacacttttacactgttggtgggactggaaactagttcaaccattgtggaattcagtgtggcgattcctcagggatctagaactagaaataccatttgacccagccatcccattactgggtatatacccaaaggactataaatcatgctgctataaagacacatgcacacgtatgtttattgtggcattattcacaatagcaaagacttggaaccaacccaaatgtcgaacaatgataggctggattaagaaaatgtggcacatatacaccatggaatactatgcagccataaaaaatgatgagttcatgtcctttgtagggacatggatgaaattggaaatcatcattctcagtaaactatctcaagaacaaaaaaccaaacaccgcatattctcactcataggtgggaattgaacaatgagaacacatggacacaggaaggggaacatcacactctggggcctgttgtggggtagggggaggggggagggatagcattgggagatatacctaatgctagatgacaagttagtgggtgcagtgcaccagcatggcacatgtatacatatgtaactaacctgcacattgtgcacatgtaccctaaaacttaaagtagaataataataaataaataaataaagtaagtaatgggtttttcaacttggctttcatggaatttatattgtcttggggtcactgagattctcatatatgaaaatttatcttttgcctcatttggaaagctttcagtttttacttcttcaaatgtattttctgcccaagtcctgtctctttggaactccaattatacatatgttagttgcattgataatgttcatcaggtctctgagttttgtttattttttccccaacatttttctccatgttactcagatctaataatttttatcattctatctttaaggtaactatttttttccctctgtaactggcattctgttattgagcccatccaatgtattttaattttacttattgcattcctcagttctaaaattttcatttgtgtttttcttacaggttctatttctcttccgaagtttcttttcccttcattcatttcaaatatggttttctgtaccttatggagtatagttacaatagctgctttcaagttatgtctcataattccaacatttaagtctcttttgttttgtcacatattgattttcttcttccttgagaatggggcacattttctggttctttgacatggactaattttctatcatatcctggacattgcagatgttattttgtgtagcctctgggttgttataatcttctgaaaaatgttgatgcttttcttttagcaggcaatcaacccagttagattctggccatcagttctgtcttgccttttctgggttatagttaaaatctcagtatagttcttaaaactggtatatatatatttatatatatatatttatatatataaatatatatatttatatatatatatataaatatatatatttatatatatatatttatatatataaatatatatatatttatatatatatttatatatatatttatatatatatatttatatatatatatatttatatatatatatatttgaggctgagacttttgtaggcgatttaattctctgctcagttccctaagcctttaaatacttgtttggttaattcttgaacatgcattgtttaatggttggggtgagaattgtgtggtttcatacacatatatgggaatattttctctatctcttttccttctgagacttcttgttcatgctgcatcctacccaggttcttttttctgcttcctctggccagaaagatggcagagaatccctcagagttttagtcatgtgctctgctccagtctgtgagtgggacacactcatggcaaggctgagaggagaaaaaaaaccctggacaacttacccttatgcaggtcacttctctatgttttaactctcttccacaatctgcctggttttagttaccttgcagagtgcttaggcaggttttcttttctttaaaaaaatttgaccagaatttttaggtataattaatcagtgtggtggtgcctgtagggggtttatactgccatagctgagtgggaacttctaagagcactgtattttaaatttcattctatttctcacttctttatttaacattatgttgataactatccatgttgttatatacagatttaatcgattatcttttcccactgcatgagatcattgtaagagatcaaacgcaaatgctcatacaacaatttacatatttattctgtgattatacactgctaggttgcccaaactttttgctaccacaaataatgccatgataaacatcctgtacatgtcacttagtaggccagaaagagatcttttctggagtggcatttctcagttatagtgtgaatgattcttaatttcgctaaatactgccagattgctcttcaagatgacttcactggtttgcattctcaattgaagtacctaagggttcttgtttcccctcatcggttgacataatctgatttgcttatttttcctattttatgggtgctgaatgaggtctcaggcatcacattgcctgacttcaaactgtgctataaggccatagtcaccaaaacagcatggtactggtataaaaataagcatacaaactgatggaactgaacagagaacccagaaataaagccaaatacttaaaagccaactgatcttcaacaaagcaaacaaaaacataaagtggggaaaggacactctattcaacaaatggtgctggcataattgggaagccacaagtagaaaaataaaaccggatcctcatctctcatcttatacaaaaatcaactcaaatggaacaaagacttaaatctcaggcctgaaaccacaaaagttttaaaagataacattgggaaaacattctagacatggggaaatgcaacaaaaacaaagataaatacatgcaacttaattaaactaaaaagcttctgcacagcaaaagaattaatcagtagggtaaacagacaacccacagagtgggagaaaatcttctcaatctatatatccagcaaataactaatatccagaatctacaaggaactgaaaccaatcagcaagaaaaaacaaacaatcccatcaaaaagtggacatgaatagacaattctcaaaagaagatatacagatggccaacaaacatatgaagaaatgctcaacatcactgattactagggaaatccaaatcaaaaccacaatgcaataaccaacttactcctgctagaatggccataatcaaaacaataaaaaaatagtagatgttagcatggatgtggtgaaaagggaacacttttacactactagtgggaatgtaaaatagtacaaccactatggaaaacagtgtggagattccttaaagaactaaaggtagatctaccatttgatccagcaatcccactactgggtatctacccagaggaaaagaagtcattatatgaaaaagacacgtgtgcacgcatgtttataggagtaaaattcacagttgcaaaaatatggaaccagcccaaatgcccatcaatcaagtagataaagaaattgtgattttatatatatatatatataataccataaaaggaggtcttaaagatcattatatatacatttatatatgaatatataattatataattatatataaaataataatataatatctataataatataagaatatattataaatttatatataataatgtaatatatattataaatttatatataaatatttatatataatataatatatactatatataaattatatatagtatatataatatataatacaatataatataatatataatatgtattatatttattatactatataatatactatatattatatagtatactatataatataatgtaatatataaattatatatatttatatattagtatataataataattatatatttatacacaaatatatataattattataatatataatgacctttaagatcttcttttatggttattgtatatatataatcacagtttctttatctacttgttgatcgattgatgagcatttgggctggttccatatttttgcaactgtgaattgtactgctataaaaatgcgtgcacaagtgtctttttcatataatgacttcttttcctctgggtagatacccagtagtgggattgctggatcaaatggtagatctacctttagttctttaaggaatctccacactgttttccacagtggttgtactagtttacattcccaccagtagtgtaaaagtgttcccttttcaccacatccgtgccaacatctattattttttattttttttgattatggccattctagcaggagtaagttggtattgcatgtgattttgatttggatttccctggtaattagtgatgttgagcatttcttcatatgtttgttggccatctgtatatcttcttttaagaattgtctattcatgtccgctttttgatgggattgttttttcttgctgattggtttcagttccttgtagattctggatattagttatttgttagatatatactaatacgtatatcagtatatatatacgatatactaatacgtatatcgtatatatatactatatactaatacgtatgtcagtatatatatactatatactaatacgtatgtcagtatatatatactatatactaatacgtatgtcagtatatatatactatatactaatacgtatgtcagtatatatatactatatactaatacgtatgtcagtatatatatactatatactaatacgtatgtcagtatatatatactatatactaatacgtatgtcagtatatatatactatatactaatacgtatgtcagtatatatatactatatactaatactatgtcagtatatatatactatatactaatacgtatgtcagtatatatatactatatactaatacgtatgtcagtatatatatactatatactaatacgtatgtcagtatatatatactatatactaatacgtatgtcagtatatatatactatatactaatacgtatgtcagtatatatatactatatactaatacgtatgtcagtatatatatactatatactaatacgtatgtcagtatatatatactatatactaatacgtatgtcagtatatatatactatatactaatacgtatgtcagtatatatatactatatactaatacgtatgtcagtatatatatactatatactaatacgtatgtcagtatatatatactatatactaatacgtatgtcagtatatatatactatatactaatacgtatgtcagtatatatatactatatactaatacgtatgtcagtatatatatactatatactaatacgtatgtcagtatatatatactatatactaatacgtatgtcagtatatatatactatatactaatacgtatgtcagtatatatatactatatactatacgtatgtagtatatatatactatatactataagtatgtcagtatatatatactatatactaatacgtatgtcagtatatatatacatatactaatacgtatgtcagtatatatatacatacactaatacgtatattagtatatatatacatatactaatatgtatgtgagtatatatactaatatacatatgtatactatatgtatactaatatgtatactaatatacatattagcatatatactaatatacatattagcatatatactaatatacatattagcatatatactaatatacatattagtatatatactaatatacttatacatattagtatatatactaatacacttatacatattagtatatatactaatatacttatacatattagtatatatactaatacacttatacatattagtatatatactaatacacttatatatattagtatacacactagtatatatatctatatatctggatataagttatttgtcagatatataggtatatattatatgttatattatatattatatatatagtcaataataatttaattgtacatttaaaaataagtaaaagagtatatatatcatgatatattatataatatataatattaagtaatatatactttatattatatataatcacagtttatctacttgttgattgatgggcatttatatatacacacacactcacacacacacacacacacacacacacatatatatatatatatatatatatatatatacacaccatagaatgctacccagctgtaaaaaggtatgaaataatcacattctcagcaacctggatggaattggagaccattattctaagtgaagttaactcaggaatggaaagccaaacatcatcgtatgttctcacttaagtggatgttaagctgtgaggacgcaaaggcctaagaataatacaatggactttggggacttgggggaaaggttgggaggagttgagggataaaagactacacattggatacagtgtacactgctcggtgatgcatgcaccataatctcagaaatcaccactacggaacttattcatgtaaccaaacaccacttcttcccttaaaacctattgaatttaaaattaaaaaaagaaatacaactgatttttgtatgttgaatttgtttcttagttattttttgtggattctttatctacatataaagttatgtggtctgctaacagggacaattaaacttcttttttttccaaattggattacatttctttctcttgctgaggatgtcagtactatgttgaatataagtggtgagagcaggcatacttgctttattcctgaccttagagaaaaggctttccacttttcaccattgagtaggatgttagctataggtttgttgtatatgagctttattgtattgaggtacgtttccttttatacctaatttgctgagcgctttttcttaaaatcaagaattattgttgaattttatcaacgccttttctgcatctactgagatgatcatgtggtttctgtcctttattctgttaaggtattctatcacatttagtgatttgcatgtgttgaaccatccttgcatccttgggataaatcacacttgatcatgatgaacgatctttttaatatggtgttgaatttggtttgctagtattttgctgaggagtttgcatctatgttcctcagggatactggtctgtaattttcttttcttctagtgtctttgtctggttttggtgtcagggtaattctggttctgtaaaatgactttggaagtgtttctttctcttcaatgtattggtagaatttgaaaaggattgatattcattcctctttaaatgtttggtaaaattcagcagtggatccaccaggtctggagattttctttgatgagagacttttatcactgatttagtctcctttcccattacatatctgtttagattttctatttcttcaagcttaagtcttggtaggttttatgtgtctaggaatgtatccatttcttctaggttatccaatttcctggcatataattgttcttagtattctcttaaaatcttttgcttttctgtggtattaattgtaatgtctcctctttcatttctgattttgagtcttctcttgttttttcttagttgatctagctaagggcttgtcaatcttatttatcttttcataaaaccaactcttggtttcactgatttttttcctattgtttctctaatctctacttcatttacttctgctctgatctttattatttccttttttctactaattttgagcttatttgttcttttttttccagttccttgaagtgtgatgttagattgtttgggatcttttttctttttgatgtatgtatttattgctataaacttcgttcttagaagtgcttttgctgcattctataagttttagtatgttgtatatacattttcgcttgtctcaagatattttaaattttccctttaatttcttccttgacgtattggttattctggaatatgttttttgatttccatatatttatgaatgttccacaattcttatcattaatgatttctagttccataccactgtgcatatattacttgatgtgatttcaatattcttaaatttgttaagacttgtttttgtctgtcactttgaaaaaattcaacaaccttcatgctaaaaactctcaataaattaggtattgatgggatgtatcaaaataataagagctatctatgacaaacccacagccaatatcatactgaatgggcaaaaactggaagcattccctttgaaaactggcacaagacagggatgccctctctcaccactcctattcaacatagtgttggaagttctggccagggcaattaggcaggagaaggaaataaagggtattcaattaggaaaagaggaagtcaaattgtccctgtttgcagatgacatgactgtatatctagaaaaccccattgtctcagctcaaaatctccttaagctgataagcaacttcagcaaagtctcaggatacaaaatcaatgtacaaaaatcacaagcattcttatacaccaataacagacaaacagagagccaaatcatgagtgaactcctattcacaattgcttcaaagagaataaaatacctaggaatccaacttacaagggatgtgaaggacctcttcaaggagaactacaaaccactgctcaatgaaataaaagaggatacaaagaaatggaagaacattccatgctcatggctaggaagaatcaatatcgtgaaaatggccatactgcccaaggtaatttatagattcaatgtcatccccatcaagctaccaatgactttcttcacagaattggaaaaactactttaaagttcatatggaaccaaaaaagagcccgcatcaccaagtcaatcctaagccaaaagaacaaagctgggggcatctcgctacctgacttcaaactatactacaaggctagagtaaccaaaacagcatggtactagtaccaaaacagagatacagatcaatggaacagaacagagccctcagaaataatgccgcatatctacaactatctgatctttgacaaacctgagaaaaacaagcaatggggaaaggattccctatttaataaacggtgctgggaaaactggctagccatatgtagaaagctgaaactggatcccttccttacaccttatacaaaaattaattcaagatggatgaaagacttaaacgttagacctaaaaccataaaaaccctagaagaaaacctaggcattaccattcaggacataggcatgggcaaggacttcatgtctaaaacaccaaaagcaatggcaacaaaagccaaaattgacaagtgggatctaatttaactcaagagcttctgcacagcaaaagaaactaccatcagagtgaacaggcaacttacagactgggagaaaatttttgcaacctactcatcagacaaagggctaacatccagaatctacaatgaactcaaacaaattgacaagaaaaaaacaaacaaccccatcaaaaagtaggtgaaggacatgaatagacacttctcaaaagaagacatttatgcagccaaaaaacacatgaaaaaatgctcaccatcactggccgtcagagaaaggcaaatcaaaaccacaatgagataccatctcacaccagttagagtggcaatcattaaaaagtcaggaaacaacaggtgctggagaggatgtggagaaataggaacacttttacactgttggtgggactggaaactagttcaaccattgtggaagtcagtgtggtgattcctcagggatctagaactagaaataccatttgacccaggcatcctattactgggtatacacccaaaggactataaatcatgctgctataaagacacacgcacacatatgtttattgcggcattattcacaatagcagagacttggaaccaacccgaatgtccaacaacgatagactggattaagaaaatgtggcacatatacaccatggaatactatgcagccataaaaatgatgagttcatgtcctttgtagggtcatggatgaaattggaaatcatcattctcagtaaactactgcaaggacaaaaaaccaaacaccgcatattctcactcataggtgggaattgaacaatgagaacacatggacacaggaaggggaacatcacactctggggactgttgtggggtggggggaggggggagggatagcattaggagatatacctaatgctaaatgacgagttaatgggtgcagcaccccagcatggcacatgtatacatatgtaactaacctgcacattgtgcacatgtaccctaaaacttaaagtagaataataataaaataaaataaaaaa

SEQ ID NO: 951 - DNA, 3544 bp, Homo sapiens
tcatccctagccctcagtgtactcatggtggccaggtgaggagggcagatatagagtccctttgaggagaagagggcctgccagcccaggtacagatgcttccctcagggtccaatctccctgatgtcccctgccatggccacacactgagccttgcttctgatccttggaggctagatagttccagaatggccacacgttggcgagggcttagtcaaccagctctgactgcatctgcaaggatgcagtggggaattcctgactgacgggtctaccactggacattctgaggtttcttcctccgtgccacatcctgggtcaaccctggattgtctgatgatatagttcttgatgctgataactggggtgctagggtatctcctctgcacaccttagtcatgactcaggtggggcttgagcactttctctacgcaccttctctacaaccctggtgggctgggacactccctcttaatgccttagtcagtgcctggtgggaccatagatgttgcagggtgtttggaatttggacagagatcctggtggaaaagggacaagatgaaccataaagaggagccagtgcttgctggggacagaagatggagggttagaaattcagtctgtggagcagtcttggagagaaattggcaggcacccagtacctcccttggtcgaaggctgctccagggtagtacagttctctggccagccggtcttgccaggcaagtgcctgagccctgaggaagcaagaaggctctctacctgcagtcagagtctgctctgggagaaagtacacagtgcgttgtgatcccctttaatctctctattttctgtttgtagaaagtccatgagatgctgaagaaggggtgggatgctgaaggttctcccttccgaggccagcgattcgaccctgccatgttcaacatctccccgggggctgtgcagttttaatgaccagaaggaaaggaaaccctcgccggtggggaggcagagccttatcctcggctgcccttcttggctccctgcattccagggacttgctcgtcttgtttacccctagccatcctttctttcaagggtgaaccaggccttccaccctgaccttgcatctccagactgttccagagaaggtgcggggccagctgctatgtggtggccgctgtggctgacactgagtgaaggtgtttgaaatgcaggagaggatatcccagcaaattgggatcacatgcttttgtctccacagcaaccagccactgcaggcagcatgtctttcctcccctgctctctgcttgctgttgttttgacgctattctgcttgcatgtcttctggttgggatgtggagttgttgctggactctcaggcgaagctgaagtcattgaagtgtgtgaagctctgtgcttgcatgagggcaagcaaggaatggctgtgcctgaggctgctctgggaaactccttgccccttgacctcttttgagagcattcacgtggtcttcttgctcatccccttataaatgtgctttgcctgcctcagcctcatggtcagagcagtggagactggagccctgtttgcacgttctagttgttcggagaaagcctaggttctgggctcaggtccagatgcagcggggattctgttctctgactgtggcgaccttgctttggttcttgttgaagtgaaccaagcccggccaccacgcatggcatgctgtgcttggctccccataagacgtcctctttgggtgcacggtgtcaaagtgtgggcaggagtggagagctggtgccctcaggaggagaccacagcatgtccatcagctcagcagagctcgacagccacaagtcctgagaagctttgaccttgaagggcttctgggagaggaggaatttctgcatggggcgtgaaggcacactgtcccaccacaactgaaccagaagagagtgaagactcccctcttcccatcctctgtgccaggtgccagactgtgctccttggaacttatggcccaatcttacctgttctccagggactggtcactgcctcaggacccccaagcctatgccctgagccatggctgctgactgactccagccaaggtgcaaagacgagattatgagacaggtcctcaggcctgtgttccaagtactcacaggggctctgggtgcccatcgccgggagtatggttcagctgccaccggcactgtccatttgcctgtctgtcaagctcagagcatggataagccacacagcagggcagtgcaccctggcaccatgcacggccagcaagaatcaaggcccgcagatgctaagagggcctattgtcaggggaaggtccccgctcctgcacactctctatggatacttgggttgtgggggctctcttggagagtaagtttgtggtttgtttctggtttacagtggtggctgacaccccttgtaagaaagcattcctgggaagtcttctgtgggtccaaacatgttgctccgatcatcacaggagagcaaaaggccctagataccccctttggaatgtgagagtcttgttgtctgatatttgccactgagctggtgaagcccctctaaagagatctcgaccctggggagcagaattcttgtcatctatgaggggtcctgagaaagacttgtcattttttttcctggagttcttcccattgaggtcctaggatttgcacaccactgtcccacaagagctttcctgcctaatgaaaggaggtcttgtggtgtgtgtctcctctcttctctatagttcccgagttggcccccattgcagcccccaccctgtgggtagtcttccagaagtgatgcagtggtgtgagatgccctacaccttgttatttgggagactttgagagtcattcacttccatggtgactagtgtttgttttgcctgattttatattctgtgttgcatttctccccactccctgccctgctttaataaacagcaaaccaatatctaggaagaatgactgagggatagtattgggtattggccccatggcaggaacagccacttgcatctggtcccggtgccacactgcggtgcttggtgtggttgtggagcctgtccctgcgcgccttgctcccgttgagccacgctgtctggtgggtgattctctgccctgagccaccaccctggactggcccagtctccagagctggcacaccctgcctgttttctctttttagacacaacagccgcagtttggccagccactaagtcccaccagctgaggtccgaggaaagcggggtgactcatttcccttgtccagggcccgaggagagtgaggtgtccagcctgcaaagctattccagctccttggtgttggtttgcaataaattggtatttaagcagttctgggtctgcgtgtgacatttgctgctgagacagttctgtctgtgcatggtcattattgttgcattctagccttgaggtcccaggccaacgtacacagcaaacaccagcatggggaattcttaggggttgtttcccatctggtctgaatgcactgggcaagatctcaata

SEQ ID NO: 952 - DNA, 309 bp, Homo sapiens
ccacaggtgtcatttgccctacagctggctggggttctgttgaaaggttcagaggcttcatgcagctgcctgctgaagtcatccattcttgtgttttgttgaggctgtgcagaggggcttcatgtagtcttctctgcacccacagccactccatgtgagctgcagcacttgttctcaaaatggtctttccaaagtctctgatgtgagttgcctgtaagaaattgatagtaatgtcaattaatccctagtatatagtatctgtctttgatatgcttgttgttgcatcacttaggtcttaaaaaaagaaaa

SEQ ID NO: 953 - DNA, 468 bp, Homo sapiens
cactgcccagaacactgcgcttggggaacagacctcacccccacctcaaatctgctctccactgggcctgttggcagccagctcagctggggaagggacagcatgactcgctttgtcgatgaaaagcacgaagttgtcagcacagaacctggccagtccttgagaaactccctccttggtggtcagaggtcaagcagcccatgtggcccacggtcctgaagaactgggctatgtccctgaggctcctctctaccgtctgactgtggggtctggggaacaggcatttaaaccaggctgctgccctggggagtgcccactggacgccagggtgccccatagggacagggtcacaaagccctggggcttcccctgccagtcctggtgaggacagtgtggtcactatctcagagagacgaaaaatgaatattctgtcatttcagactaaactactcacccagctcacactaa

SEQ ID NO: 954 - DNA, 5877 bp, Homo sapiens
gatcccgcccccctcggagcgcccctgtggtctgacttcagcagcactttccggcaggagactgggcactcgctgtcacccgcgagctgcctccctcagcgagatctgagcatctttccggaggctaacagacctgggcttcggggtgaccactgtgcttgcctcagtttccttttctggagcaggggaaggcccggctccctgcccaaaggcggctgtgcgctaagtggcagacgctcggggagagccggcgcggggcggaccccagcgccagtagtgacaggggcgaacgccgccgggagactccagccggcgggcgagcagggtaagccaggccgtgggcgggagggcggggcagctcaccggtaaaaggcagagtccccgagtgggttccagttcgccgtgtagcagtccatggctggtgcagacggcagctgggaagcaccgaggggacacccacctagagcgggctccaggccggcacttccgcttccgcccgtccgggtcacgtggcgaggccgccgccgcggccatcaccactgtgggcagcctcacttggctgccgccccgagaccccagcccgtacctgggcttcgcgcccgccaagtgggcccagccctggctcctgcgccctgtggcggccacctccatcgccttgctttcccttcgggcactgggggtcgctcagggcgggacatgggtgaacggaagtggaagctgtgagcgtcgcagcccgaggcgccgaggcctgaggcgccgtcggggccacagcgacgctcgcatggagagcgctgggcgctgggctgtgcaccgacggctaacctggacccacggtctctgcggggcgggagctttgcagaaccgactggccgactggggcgcgggaacatgaggcttggctaggagcccgctgcgggccaggcgcgcggtgcgcaggcatacccgggtcgcgggtgaacaccgcggagccccgggacttggtaattggcgcgagcgggtgcgcgcatgcgcgggacggcggcgggcacgtggcgaggcgcagggcggcgccgcgcgggaagctccccagtgccctggaggcctgctggctggacgaccccctgcctctggtaccaagtgtgaccaaggctggcgccaccatggctctgctgccgtcacctcctccctttagcattgagcagccccggaggggctagccctgaggctgacctgcccagagtccccaccatcgcgctgcttagtggcctctccctgcagcctgtcgttgctggtggcggcatggtcttctgtctgtcgagcgaggagccgcgccgcccgctgcgaagcgacatggtccacttccaggcctcggaagtccagcagctgctacacaacaagttcgtggtcatcttgggggactccagtgagtgcctcttctagggtgacgcttccagtcccacaccttgcagcccgttcagtgtgtctggaccatttgtttccatctcacatctcttgtctgtcttctggtctgttccgtccagtaggttttctctttttatgtcccacacatcttccacaggagtcctgacaggtgtaataacctgtgcactttttagcccatccttgctcagcatttctcgccctgacagctccccataatttccatcacgaaagcgttgcattgtgtagtgtgtctcctgggtgacttggccgacttaatttctgccaggtgatcttgggtcactgtatactgctggccaggaggcacacagaacagaggcaatgccaggactttttaacctcatcttttctcctgcgtctaagtcaaccacagagctggtgtcgggcacctcagccctgggaaaatggggtcctggacttggaaggagctggggcaggctgaggtctgcctcagccttgggatctctgtctcctcccagttcagagggctgtgtacaaggacctggtgctcttgctccagaaagactcactgctcacagctgcccagctgaaagccaaggtgagggaagcttggtggccatgtcagtggtgggtgggcacagaccctggcctggcagggttctcctccctggcatgggtctgaccagtagggtggggggggtgggtagggggagctgagctttgaacaggaccagctggtggctgggggccagctgggcgagctgcacaacgggacacagtatcgtgaggtccgccagttctgctcgggctctggccaccaccttgtgcgcttctacttcctcactcgtgtttactccgagtaccttgaggatgttctggaagagctgacatatggacctgccccggacctggtgatcatcaactcctgcctctgggatctctccaggttggggcgagggaaaggggaatactggttggggctggaagtacggctgaggcagtccacccttgtgctcttgcccaccctgtgtgttatccaacagatatggtcgctgctcaatggagagctaccgggagaacctggagcgggtgtttgtgcgcatggaccaagtattgccagactcctgcctgctggtgtggaacatggcgatgcccctcggggaacgtatcactgggggtttcctcctgccagaggcaagtgactgaggcccatcaggacaagagatgggatagcagactggtagataggacaccctgctttcagaccctgctgcgttctgtggctcttagaggctgcactttctcacttagctccagcccctggcaggctccctgcggcgggatgtggttgaagggaacttctacagtgctacgctggccggggaccactgctttgatgtcctagacctccactttcacttccggcatgcagtacagcaccgtcatcgggatggtgtccactgggaccagcatgcacaccgccacctctcacacctgcttctgacccatgtggctgacgcctggggcgtggagctgcccaagcgtggctatccccctggtgagccctaccataagtgggggggtagtgatgcactggggccctcagaggacagggctcagaaacagaatgggacacagccactcaagggaagtagaggtcccttgaaggactcctgtggcttctgcatgcaccttcctcaacccctgaggagggttagatcatcggagcaatattcttgtccaagttccagttttctacagtctggctgtgtagtcatttctgtgtgcttgaaggagcttgtacaagtattgaccacataaggcagcatgttgcaagggtcctacccaacagattaacaggaaagaaatggggcatgggtgtgaggagtggaaagacagggaggaagggccatccaggcagtgtggcagaagcaaagaagcccacagctggggggtgggggtacagtcaactggcagggtgtggaacagggatgttgcatcgggaaggccagccttatggacttgggctcaatggacagtgttccataggcttcttagttcagcctcagagtcccactgtgactggtgcagcttggtgtagctctcctcgggccccatctctgggcctttggtggaggcttctgagggccccactcccccttgttttgaggcactgctccccatcacatctcaactgtaacactctgctgcagaacctctgtttccatgtcaacaccctagtccctgcatgcacacaaagagggcaccatggctgattgtctccatggctgcttctcccctgcatcgtgtccttaaagggcaagtttcctgctgcacttgttgacgactcacccctttcagccccagtgtctagcacaatttccctgtacacagtatcaacagaattgtatttgttgaatgggaggcacgagtcatgttagaaggccgattatggcagcacaagaggatgtgggggcacagagagtccaggaatatcatagagacagacctgtaacacttggtagccaggagttggagcatcagggaggtgaatacagattttggttaaacatccccattttcttgtttagatgtaataattgatccccagcaaatgatgggatgccctgaaggttgtaaggctagttttgatggcttaggcctttgaaatccaatttggagctacagaagttagggccatgaaaagggagagttgatttggggtggaaggatgagttggtgagtttggtcacagcagattgatttgaggttctttggaaatacagagtagatttgcagtcattggtacccagcagagagattaaaactgagggcacagtggcagctgtgagggagacagaacgatgctcatgctttggattggcaggaaagaggggctatggcggaaacaaaaggagatgagggcaggggcacttttaggaaggactgaggctgctggcagtgtcacatgactgttgagaagaagggaatttgttagcaagtggttacatttagtaggaaaagtgttgagggcatgggtttggattaaaggagggagtgagcaattgaggaggaagtggaaattgggcaaaacattccttttggaagtttggatggtaaaaggaagttgttggggaagggaataacaggatctttatgtttggcttatttactggtctatggggaggaggtgggcgaggaaaaagctagatacaagacctgggcaaacaaagaaggctctggagggaagtgtaggttagaacaaaggtaagtctgagaggtaagagagaaggaacacactttgggcttggcctgaaatgagagggaatgaggaaaactgggtagagggcaaggatgctccagcctggtggctctgctctccaagaggaaggaatagagctttagaagtgtggatggccagagttcagggcagcctggctcccaagcctacctaaaacaaccatcccattcctagacccgtggattgaggactgggcagagatgaatcatccattccagggaagccataggcagaccccagacttcggggagcacctggccttgctcccacccccaccttcttctttgcctcctcccatgccttttccctacccgcttcctcagccctcgccacctcccctcttcccacccctgccccaggataccccttttttcccaggccagcccttcccaccccatgaattcttcaactataatccagtggaggacttctcgatgccaccccacttaggtaggtgcttctgcagctcccccaccctcttgtacctccccttacccagcctcctatgcctaggtgagctgagaggagttgggtagctccttgtgcccctagcactgggtttggtcacagcagtccctgagtctgaaacatcatctgtaggttcattaatcagctcactggttgtcactgtttcaccgtctgaaggtaggggaaggactatcccttttttgtagatagggaaacagagaagctcacctggaggacaagagttgcttcaaggcagagctgcactcactctggccagaagcctgctcttataatgactggttcttttgtaggatgtggccctggagtgaactttgtgcctggccctctgccacctccaatccctggccctaatccccatggtcagcactggggcccagtggtccaccgggggatgccacgctatgttcctaacagcccctaccatgtgcggagaatgggggggccctgcaggcagcggctcagacactcagagagactgatccacacatacaaactggacagacggcctcctgcccattcggggacatggcctgggtagactggatcttgggctgggactggatgtgccaatggcccttcagggcctgcctggcacctcaggtactgggctagggtgtctgctatgcctggtattgttcttgtccattgctgtcaccaataaaggcatggaagaacagagtgacaaa

SEQ ID NO: 955 - DNA, 636 bp, Homo sapiens
gatcctcctaactcagcctctccagtacctgggactataggaacatgccacaaagctcggcccagtaaaatatttttaaaaaactttaatgggcaattattacatagcaagcactgttctaaatatgcactggtgataaagagaagcaagaaacatgcttttggccgggctcagtggttcacgcctgtaatcccagtactttgggaggccaaggtggatagattgcttaaggtcagaagttcaagaccagcctggccaccatggtgaaacctcacctctagcaaaaaatacaaaaattagccgggcgtggtgacaggggcctgcagtctcagccactcgggaggctgaggcaggagaatcccttgaacccgggaggcggaggttgcagtgagccgagtgcccctgcactccagcctgggcaacagaggaagactctgtcaaaaaaaaaaaaaatgctttcagccctgaaggagcctggtttagcagaagaaacctatacaaatgtcgcctaaatatacaaatagaccatacctaaaagaccctagcactgggcccagtgaggcccacaggattctattgggggagaatcaggcacagttccagaaagaacccttgaactactaagtcctgaaggat

SEQ ID NO: 956 - DNA, 102 bp, Homo sapiens
gaggttgcagtgagctgagatcacgccactgcactccagcctgggtgacagagcaagactccatctcaaaaaaaaaaaaaaaaaaaaaaaaaactaataatc

SEQ ID NO: 957 - DNA, 3072 bp, Homo sapiens
ctccagtgaaatcttacaaggagcctttgccaattactaggaaacaattacgcaccaagtagttggattagctgtcctcagttccctttataaaactgaaaaagtctccattgtcctaagtagaccagattctgataacattcttatgctttaaaaaataaaaaaatttttaaaggcactatcattctgagaatgcaagttgaagttgaccatagttttaaagtcagttgagtatactatgtcatggtccaacaatgtgcttttaattgtaattgacacacaaaaattacacagctaatctgtgtgaatgcaaagttgccaagaaacttaacatttcagctcttccagactggcgtctgcatagatgcaatcacacaagtaaaatatattaagtccccactgctcaatgcaataggtctctggggtccgtcaggtaagtcaacttagtaaatctcattttcctctgaattaagtgattgtcagaaagtgaatcacccttccttttcccctctttaagcatgctgcagtacaaaaattctataaaaataccttttttgagtcattaacataaaatgaagaaaacagcagcagccaagaagagagatgttgaaatttaagagaggaagacagagaagaaaaatccactggataccttatgtgtgtgagtacagtacttttgtttgttcaaataactgttttatgacaaaggcactgaaagattctaacaccacttcttgggagtgcagtccacaaagttctaaacagcagacagcgcaccacagaagatgtttatgttacatcagccaaactataaaactcttgtaacacttttctgaacccagcgtttccagtgtttatagattgctttgctatctgaaagacccagttagtatttaaaatggtaaagggttaaaaaagttaatatttctccctgctagttaccaactcacagctcaaatcccaccctgcaggggaaaacagtatcgccctggacttcctggaatctaggcaggacctccacgctccaagctgcaacctgctaaagtgatcaacgttttgatttttcacagctttgaaagcctctaactggcttttccattttggatcattccaaagtctgcagcaaaatcattggttttttgatgctggggtcggggtgggaggcagtgggttgacgggggtcacttaattgttgctagtttgttcaaactgagattcactgcataaaacttttagtagaatttcctccaaaatgctggcattccccccttcaaaatgaagaaagcatggaggctgactagccttataccacagtctcactgccttttccaggcttcacccaaccatttcctctcttctctctctttacctttccagaattcaccaatctgttggaacacttctgccacgtgtgaagagttttggcagaccaaatccacatgcctgaagtgatgcccaccaacaaagacataaaaattttcaacatttcaacagccatgttggaatcatctgcagaataccgaaaaagtgcccagttggagatttcataaaaataacaggcaatcacacacgttgcaggaactgtgtacagtactgagaacaccccaatcttgaccatcagtctttctaacttgtctgtctttgtcccatccttttgaagatttgaccgaattttgaacaaggccaccaaacctgcagcaatgaacaaagttccaatgaccaaataagtaaagaggggagccaccacgaacccggtgagggcatcgagattttggtttccaacatagcacaagccagtcagttcatctgcatccaccagtctcataatcaagatgacaatggttttcactgcggggatggcccaggctgcaatgtggaaataagagctgtgcatttcaatggcttcatgaccccatttgagtcctgctgccaaaaaccaagtgagtgtcagaataacccaccaaatggagctggccattccaaaaaagtacatcagcaagaaaattattgcacatcctgtgttcttaagtccttcttggatgagaacaggttctgctgcctcttcaaaatcacaggatatcctttcccggcctacagtcagcctgacaatataagcaatgctataaatattatagcacatactgagaaatatgatggggcgctcagggtaggaaaacctagaagaatcgatcaggaaggtcagtactgtgaaggcagtggagatgaaacacaggctggcccacacagccatccagatatcagtgaactccttggctgagcggctgtataagccagcatcatagccacacttgagcacacagttcaggctccttttcacccagatgtactgatcagaattggttcccacagagtgacactcttccccaggctggatgggggttttgtgaggtaagggcacctcttcatcacctggcccttccatgcacatgtggttgtggtcgttctgtggtgggaatttgctgcagttcagactctctggccaggcaaatccaaattccttcaggacgggttcacagcgtctcttgactgaaagacacatgccgccgcatgggccaatggggatgttgatcttctctgtgcacattggcacataaacagaacaaaggaagaactggaaaagtaacaaaatgaacacacacaaaaaaaacaatgacttggaagtttgaccaaatgctcccacaaagctgagttgaatgcttccaggcaatctaggtatctacttttaaaccaacctatcgggagtctgtctgtttactctgacctcaaacaagggcgcctgataatccatcacttacatacttttcttagtttggctttagtaatcctttccagaagaatgtacataaataaataaataaaataaatagggtctgaagaattgcataagccctctttgcacaacacttgaaataaatcttaaaaaactggctttcaatctccttccattttagaaactatttgaaaaagctaaagaaactaatatgactcatttaggtggtttatttttatccccgtttctttatcattttaaaaataaaagttaaaaaaaaa

SEQ ID NO: 958 - DNA, 380 bp, Homo sapiens
cccatactgaaacaaaaaatggcccaaatgagacactgttagactcaaggatgggatgcagattgaggtctctggtcactagggatttgtttggccaggtttcctcaatgaataataatgaagcacaataggaaaatgtaaatgttaagtcgctgaaactgcagtaccagcaggggagagtccagttgctgtcctcaattcctccagcattgataaacagtctgcttggctccttacagatgttgtctatgaagtctagagttacaagtaactattttccagcatgtaaagggatccagtcttgtccttcaaaacagcttggccgctttccccaggatacatgtaattaaaaatatatatccctgcaaaagctgtttctc

SEQ ID NO: 959 - DNA, 11726 bp, Homo sapiens
ggagccggagccaagggagtccaggctgccgggggctgcagacatggagggccagagcagcaggggcagcaggaggccagggacccgggctggcctgggttccctgcccatgccccagggtgttgcccaaactggggcaccctccaaggtaagacccctgagacccagtgccccccgctttcctgatccctggttccacacaccccccccacatacactgcaggctccctggtgctcctgactgaggggctggtactttcctctgctcagcgagcaggggctaggtgaagagagcaccctgggggctgaggggcagtgacaggatgcccggagacagatgaagttagccatctccaggagcccttgggagagtcctggactgggtatcagaggacccagctgtgctccacctttgctgtgtgaccttggccaagttgcttttcctctctgagccaatgcaaaatgagggggcttgtcgctgaagactaaaactgtgacatctgggatggctaagttgttagtactggaggcggtgtgatagttggggggaagccggcacacagtgtgacacttggagccaaggagggtgcctaaaatgccacctcaaagaactgagtttgagaagggaggtggagatggagttttaggtactctgaactgagaaggatacgggacagaaacagaagtgcgtctccagaggcagggcctccctgcgccctgttaccctacctagggccatcctggggcaagtatagacattcttctgccctccttggtgaaggacactttatcctgtcttctggagacaggggacatcagagagaatagatggggaaggaggataggtctctacaggactccgtgactccccacccctcccacctgccggacataaatgggatacctgcttgcctgtcctttcaggtaggggagaaagtggaggatgtaagagggcacaacctgggcacagagagatgtgacaccaggatcaacttagaatcctggacttgctctgaatgctagattcacacttggtgaggatggactattcaacggggctagatggaattctagcaaatgttgggctcataaatgcagacaatgggagatgaagattccccagaatataatgtggccaggaaccctagaccccatcccttcattttacagacagagaaactgaggcgctgggcagagaggtacttgcctaaggtcacacagagctgggctttgaatctacacagccagtctcagctcccagctcttgctcctgagtggagctctgggaatgggtaagagaacagagagggctgtaaccaagggatttggatgtttagggggcggtggggaactgagggtttctgggcattatgaaggaagggagaggtatttaacaagctgcacctgtaggtctgtatcttgacaatagaaaaagaaaagaaacaggctgtccccagtgtgcccagacctgggatgtcaggtcagtagccgtggctgggggagcttcagggactgcagtgggagggttgcccagggaagctgccccgaatgggcagggtgtgggtgccagccaggaaggcaaggcaagtcctcaggtttaggttcacactctgcctcatttgagtcagggtctgagtttccccatctgtgaaagaggtttcagacttaaaggaggggttagggttttgtgtcctatctcctccaagacagaagttgacctgcagcagaatagattgaagtgagatagtaggaagaacttccttggaaagatgtgcctttcttagctagatgaactctgccagggtctatatggaagttggggcccaatgccctggttagggtcactctgaatctttgacttgtcctccacaaggtggactcaagttttcagctcccagcaaagaagaacgcagccctaggaccctcggaaccaaggttggctctggcacctgtagggccacgggcagctatgtcagcttcctcggaaggaccgaggctggctctggcatctccccgaccaatcctggctccactgtgtacccctgaagggcagaaaacagctactgcccaccgcagctccagcctggccccaacatctgtgggccagctggtgatgtctgcctcagctggaccaaagcctcccccagcgaccacaggctcagttctggctccgacgtccctggggctggtgatgcctgcctcagcagggccaagatctcccccagtcaccctggggcccaatctggccccaacctccagagaccagaagcaggagccacctgcctccgtgggacccaagccaacactggcagcctctggcctgagcctggccctggcttctgaggagcagcccccagaactcccctccaccccttccccggtgcccagtccagttctgtctccaactcaggaacaggccctggctccagcatccacggcatcaggcgcagcctctgtgggacagacatcagctagaaagagggatgccccagcccctagacctctccctgcttctgaggggcatctccagcctccagctcagacatctggtcctacaggctccccaccctgcatccaaacctccccagaccctcggctctccccctccttccgagcccggcctgaggccctccacagcagccctgaggatcctgttttgccacggccaccccagaccttgcccttggatgtgggccagggtccttcagagcctggcactcactcccctggacttctgtcccccaccttccggcctggggccccctcaggccagactgtgcccccacctctgcccaagccaccccgatcacccagccgttccccaagccactccccgaatcgctctccctgtgttcccccagcccctgacatggccctcccaaggcttggcacacagagtacagggcctggcaggtgcctgagccccaaccttcaggcccaagaagccccagccccagtcaccacctcctcttctacatccaccctgtcatcctccccttggtcagctcagcctacctggaagagcgaccccggcttccggtgagggggccctctcccaagaaaggtggctggggcttagctctgaggttagccattcttccagggtggatggtgtgctctacctcagcttctctctctgaggaagagtctttggggagggggttgctgggcccactctgtgacgctcagaagatagcatcccctcctaaggaacttgccgcctctcagttgatctccccagggagagtgtggcagagggacaggattcggggcctcctgtgggtccttcttagggctttggcccacacctgcctccatttagttccccagggagtcctgtgaaaggaagcttgagggtgagggagtggtgccaggactacaccctcatatgcccctgccctcaggatcactgtggtcacatggaacgtgggcactgccatgcccccagacgatgtcacatccctcctccacctgggcggtggtgacgacagcgacggcgcagacatgatcgccatagggtgaggtggcagggcatgtggaccccctcctgagcccctcgggccttccgggccctccacccatggcaggggcttccagggcacctctccaatcccatggccaccctgcccccacccctccaggttgcaggaagtgaactccatgctcaacaagcgactcaaggacgccctcttcacggaccagtggagtgagctgttcatggatgcgctagggcccttcaacttcgtgctggtaacgcacccctcaccccctggacagccagagaccctgctgaattcctggctccagctgtaccctggctcactgtggggcccgctgggcctctgtggctgggtccgtgacatgggtgggtggaggagcagacctgaaggtgggcgcgagggcgggggagttgtgttctgtcccccagccacgtggcctcccgctgcaggtgagttcggtgaggatgcagggtgtcatcctgctgctgttcgccaagtactaccacctgcccttcctgcgagacgtgcagaccgactgcacgcgcactggcctgggcggctactgggtgagcctgtgagcaggcccagaagaggatgggacatgaagggggctttagattagtccccccgccccatgcacagcaaggtccccttcccatcctccaccctttaccctgcggcccagcccccccatgcaccacccaataccccatcctattcctctatacccccgcccttttctctccccactgtgtcccagcgttgttcctcatttctgtaggacccacccaccttccacccacatctcctctctaacccccgctcccagtgcctcacctcctggcctaagccccgcccatgagccatccgaccctgcctccctagggtaacaagggtggcgtgagcgtgcgcctggcggccttcgggcacatgctctgcttcctgaactgccacttgcctgcgcatatggacaaggcggagcagcgcaaagacaacttccagaccatcctcagcctccagcagttccaagggccgggcgcacagggcatcctggatcatgagtatgggctggggtggggccaaatagagcttgggtggggctagtgatgggggtttttgtaccaccttgggtggggcttatggagagaggcagggcctatggggtttagtgcccacccaaactagttgtaggaacacgaaagcagagagcagttggatggggaggggcggagcttgtagggtggagctttgctgaggggccccgccttgctgaaggtcagaacctaatttcctgtagaccggtccctctgcttttcctctgccctttggtgggctggaggctctggcaccactcacccactcactacatcccctcgggttggatgggctggaaggatctgggctgagcccttatcctccatggacctgttgacaccccccactgccccccacatctctcccatcccccaccccaaacagcctcgtgttctggttcggggacctgaacttccgcattgagagctatgacctgcactttgtcaagtttgccatcgacagtgaccagctccatcagctctgggagaaggaccaggtggggtccttgtccccagaagcacacagagcatgtcccaggacacgcctgtaccttagactatggtccctgtcctcacctgccccaccccctccctgggcacagcagagcccaagctgttgtccaatctgctctcctggaccccccacagctcaacatggccaagaacacctggcccattctgaagggctttcaggaggggcccctcaacttcgctcccaccttcaagtttgatgtgggtaccaacaaatacgataccaggtgagctcagtccgaggagggactgaggggaagtgggctgaggtcttctcgaacagggagactttgggaagaggggcaggaggcaaggtggagggttacatcttgatccccagcccctgaaacttggggtacccctgctcactgcagtgccaagaaacggaagccagcttggacagaccgtatcctatggaaggtcaaggctccaggtgggggtcccagcccctcaggacggaagagccaccgactccaggtgacgcagcacagctaccgcagccacatggaatacacagtcagcgaccacaagcctgtggctgcccagttcctcctgcaggtgagttctggcctcatcctccccgcatgaaatccccaggcccaactcggcataccactgcccctcaccattaccctttgtataaccccttgtacctgccctcagcagcatccatttgttgtaacagtggaaatggggttgcaatctacattttcagatgaggaagctgaggctcagacacatggcatcacctgcccagggtcacccaactagtaagaggaacagttaggatttgaacccaagtgagtctggtttcagagcccatgccttttctttttttttttttttttttttttgagacagagtctcattctgtcacccaggctggagtgcagtggcacgatcttagctcactgcaagctccgcctcccgggttcaagtgattctcctgcctcagcctcctgagtagctgggattacatcacccgccaccacgccaggctaatttttgtatttttagtggagacagggtttcaccatgttggccaggctggtcttgaactcctgacctcctgatccacccaccttggcctcccaaagtgctgggattacaggcgtgagctaccgtgtctggccaactttttttttttttttttttttctttgagacggagtcttgctcagccgccccaggctggagtgcagtggcacaatcttggctcactgcaaccaccatctcctgggtccaagcgattctcccgtctcagcctcccaagtagctgggattacaggcacccgccgtcatgcccggctaatttttgtattttagtagagacagggtttcaccgtgttggccaggctggtcttgaactgctgacctcaggtgatccacccacctcagcctcccaaagtgctaagattacaggcatgagccactgtgcccggcgccctttttttttttttttttttttaatgcagtctcactctgttgcccaggctggagtgcagtggcgtggtctcggctcactgcaacctctacctcctgggttcaagtgattctcctgcctcagcctcctgagtaactgggattacagctgcccgccaccacgcctggctaatttttgtatttagtagagatggggttttgccatgttggccaggctggtctcgaactcctgacctccggtgatctgcccacctcggcctcccaaagtgctgggattacaaggtgtgagccaccacacccagccttagagcccgtgccttttctgctaatctctaactcctgtcttctgagaaaggtttagagtaatttatcttaaaattcatttataggctggcgcagtggctcacacctgtaatctcaacactttgagaggctgaggtggaaggatcacttcagctcaggagtttaagaccggcctgagcaacacagtgagacactgtctttaaaaaaaatcaaaaaaaggccgagcgcagtggctcacgcctgtaatcccagcactttgggaggctgatgtgggcggatcacatgaggccaggagtttgagaccagcctggccaacatggcgaaacccatctctactaaaaatacaaaaattagcctggcgcagtggtgcatgcctgtaatcccagttgcttgggaggctgaggcacaagaatcacttgaacctgggaggcagaggttgcagtgagccagtatcgtgccactgcactccagcctgggtgacatgagcaagactgtgtctcagggaaaaaataaaaataaaaataaaatttagctaggtggtgcacacctgtattcccagctatttatgaggctgaggtgggaagatcactggagcttggaagatctagtctgctgtgagctgtgatcgtaccactgcactccagcccaggcaacagagcaagaccttgtctcaaaaaaaaaaaaaaattcacatatgcatcatcattttcactactagtgtcttaaaaataacaaagaaaagatataaaaattcacatatataataagaccagcaaaatcaaactccatgtaacattcattcatattcattcattcgttatttactgagtacttaactgtcttaccatatgccaagcattatgagagtgtgtagtgatggggagggagagcaaagatataaaaaatacaaagctgaactcttaagtagttactataatttatattgtatttaggattgaggttcctggttgccgacatcaaaatgggaaatcctagaatctcagaaccagacctgtgagaccaatttggcccactccctttttttctgtggcgggatctgaggctcctcatggggtaggcacatgccccaaaccatacacaggctctgcagtggcagagcagggtagatcccatcttttcagccctgaaacccaactctgggctcttcaagtctcttgatctgataagagggagcccagcaggccagaaaatgtttttcctggtaactttgtcacatggccagtcagtgggacattggccaatatctttagctgggaatggaaatatccccacgcttggcctgccatgacctctggcaaaagtgttgggcatgaagatttaacccacaattagggacctcacctgaaaaatcactccttttgacaccccatcctgtccttcccacctcctccaggactctgtccctttaaaaacatttcccaaccaggtgcagtggctcacgcctgtaatcccagcactttgggaggctgaggcagacggatcactaggtcaggagttcgagaccagcctggccaacacagtgaaaccctctctctactaaaaatacaaaaattacctgggtgtggtggtgcgcacctgtagtcctagctactcgggaggctgaggtagaggaattgcttgaacccgggaggcggaggttgcagtgagttgagatggcaccactgcactccagcctgggctacagagcgagactctgtctcaaaaaaaaaaaaaaaattcccattgagtacctactacatgccaggcctgtgtagtgcactttacatatgtcatccttttgaatgcctcagtaggccctgagatgtcccagttttcctctctgttttactggtgagggaaactgaggctcagagaacttaagtctcttagccaaggcaatgcagtcagaatagggctcagtaggggttttgatgctgcaaggccttggagggcattttcaaaggtctacccttgcccgcccctgctgttaggaacacaggaacagggaaagaatgtgccagttacttctggaacagattggctcggaagctgagggagggaaacctgaaactaggtaaacaggggatcagacaaagatctggtgttggcaacaactcagtccttccctgagggacagaggtggggtcaatatcctggcagcctgccacctcagcagctccacccattcaggtggcgcccctggtgggtctgggttgaccttggggaaaggatactcgtggttataactttccttcatggactgatgacaaggtaatagttagtaaccgcttagtacttagactcagttggagaaactgaaccttgggatggttagagcctgccctggggtaacatagcgagttagcagtagagcctggaagtggactgaggtctccatcctcccacgcagagctcttcttgcctgctcaggaatattcagcttaccccaaatacccagtgcatcataggattttattggtcttccttgctagcatagagacaaatcatttattgagcacttactggtatactgggaaatttatgggatgctttgcaaatggtgtctcactgaatctgctgaacaactccaagagtaaaataagagtctctgagtttggccgggcacggtggctcatgcctataatcccagcactttgggaggctgaggtgggtggatcatttgaggtcaggagttcaagaacagcctggccaacatggtgaaacgctgcctctactaaaaatacaaaaattagccaggcgtgatggcggtacctgtggtctcagctactggggaggctgagacaggagaatcacttgaacccgggaggtggaggttgcagtgagccgagattgcaccactgcactccagcctgggtgacagagcgagactccatctcagaaaaagaaaaaaaaaaaaaagagtctctgagtttacagatgagggccctggcattcagagaggctgaggaactcacccagcctgtcaacggcagaaccagagccaaatccaggatttgctagcttcaaagctatgttctcactcactccctaaggaggctgtgggcagaaggaaccctgggctgggaggcagcacagggcttggtatttatactagacctgttctgcctcagtttcccagtctgtaaagtggccctttgtctcaggcaatttgtgctaagacccaagagccttaagtgtgtgggatactagagggtctcccctgatgtggccccctgcccctgccttgcctggacagtttgccttcagggacgacatgccactggtgcggctggaggtggcagatgagtgggtgcggcccgagcaggcggtggtgaggtaccgcatggaaacagtgttcgcccgcagctcctgggactggatcggcttataccgggtgagaggggcagtggtggtcagcgactcagggaagaaaggggcctggaggagcagctgaacagcatggtggggtcactggcttgtccagatcttgatgccacactgggagactgctgggatcagacattatagggtcacaacactgattccacaacactgatcccccaggtgggtttccgccattgcaaggactatgtggcttatgtctgggccaaacatgaagatgtggatgggaatacctaccaggtacttaaaaggagtgggagagtcagggcaagtccttgttgcctttgggacctcagaactcaccttgggggctctcaggtggcctccctgacccccaacttaggcttatacccctgggcctaccaggtaacattcagtgaggaatcactgcccaagggccatggagacttcatcctgggctactatagtcacaaccacagcatcctcatcggcatcactgaacccttccaggtaagtaggccagactgctgggctgggggtgcctaaagacttttgtcaaatgccacagcctctacattctgctccttgagttcagacaaataacctgacctcccaagatctgccaacgagagaggcagacctcgggaggtcaggcctcagtggctgggttggggagcagggcgccccagtgaccagcatttcccccagatctcgctgccttcctcggagttggccagcagcagcacagacagctcaggcaccagctcagagggagaggatgacagcacactggagctccttgcacccaagtcccgcagccccagtcctggcaagtccaagcgacaccgcagccgcagcccgggactggccaggttccctgggcttgccctacggccctcatcccgtgaacgccgtggtgccagccgtagcccctcaccccagagccgccgcctgtcccgagtggctcctgacaggagcagtaatggcagcagccggggcagtagtgaagaggggccctctgggttgcctggcccctgggccttcccaccagctgtgcctcgaagcctgggcctgttgcccgccttgcgcctagagactgtagaccctggtggtggtggctcctggggacctgatcgggaggccctggcgcccaacagcctgtctcctagtccccagggccatcgggggctggaggaagggggcctggggccctgagggtggggtaggcagatgggccaaggtgaccaccattctgcctcaatcttttgcaagcccacctgcctctctcctgctgctcctccagctgtatctgcacctgcctctctgtcctggccaggggtggacaactggggtcccccaaaactcagtcctggcacctcaactgtgacaatcagcaaagccccacccaggcccccatctgggatgatgggagagctctggcagatgtcccaatcctggaggtcatccattaggaattaaattctccagcctca

SEQ ID NO: 960 - DNA, 432 bp, Homo sapiens
caccccaatcctggattcagacacagacatttctgtgacatccctaacttcccacctgctacctcaggccacagcacccaggcactagggctcccctaggcaggtttttgaggcatgtattatttttgcaacacggacatacatgtacctcctcctggtactgcctggggctgctgcaataagttaccctttccccattctcatctgtatgtgaagttccctggcaaggccaaagcccagggcatcagaatgagcttcctgaacaccacatccaggcatagaagagttgtgtcatacatagctcaaggttacccagaacagcaggagatgtggtccagcatttgggccttgagatccccccattcatcctcttgattgtccacaacagcctctgccatgcttcagtctaacctacggaggggaggctgagat

SEQ ID NO: 961 - DNA, 1271 bp, Homo sapiens
agtttccgttccaggatcttgagtacagacatatgtggttttattgcactttgctttatcatgctttgcagatattgtgttttttacaaattgaagatttttgacaatcctatgtcaagcaagtctattggtgccattgttccaacagaatgtgctcactttttgtcacattttggtaattctgaaatatttcaaaagttattattaatctgttatggtgatctgtggtctttgatgttaatattgtaattgtttgggagcacaacaaaccatgcccatgtaggttgcaaacttagttggtaaatgttgtgtgtaatagttgctacaccaaccagctgttccccaatcactctccctctccttaggcctccctattccttgagacaaaataatactgaaattaggcaaattcacaaccctataatggcttctaactgttcaagtgtaaggaagagtcacacatctttcactttaaaccaaaacctagaaaggattgagcttaataaagaaggcatgtcaaaagctgagataggccaatagctaggcctcttgttccagttagccaagttgtgaatgcaaaggaaaagtccttgaagaaaactagaactactttagcgaatacacaaatgataagatagtgtgacattctaattgctgatatggagaaagttttagtagtctggataggagatcagccacaacattctcttaagccaaagctaactctcttcaattctatgaaagcttagaggtgaggaagctgcagaagaaaagttggaacctggcagaggttggttcatgaggtttaaggaaagaagccatcctcatagcataaaagtgcaaggtggtgcagcaaatactgatgtagaagctgcagcaagttatccagaagatctagctaagattattgatgaaggtggctacactaaacaagagattttcagtgttgacaaaagggttttcttttggaagaagatgccatcttggctttgaatagctggagagaataaggaaatgactgacttcaagggacaggctatcttgttaggggctaatgcagcaggtgaccttaagtcgaagcccatgctcatttaccattctgaaaatcttagggcccttaagaattatattaaatctatcctgcctgtgctttataaatagaacaactaagcctggatgccagcacatctgtttatagcatgatttactgaagattttaagtccactgttgagacttactgctcaaaaactaaaaaaaaaaaaaaaaaaaa

SEQ ID NO: 962 - DNA, 2450 bp, Homo sapiens
ggccgaggcaggtgggtcacaaggtcaggagattgagacaatcctggccaacatggtgaaagtccatgtctactaaaaatacaaaaattacctggatgtagtggtgcacgcctgtaatcccagctacttgggaagctgaggcaggagaatcgcttgcacccaggaggtggaggttgcaatgagctgagatcacgccgctgcactccatcctgggtgacagagcaagactctgtctccagaaaaaaaagaaaggatagattttaattgcttgatgcaagtgtggttttcctgaatctgttcattgacttgtctctgttcttacagaaaacatcggttgtgaagagaaagccaaaaagaatgccaacaagcctttgctggatgagattgtgcctgtgtaccgacgggactgtcatgaggaggtgtatgctggcagccatcaatatccagggagaggagtctatctcctcaagtttgacaactcctactctttgtggcggtcaaaatcagtctactacagagtctattatactagataaaaatgttgttacaaagtctggagtctagggttgggcagaagatgacatttaatttggaaatttctttttacttttgtggagcattagagtcacagtttaccttattgatattggtctgatggtttgtgaactcttgctgggaatcaaaatttccttgagactctttagcattcatactttggggttaaaggagattcctcagactcatccagcccttgggtgctgaccagcagagtcactagtggatgctgaagttacatgagctacatgttaaatatttaaagtctccaaaataaaacaccccaacgttgaccttacccggctgatggttagccccttgctgcctgctccatgtgtcttatgagagcccgtagttacagtgtcctctaatttgaaatccataagttaacaagtctatatcaggtgcagctggctttgattaaaggccatttttaaaacttaaaaactcaacacagaaaaagaaatggcctcagtttgatctcgttcagaatgacccagattgtttctgctttgggtgcagctgtttagttcagagttatattacagagaattattttctgagataatcttaaactagaatgttcaaaactaattgataattgaagtatcaagatacgtagaacacctcagagatttttcttcaggaacttccacaaactttgaatccttgtatctttatttggtattcatactactagtagcaaaatacaggttttttgttttgttttgttttgttttggcttcatagagtatctcaaattgaaacttttctgcacaaagaataaaattaaggattttataaactcaaattggcacctactgaattaaaatacataaaatcatttaaatataattcagcatatgggaagtaacattgcactaatatggaaatcactgccagagacagtctattttcttttaatttgttactacttagtcacaaaccccacattattccagtttggaattacttattaaggagaattggaaatacatatgcccatgcttaaattttatagctttaatttgtgttatttctttattgacgggaagaggtacatctttttttccttactgaaaacaaatatggattaattgcctcaaatttgtataagtgattggctagtgattcttgttttcagaagggagagtggtatagatagaaaatgacaaagatggcaatatacacttaatgttgttattgtatgttgttactgaagtacttagatttttaaaatttcaaatcctaaatcacttcttgtaggagggttttcattaactgcagtatatacagttcactacatatggttgtttgagttttttgtgtgctgtatttctttctgttttttaatacctggttttgtacatatctaactctgttctcttttggttgttcagaaactggatttttttttcttaagcagtgcttaatttgtgttttttaattttgattcagaagtagtcccagctcataggtgttcatactgttacatccagaacatttgtcaggctctctgtcagctttcatgtacatatggtatagaaaccatggagttaggcacttcctggattttttttttatgagaaaaatactgtatttaaaatgtaaaataaacttttaaaaagcaggcactaatatatatttcttccagcctttgattacaaatttgtccttgcacatgttaagatgaattatctcctaaaaatatcattgttcttgggagcagtgtatgttactttacatagcagcggttcctgtcatgtgttcatgtcagaatatttttggttttaaactttcttattgcctttggctgttgattagtacagtacaagtgcgatttcaaaaagatcttgaaagtaatatatttaatcaattaaaatgtttatctgtaa

SEQ ID NO: 963 - DNA, 466 bp, Homo sapiens
ggttaaattggcctagtgaaaataattgaattttcagagtatctctgaatgcctatctctctactatgattttttcattttactgcttatatttaagatatacagaaagcaatagtcctcacaaatcatcttccatctttctaaaatggggaggactcatattggtcagaaggaggatgatgagagcaacattttcatgttactcagatgagtgaaattcctgaggatgaattaggaattgaatggctatggaaaggggaaaatgggaccttgaaataggaatggtagtaagcacagaaagagataggatgctgaccactgctaccactagatgttcatcactgggctcccagggctcagaacagggtttggtgtatagcacatacttaggtatttgaatgaatgagtgaatgaatgaatgaatgaacgaactaataaatgctcacatgcacataacttgttaaat

SEQ ID NO: 964 - DNA, 1782 bp, Homo sapiens
cccagcaagcacacccttttcttaatctcattagaatataaacacaaatgttatgatcttttatttaggataaatttcctcttttaaatgtttttgtttattcaaaagaaaacttcacaaagttactattactagttaaaatatatattagaagtgcctgatttttgtcagagattcttacaaacaatattaaaaacaaacttgaaaagtatctactacagaagcacttagactatcacagaaaaatacaatgaagagttaaatgtctgagataagaccagcaagcttatagttataaagaaaaacacactgtacaatgtttgggggggaaatctgttgtttatagaaaagctttacctttttcttatttatcctcagataacgttgtgaaatctgctcatcagtaaggatgatatggaaagaattctctttttctatctatggtttatttacatattaaaattttactcagtttattaagtacacatatgataccacactagatgcaaatatatatacaggctatgacagtcaatgttcaatttaatactggtcaataaagtgaatttattcaaatgtaacaacttcacttgaattttttggatcacacatatcctatataaagccatctggtttctaatattatgcacaacacattccattttaattataacattcatctacaagaaaaacaaggaaaacaattcaaaactatgttagtaattagttcttgtttggtccattgtacgcaatcaggaaagtataggacttaattagttgctatcaaattgaagcaatgaaaaaggttaaaaatcaaagtacttaaaataaaaatatggaaataaccccccctccccaatactaaagggacacaaaacaacaactactgtcccatcaagcaaaagtggaaaacaaacagagcatgtgtgtaacctcacttaccatctttttgttattctacttcaacgggtcaagaaaggtgaagagagagaaggtagaagtaagagtcagaaaaggcctaaataaaatcctcactgaaatgtttaaacatacaagcaatagagacaattaggttgaggtcagatgcagtactactatatttaatggagttaataattagggccaaattaacatggacagttattcctgaatgcaaattaactcattaaacgatttaaatttccatttttcagtctaccacattttagctaacaagacacaaaaagtataagtcaaaatactaagcacaggaattccaaaaagtaagcttctttaattcattactgaacttaagaactttaattaagaaaaataaatgataacagcaaaggtctagctgagtaggcagagtgttagatagctcagggttgtttttccaagctctagtgttcaagttaaatttatttgacacaggtatcttttgctgttttctactcgaagaataatttaacttgataggcttacaagattgcacagagtgaacagaattgagccaatagaatacagaatgacaaaccatacaagcaaatgctgctagggaattccttggcaaaaatgttttattagcatactgacaaatttgatttctatcacttggccttaaacacgaagaaagtgggcatgaagagatgtgtagttatttgtgcctatgttgcaaaataaatttatggctatacatgatatttcttcatacctcaaaaattttattgtccagtatataaaaaagccattctttaaaaacctgacactgaataaaaagtatagccttcaacttcattaaac

SEQ ID NO: 965 - DNA, 98 bp, Homo sapiens
gagtctcactcttgcccaggctggaatgcagtggcgtgatctcggctcactgcaacctctgcctcccgggttcaagcgattctcctgcctcagcttcc

SEQ ID NO: 966 - DNA, 1044 bp, Homo sapiens
ctgccgtgtgcacggccgtctggtctctctcccacacgtgtgcgcaacctgtcatggagatgtgagggccttgtgtgtgcttccgtgtgtgactgtgtgactgcgggtccagacccccgcctggcggtgatgtgggcccttaaatcactcttcctgctcaccccctccccagtgattcggttttactttgcagcactgtggatccgggcagctgggcggcttctcgggggtgggggatcccccaccccgcccacaagtctggccccagggttctcggaggcagggggtctctgttagtgcgctccctccagctgcaggcacatagcccgagctcacagctggcctgagtcgacgccggctggggtgaaagctccaagtgggcctctggccttcccgctgctctgggtccagagtgtctggagcatgtggcacagaccagggcccctcgtcctccgaggagggtgggacatcctctctgtctcacgcccctgggtggagattctggctggcctcctctccctgtttgccaaggtcaaagtgggccaagggtgcaggtgcttagcctggttccctctcccgggccccgaggttctgtgggtcgggcagattggagacaggactcgtgtaagggctctgctggggtgaaggatggagacagagaaaatcaagatcctttcacaagttaattctacgtctgctgagccccagcccccgacacatcaccctgaggaggtgctaggcttctctgggccccctgtgccccatccacatgttgcagagtaaatctggccccttggacctggggtccgagatggacgcctggctgcccctcctggactgcgggtgacagctggcgagacactgcggggcttgggtgcggggagatggagtggggctgagctgcatttttccagccaccccacatcccacagaaggggagtcatggtcagtgccttgagctggaaagacgggcaatgcttccggcccacaccaaccaagaaaaccaccaggggctcattcatcctctcaaagaggctaagaaaa

SEQ ID NO: 967 - DNA, 207 bp, Homo sapiens
ggttcaagtgattctcctccctcaacctcccgagtacctgggattacaggcacctgccaccacacccggctaatttttgtatttttagtagagacggggtttcaccatgttggtcaggctggtctcgaactcctgacctcaggtgatccacccgcctcggcctcccaaagtgctgggattacaggtgtgagccactgtgcctggcca

SEQ ID NO: 968 - DNA, 169 bp, Homo sapiens
aaaatacaaaaattatccaggcgaggtggtgcacacgtgtagtcccagttactcgggaggctgaggtgggaggatggcttgaacctgggaggtgaagattgcagtgagctgagatcacaccactgcattcagtctggataatagaacaagactctatctcaaaaaaaaa

SEQ ID NO: 969 - DNA, 170 bp, Homo sapiens
aaaatacaaaaattatccaggcaaggtggtgcacgcgtgtagtcccagttactcgggaggctgaggtgggaggatggcttgaatctgggaggtgaagattgcagtgagctgagatcacaccactgcattcagtctggataatagaacaagactctatctcaaaaaaaaaa

SEQ ID NO: 970 - DNA, 7734 bp, Homo sapiens
attgttcagtcactaccttagagcctgttttattttttcttaattttattgactcatttatatctcagccctttttattacaaattatttattgtttagtcactgccttagagcctgttttattttttcttaattttattaaaggataatattgatgatgaaatgtcttacgatgatcatttagaggtttattttgaacaactggcaattccaggaatgatggaataaagcatacgaagtagaaggactggaacctccagaaaaagtactttaagttacctacaggtgatcctagtcaggtatgttacagtcttaatggcttttcagaaatttgacagaaaatcactattgatctcactggatgtttacatgaattttaagcctttggttttcttttaactctgttttttacaggtatgaattgataagaaatgcctgcaccttccctccttcctatctttcccttgcctacagaaaattaaaaggcaaaacaatagacatctgcatattcttcattcagatcaaccagtggctagcatttgccaccttttgcagtttctttctctttccataagtactttcttctctgaatcatttgaaagtaagttgcaaagagcatggtgttttaccccaacacttcagcatttatctcttgtgaataatgacatgttctatgtaattacagttctaccatctaactataatacagtaatttgatgtacagcccatattcagatttacctaattgtctccaaaatgttctttatttttgttttagatccacagtttaatcaaagattaaccttgcctttggttgtcacatctctctattcttttactttggagtagttctttcaatacatgaaacattttgaaaaatctaggctctttgttttgtggagtgacccataatctagatatatctggttgcttttttcttctgactagaatagattgagcattttggcaagaatacagattaaacagtgttctcatgaatggatccagattaaacagggaataatgcctaattcagattaggcagtgttgcgtacttaccacctcacaccaggagatgtttgcgtctgtttgtcccacgattgctgatgctatgtttaataattttggttgagatagtgtcaactggacatctccttgtgagggtagcttttcccttttgttattagtcatctgtggaatgagacatcaaagcactgtgaacatcttactccccggcaaacttcacgagctggtttcagcgtcattgctgaaggctcttggaaacattgcttacacccgtggttccaatggtgatttttctcattccttttacattgattacctgcctccttgagtgaggtagatgttgtctgctccccatgttttcccttcaaatgtttaattttaatttaaatgattaatacagctaagttattctttcaacaggcaaatgaaaacagtagcctaaagtgtcagtttcaaccagaaaataacagctctgatttctcatggctcatactcgtctgaaacgactcaggtagaggctgaggaaggccgtgttgtttgtctacctgggactagtaagtatagaaatagaattcctttgttcttaaattctacctttgactttacttttaaaatataatttctttggtacgatttagctcatgcctataatcctagcattttgggaggccaaagagggagaattgcttgagcccaggagtttgagaccagactctacacacacacacacacacacacacacacacacacacacacacacacgcgcacacgaagcgggaatggtggcatgcgactgagaccccagctacctgggaggctgaggttggaggatcatttggacccaggaggtggaggctgcagtgaaccatgattgtgccactgtactccagcctgggtgacagagcaagaccctgtctcacaaaagaaaaagaagaagagatcatctattagtcttcttgatttttgttaaaatgtgttatgtgatagttgataagctttatgcatatgtcaatctgtggccatttaattttgggctaaggacttgttctattatagcacagtaatcattttactaaatagtgactatttgtcattaaaaacaatatatttagttttaatacagttgaatactcacaaatttctgggggaacttggtcaggacatttcaactgagaattgtcaggcaccttctcactgataggcatgctgctcggtggtgcagctcataagcagacaacccccttcacgtaatttagtaggaaaatgacagaaatacttgtgtaactataaagtaaagcagaattctggttattgaatcacagcacctactgaaagaagttctcaagttctgattgagttctaaaattttttgaagattggaattcttcatatgtaagtaaaaacaatttctgatgacccatttctagtccatcttctaaagaagtatttaatctgggccaggcacagtggctcacgcctgtaatcccagcactttgggaggccggggtgggtggatcatgaggtcaagagatcaagaccatcctggccaacatggtgaaaccccatctctactaaaaacacgaaagttagctgagcatggtggcgcgtgcctgtagtcccagctactcgggaggctgaggcaggagaatcacttgaacctgggaggtgggggctacagtgagctgaaattgcgccactgcactccagcctggcaacagagcaagactccatctgaaaaaaaaaaaaaaaaaaaaaaaagaagtatttagtctaagctgggcatgatggctcactcctgtaatcccagcactcttagaggccaaggtatgagggttactataaaccaggagtttgacaccagcctaggcaacaatagcaagaccccatttctacaaaaaaaaatttaaaaattagctgtgcaggaggctgagttgggaggatcacttgagcttaggagttagaggttgtagaaagctatgatcataccactgcactccaggctggatgacagtgggccctgtctctaaaacacaaaaaaaaaccaacaaaaaaagtgtttaatccataagatgaccacatttataggaggctcccggcaatcttagcctgaagccatgaaggaagacgcagtgtgaaggcaagtgcaggctggcctctggcagctgaggatcaggacaggatgtggagtgaacatccacatcaaagctttattgcttggattggaaaaaaaattcctatctgtaggtcagccttaaaatacaccatttcataaaatattgattgtctttcccatattttgagcccatgcaatttgtgctacctgagggaacagtattgtgtccttgatttggtgagatcagtagctttcttatcttattgagtgacagctacagaactcagaaacagaagctgcatattaagcaaatttatatctttcttgttataatattattgtgtataagaaatagagatggccgggtgcggtggctcacgcctgtaatctcagcactttgggaggctgaggcagatggatcacacggtcaggagtttgagaccagcctggccaacatggtgaaaccctgtctctactaaaaatacaaaaggcaataagaggttctatgtggactttgaaggtcgtctctatcaatttgaggttggaaagaacagttttgttgacatcctttagctgtgttacaagtacaattttgttttttactcaggcaaaagaaaatgtgtgtgtgtgttaaatacagtcagccctctttatctgtgggtcctgcatccttgctttctaccaacctcagatcaaaaatattccagaaaaaaaaggatggttgcatctgtactgaatatgtacaagctttttttcttgtcattctttatgcaataaagtataacaaccatttacgttgcatttccattgtattaggtattgtgggtaatctagagatgatttgaaggatattggagggtgtgtccaggctgcaggcaagtactatggcattttatgtcagggacacctacagatttttgtctccagccatggttcctgtatagtttaacatttccacacgctgagggtgtgatgggtctgagttgggttggtcccccatgtttgaggaagtgtgcccatcatgattgtacacccttgttgtaaacttcggatatgtctattttgatatttaaaacattttcaggttaagtctgaaaaatgccaagatagtaacaatattttaaaagggaattcagaagtattactataataatagaactcattattagaacattctaatagtagaaaaggaagtctatttattttataaaattgtcagttcagcttaagatctaatagtcttttccaattagcagcaacttaattgagactacctcaaaagaagaatttaacatttatttttgtagaaaaaaagcaattttaaaatagcctgggaaaacttaggtaagttttccttaatcctgactcctaatttgtggctagaagtggcaatgatatgaacataagttgtgctatttgttaatatattgcttttcataaatcaatcccttttttgtaattaggtaaaaagagaagagaaagacattcttgattttggtgactagagttgtagatgctggaagctttgccactaacattgatgaaccagatgcatgtcaccagcccatcacggtgattcttaatgccgttaagtatgaacatacagtaaaagactgttgatagaatacatcggtcttatgaaatgaaatgtgttggttaaggattttttaaacgaatttcacattacacaactggctttactaaatctgagtcttgtatttctgaacagggcaccatgggcccggcactgccacgttttccaaggaacctgccggagctcctgcggaagctgctcctcaggcgatggagtcccttcgctggtaggcccttcttcagtcaccacaggatgcctgccattcatgaacaagaaggagaggacgggctttgaataaaaaacaggtaagtttccaaactgctttttttcatcaagatttcaatcttggctgggcaaagtggctcacgcctgtaatctcagcattttgggagaccaaggcgggcagatcatgaggtcaggagatagagaccatcctggccaacatcatctcctcagcacccagctcagtcatttagacaaagaaaatatgtaagatggccgagcacggttgctcacgcctgtaatcccagcactttgggaggctgaggtgggcggatcacgaggtcaggaggtcaggagatcgagaccgtcctggctaacacggtgaaaccccatctctactaaaaatacaaaaaaaaaaaaaaattagctgggcatggtggcaggcacctctagtcccagctactcgggaggctgaggcaggagaatgacgtgaagccaggaggcggagcttgcagtgagctgagatcgtgctactgcactccagcctaggcaacagagcgagactccttctcaaaaaaaaaaagaaaagaaagaaaaagaaaacacgtaagaaatagttgccaaaataattgaatacaggatcttcaactgagattattttctttgttaggatccaggaaatatttgtgaggccatttggacttcagtgtgaaatggtgttaaaagatgaagtcatttattcaagaagtaaacctctgccacctggactgtgcgcagacatttcattgattttgtttaataaacattttctggctttgggaggtgtctctcttggtagaacacagtgtcaaagatggacaagatggacacatagtccattatttggtattgtttgtgtatgggagcagaccacaaattaatgtttggagaacaattttgtcataacacactgttgaggctcagttgtacagaactggaaaagtcttcagcttggcacatgtcctgattcagcctttgtttaacatacattccaatccggattctatcttcactggctacaaagaccacctgatacgtgcaccacgacacaggagctgctggagagggggtagtgttatcacctcaaacccacagccatatttttcaaaagccagcttagagagaggtgtactgatagctgcatagagaacatgcagtccatccattcttcccagtgatgtacatttctcaatcagtaaccacgtggtataccagccttgagtgtcacatctcccaaccataccaaatggatcacctaactggaggtggggggggccctcagaaatgagatttcgtatttactgtaaaattgccttattttttcttttgaggtggagtctcactctgttgcctgggctggagtgcaatggtgtgatcactgctcactgcaacctccgcctcctgggttcaagcagttctcctgcctcagcctcccaagtagctgcaattacaggtgcatgccaccactcccagcaaatttttatatttttagtggagacagggtttcaccatgttgaccaggctggtctcaaactcctgacctcaggtgatctgcccaccttggcctcccaaagttctgggattaaaggtacgagccaccgcaactggctgagaatctttttatttgctgatttgtctcttgtgtattttctttgttcagatgtctcttcagatctttttctcacttttaaattgttttttaattgttaagaattttctgtctagtttagatataagccctttatcagacatgtgttttgcaaatattttctcctagtctgtggcttgtattctgtctcttaacactcattttatttttacttttggaactaaagaagaagaatggtcagctttccattattcttgtaacagtaatggcagaaccaagtctgctaatgctacactgagcaaagaaagtcacctggtgaagtccaacattaatgaaatggggtagtacatgcaggcagcgttgggggtggggagggaacaaatgcttcttgagagtaatataatctgccataccatccaggaacctacaatggctatctattaccttattctctggtttgtttaatgttcgaatctttccgaaagatccttcaacctttctggaagaatctaatctgataacaccatcaaaaacacattacttcttttggcataatttaaattgtaagacatcattcacatttatcaatgttacatatataagaactcacccaccatattcttccttgaggaattacagcatgtaattctataatcatttttataatcgtctaacaattttataatggattggttgcttactatcaattttttaaaagtcatggcttctccagtcatttcttgcttatcgaaattatttcatgagatgggtctctccttgtatatttgaaaatgaggtttgcttccttctacttaaaaaacaacttgaacatacctgtttggatcacatggtcttgtcctgataacttggaagaggttgcttcagcattgttcttattgttgtggtggttattattaatattgtttcatattctgtttaaaaaattaaaattttacacaagaccaatgtcttcttttcaattccagtacatttttcagaagtaactaatgctattggctttgtgcattgtaatttcagaccattttatatgtctttagttatatgtacagtatacacacatatgtgtcatattattccattttttctagcattaaacattgctatggaaaa

SEQ ID NO: 971 - DNA, 294 bp, Homo sapiens
gagactccacctcggaaaaaaaaaaaaaaagccagtgccaacttagaccatgactgagagctcttggtttatcttatccttgctgagctgggtgttacaacattgaagccttctgcagtgtcctccctccctttttctctctttctctctctctcctccctttcttccttttacttctcttatgataggctcgtctgtacttttttgatagaggtaaccatttgccacaccattttctgaagggcctgctctcttccccattcatttgtgatggcacatttatcctaccctaag

SEQ ID NO: 972 - DNA, 98 bp, Homo sapiens
catattcttcattcagatcaaccagtggctagcatttgccaccttttgcagtttctttctctttccataagtactttcttctctgaatcatttgaaag

SEQ ID NO: 973 - DNA, 407 bp, Homo sapiens
gtcccagctactcaggaggctgaggcaggagaatggtgtgaacccaggaggtggagcttgcagtgagccgagatcacgccactgcactccagcctaggtgacagagtgagactccacctcgaaaaaaaaataaataaataaaagccagtgccagcttagaccatgactgagagctcttggtttatcttatccttgccgagctgggtgttacaacattgaagccttctgcagtgtcctccctccctttttctctctttctctctctctcctccctttcttccttttacttctcttaggataggctcgtctgtacttttttgatagaggtaaccatttgccacaccattttctgaagtgcctgctctcttccccattcatttgtgatggcacatttatcctaccctaag

SEQ ID NO: 974 - DNA, 2635 bp, Homo sapiens
accctctgaggtagcattaatgaactggaaccctctgccaggtcctctcctccccatgacttccctgagagatgtctgtagctgatttcctgccagcatgtgaatggggatgggtacgtctgttctaggaagagcacaatgtcttacccatttttagaagataggaatttgctggacacttggacaccagagctggaggcacttggtaaacctcagactttccatgatcccttgtgttctggaggccaggaaagaacagagcaaagaggtcagggccttggccgttattggagattgactctaggacttctcaccacccctccccctcctctaatccatctaggttaatacttgacatttggaattatgaagttgtgtgccccatgatggggagtggactttgagatgagacactggcctgcattataagggacctgtcatttccactggattttagtttgtgtggcttaaagagaatgcctttccagttaggtatgctcgtggctttgaatataaatgggaacagtctaacgctagctattttgctcctttccttctgattcccagctggtggaaatcggtgctgcgtactcagcaaccttacatagggcaggtatggtctcatgagctgggagcaagacaggttttctttcttgaaatgaggtccccccacttccctttgtctttgctgctttgctgctttctttccattgtctttgctgctttccttcctttgatctgtagacactcagagaactgcctggccagaccctatagaggtacaattaggtcactctagggcatctgaccatgggtggcagtttccacaaaattcacttgttctgtgggttgaaggaaatatcaaaccagctggcaagttctaggcctcttgtcttcttggtatcttctagtcaaatttacagtatatcccttctgatttaatatttgcaggaaactgatgcatggagatgctgacatcccacgtgttaattctggggcaccctgatcctattctctaggatggcattgccctttctgagccatcaatccaagtcctttccccgtttttctatgtggttggtatataattcagtgagacactctttcttgctcctgtacttgaatgtaggagtgtattgcagtggccctgaagatcccagtagagtctggggagggttgattaggacagagtgatttccaccctgcccctcctcaagcagaggagctttcttcaacctttttctctttgaagaaattgagactcagggaagaagtattgtcgcagatgtgatgcggtgagtcactggtttttaaacctctgttttggcgatgggctgggtagggatgagttaaggtttattcccctaaatctgtattacactctaagtcaacattgtgtccttaggctgggcgcagtggctcacgcctgtaattccagccctttgggaggctgaggcgggtggatcacaaggtcaggagatcaagaccatcctggctaacacggtgaaaccccatctctgctaaaaacacacacacacacaaaattagccgggtgtggtggcaggtgcctgtagtcccagctactcgggaggctgaggcaggagaatggcgtgaacccgggaggcagagcttgcagtgagctgagatcacgccaccgcactccagcctgggcaacagagcgagactccgtctcaaaaaaaaacaaaacaaaaaaacaaaaaaaaccattgtgtccttaaattgaatatccttgatagaaaagggtagggccttagcgtactggctctatggaatacgtactctctgtctttcagtagaattcagcagtcattgttcacctgctttttgccagatgttgagctaattgctattggagtaggatggtaaagattggtcttggtatgcttggttgagaaggcacaactttttacacatgtgggcctgcaaatatctatgcagatttttttgagactttaaaaagcatgtttaaaagattatttcttctaatagagactccaaaagtactcaattactgtcttatcctctgggatcctagttcctattacttgtgcttgatttccctctgctgattagataagttaccttgaaagaggcaaagaaagccaaatgggaattgacttgtttttcttcctgtcattaaaaaaaaatggaaataatttcaaatttatagaagttatacaaataaaattatacaaagaatatttgtaatcctttttatccagaacctcctattgttcgtgttcattttaccccatttgctttatcatttgcacattctctctccatgtatcaatacataattgttttctgaatcattaagaggagagataattggcccaggcacggaggctcacacctgtgacctgagtactttgggaggctgaggcaggaggattgcttgagcccaggagttcaagaccagcctgggcaacagagtgagatcctgcctctaccaaaaaaaaaaaaaaaaaattagtcagacatggtggcatgccgctagctactttggaggctgaagtgggaggttgagactgcagtgagctgtaattgtgcacctgcgctctagcctgggttacagagggagacccttgctcaaaaaaaaaaaaaaaaaaaa

SEQ ID NO: 975 - DNA, 2636 bp, Homo sapiens
accctctgaggtagcattaatgaactggaaccctctgccaggtcctctcctccccatgacttccctgagagatgtctgtagctgatttcctgccagcatgtgaatggggatgggtacgtctgttctaggaagagcacaatgtcttacccatttttagaagataggaatttgctggacacttggacaccagagctggaggcacttggtaaacctcagactttccatgatcccttgtgttctggaggccaggaaagaacagagcaaagaggtcagggccttggccgttattggagattgactctaggacttctcaccacccctccccctcctctaatccatctaggttaatacttgacatttggaattatgaagttgtgtgccccatgatggggagtggactttgagatgagacactggcctgcattataagggacctgtcatttccactggattttagtttgtgtggcttaaagagaatgcctttccagttaggtatgctcgtggctttgaatataaatgggaacagtctaacgctagctattttgctcctttccttctgattcccagctggtggaaatcggtgctgcgtactcagcaaccttacatagggcaggtatggtctcatgagctgggagcaagacaggttttctttcttgaaatgaggtccccccacttgcctttgtctttgctgctttgctgctttctttccattgtctttgctgctttccttcctttgatctgtagacactcagagaactgcctggccagaccctatagaggtacaattaggtcactctagggcatctgaccatgggtggcagtttccacaaaattcacttgttctgtgggttgaaggaaatatcaaaccagctggcaagttctaggcctcttgtcttcttggtatcttctagtcaaatttacagtatatcccttctgatttaatatttgcaggaaactgatgcatggagatgctgacatcccacgtgttaattctggggcaccctgatcctattctctaggatggcattgcccctttctgagccatcaatccaagtcctttccccgtttttctatgtggttggtatataattcagtgagacactctttcttgctcctgtacttgaatgtaggagtgtattgcagtggccctgaagatcccagtagagtctggggagggttgattaggacagagtgatttccaccctgcccctcctcaagcagaggagctttcttcaacctttttctctttgaagaaattgagactcagggaagaagtattgtcgcagatgtgatgcggtgagtcactggtttttaaacctctgttttggcgatgggctgggtagggatgagttaaggtttattcccctaaatctgtattacactctaagtcaacattgtgtccttaggctgggcgcagtggctcacgcctgtaattccagccctttgggaggctgaggcgggtggatcacaaggtcaggagatcaagaccatcctggctaacacggtgaaaccccatctctgctaaaaacacacacacacacaaaattagccgggtgtggtggcaggtgcctgtagtcccagctactcgggaggctgaggcaggagaatggcgtgaacccgggaggcagagcttgcagtgagctgagatcacgccaccgcactccagcctgggcaacagagcgagactccgtctcaaaaaaaaacaaaacaaaaaaacaaaaaaaaccattgtgtccttaaattgaatatccttgatagaaaagggtagggccttagcgtactggctctatggaatacgtactctctgtctttcagtagaattcagcagtcattgttcacctgctttttgccagatgttgagctaattgctattggagtaggatggtaaagattggtcttggtatgcttggttgagaaggcacaactttttacacatgtgggcctgcaaatatctatgcagatttttttgagactttaaaaagcatgtttaaaagattatttcttctaatagagactccaaaagtactcaattactgtcttatcctctgggatcctagttcctattacttgtgcttgatttccctctgctgattagataagttaccttgaaagaggcaaagaaagccaaatgggaattgacttgtttttcttcctgtcattaaaaaaaaatggaaataatttcaaatttatagaagttatacaaataaaattatacaaagaatatttgtaatcctttttatccagaacctcctattgttcgtgttcattttaccccatttgctttatcatttgcacattctctctccatgtatcaatacataattgttttctgaatcattaagaggagagataattggcccaggcacggaggctcacacctgtgacctgagtactttgggaggctgaggcaggaggattgcttgagcccaggagttcaagaccagcctgggcaacagagtgagatcctgcctctaccaaaaaaaaaaaaaaaaaattagtcagacatggtggcatgccgctagctactttggaggctgaagtgggaggttgagactgcagtgagctgtaattgtgcacctgcgctctagcctgggttacagagggagacccttgctcaaaaaaaaaaaaaaaaaaaa

SEQ ID NO: 976 - DNA, 640 bp, Homo sapiens
aaattgtaagcgttaatattttgttaaaattcgcgttaaatttttgttaaatcagctcattttttaaccaataggccgaaatcggcaaaatcccttataaatcaaaagaatagaccgagatagggttgagtgttgttccagtttggaacaagagtccactattaaagaacgtggactccaacgtcaaagggcgaaaaaccgtctatcagggcgatggcccactacgtgaaccatcaccctaatcaagttttttggggtcgaggtgccgtaaagcactaaatcggaaccctaaagggagcccccgatttagagcttgacggggaaagccggcgaacgtggcgagaaaggaagggaagaaagcgaaaggagcgggcgctagggcgctggcaagtgtagcggtcacgctgcgcgtaaccaccacacccgccgcgcttaatgcgccgctacagggcgcgtccattcgccattcaggctgcgcaactgttgggaagggcgatcggtgcgggcctcttcgctattacgccagctggcgaaagggggatgtgctgcaaggcgattaagttgggtaacgccagggttttcccagtcacgacgttgtaaaacgacggccagtgaattgtaatacgactcactatagggc

SEQ ID NO: 977 - DNA, 606 bp, Homo sapiens
gttatatttttgttaratcagctcattttttaaccaataggccgaaatcggcaaaatcccttataaatcaaaagaatagaccgagatagggttgagtgttgttccagtttggaacaagagtccactattaaagaacgtggactccaacgtcaaagggcgaaaarccgtctatcagggcgatggcccactacgtgaaccatcaccctaatcaagttttttggggtcgaggtgccgtaaagcactaaatcggaaccctaaagggagcccccgatttagagcttgacggggaaagccggcgaacgtggcgagaaagkaagggaagaaagcgaaaggagcgggcgctagggcgctggcaagtgtagcggtcacgctgcgcgtaaccaccacacccgccgcgcttaatgcgccgctacagggcgcgtccattcgccattcaggctgcgcaactgttgggaagggcgatcggtgcgggcctcttcgctattacgccagctggcgaaagggggatgtgctgcaaggcgattaagttgggtaacgccagggttttcccagtcacgacgttgtaaaacgacggccagtgaattgtaatacgactcactatagggc

SEQ ID NO: 978 - DNA, 628 bp, Homo sapiens
aagcgtaatatttgtaaaattcgcgttaaattttgtaaatcagctcattttttaaccaataggccgaaatcggcaaaatcccttataaatcaaaagaatagaccgagatagggttgagtgttgttccagtttggaacaagagtccactattaaagaacgtggactccaacgtcaaagggcgaaaaaccgtctatcagggcgatggcccactacgtgaaccatcaccctaatcaagttttttggggtcgaggtgccgtaaagcactaaatcggaaccctaaagggagcccccgatttagagcttgacggggaaagccggcgaacgtggcgagaaaggaagggaagaaagcgaaaggagcgggcgctagggcgctggcaagtgtagcggtcacgctgcgcgtaaccaccacacccgccgcgcttaatgcgccgctacagggcgcgtccattcgccattcaggctgcgcaactgttgggaagggcgatcggtgcgggcctcttcgctattacgccagctggcgaaagggggatgtgctgcaaggcgattaagttgggtaacgccagggttttcccagtcacgacgttgtaaaacgacggccagtgaattgtaatacgactcactatagggc

SEQ ID NO: 979 - DNA, 640 bp, Homo sapiens; identical to SEQ ID NO: 976

SEQ ID NO: 980 - DNA, 513 bp, Homo sapiens
gagtgttgttccagtttggaacaagagtccactattaaagaacgtggactccaacgtcaaagggcgaaaaaccgtctatcagggcgatggcccactacgtgaaccatcaccctaatcaagttttttggggtcgaggtgccgtaaagcactaaatcggaaccctaaagggagcccccgatttagagcttgacggggaaagccggcgaacgtggcgagaaaggaagggaagaaagcgaaaggagcgggcgctagggcgctggcaagtgtagcggtcacgctgcgcgtaaccaccacacccgccgcgcttaatgcgccgctacagggcgcgtccattcgccattcaggctgcgcaactgttgggaagggcgatcggtgcgggcctcttcgctattacgccagctggcgaaagggggatgtgctgcaaggcgattaagttgggtaacgccagggttttcccagtcacgacgttgtaaaacgacggccagtgaattgtaatacgactcactatagggc

SEQ ID NO: 981 - DNA, 612 bp, Homo sapiens
ttcgcgttaaatttttgttacaatcagctcattgtttaaccaataggccgaaatcggcaaaatcccttataaatcaaaagaatagaccgagatagggttgagtgttgttccagtttggaacaagagtccactattaaagaacgtggactccaacgtcaaagggcgaaaaaccgtctatcagggcgatggcccactacgtgaaccatcaccctaatcaagttttttggggtcgaggtgccgtaaagcactaaatcggaaccctaaagggagcccccgatttagagcttgacggggaaagccggcgaacgtggcgagaaaggaagggaagaaagcgaaaggagcgggcgctagggcgctggcaagtgtagcggtcacgctgcgcgtaaccaccacacccgccgcgcttaatgcgccgctacagggcgcgtccattcgccattcaggctgcgcaactgttgggaagggcgatcggtgcgggcctcttcgctattacgccagctggcgaaagggggatgtgctgcaaggcgattaagttgggtaacgccagggttttcccagtcacgacgttgtaaaacgacggccagtgaattgtaatacgactcactatagggc

SEQ ID NO: 982 - DNA, 462 bp, Homo sapiens
caacgtcaaagggcgaaaaaccgtctatcagggcgatggcccactacgtgaaccatcaccctaatcaagttttttggggtcgaggtgccgtaaagcactaaatcggaaccctaaagggagcccccgatttagagcttgacggggaaagccggcgaacgtggcgagaaaggaagggaagaaagcgaaaggagcgggcgctagggcgctggcaagtgtagcggtcacgctgcgcgtaaccaccacacccgccgcgcttaatgcgccgctacagggcgcgtccattcgccattcaggctgcgcaactgttgggaagggcgatcggtgcgggcctcttcgmtattacgccagctggcgaaagggggatgtgctgcaaggcgattaagttgggtaacgccagggttttcccagtcacgacgttgtaaaacgacggccagtgaattgtaatacgactcactatagggc

SEQ ID NO: 983 - DNA, 640 bp, Homo sapiens; identical to SEQ ID NO: 976

SEQ ID NO: 984 - DNA, 640 bp, Homo sapiens; identical to SEQ ID NO: 976

SEQ ID NO: 985 - DNA, 654 bp, Homo sapiens
aataccgcatcaggaaattgtaagcgttaatattttgttaaaattcgcgttaaatttttgttaaatcagctcattttttaaccaataggccgaaatcggcaaaatcccttataaatcaaaagaatagaccgagatagggttgagtgttgttccagtttggaacaagagtccactattaaagaacgtggactccaacgtcaaagggcgaaaaaccgtctatcagggcgatggcccactacgtgaaccatcaccctaatcaagttttttggggtcgaggtgccgtaaagcactaaatcggaaccctaaagggagcccccgatttagagcttgacggggaaagccggcgaacgtggcgagaaaggaagggaagaaagcgaaaggagcgggcgctagggcgctggcaagtgtagcggtcacgctgcgcgtaaccaccacacccgccgcgcttaatgcgccgctacagggcgcgtccattcgccattcaggctgcgcaactgttgggaagggcgatcggtgcgggcctcttcgctattacgccagctggcgaaagggggatgtgctgcaaggcgattaagttgggtaacgccagggttttcccagtcacgacgttgtaaaacgacggccagtgaattgtaatacgactcactatagggc

SEQ ID NO: 986 - DNA, 414 bp, Homo sapiens
tgaaccatcaccctaatcaagttttttggggtggaggtgccgtaaagcactaaatcggaaccctaaagggagcccccgatttagagcttgacggggaaagccggcgaacgtggcgagaaaggaagggaagaaagcgaaaggagcgggcgctagggcgctggcaagtgtagcggtcacgctgcgggtaaccaccaccaccgccgcgcttaatgcgccgctacagggcgcgtccattcgccattcaggctgcgcaactgttgggaagggcgatcggtgcgggcctyttcgctattacgccagctggcgaaagggggatgtgctgcaaggcgattaagttgggtaacgccagggttttcccagtcacgacgttgtaaaacgacggccagtgaattgtaatacgactcactatagggc

SEQ ID NO: 987 - DNA, 647 bp, Homo sapiens
  misc_feature (29)..(29): n equals a,t,g, or c
cgcatcaggaaatgtaagcgttaatattntgtaaaattcgcgttaaatttttgttaaatcagctcattttttaaccaataggccgaaatcggcaaaatcccttataaatcaaaagaatagaccgagatagggttgagtgttgttccagtttggaacaagagtccactattaaagaacgtggactccaacgtcaaagggcgaaaaaccgtctatcagggcgatggcccactacgtgaaccatcaccctaatcaagttttttggggtcgaggtgccgtaaagcactaaatcggaaccctaaagggagcccccgatttagagcttgacggggaaagccggcgaacgtggcgagaaaggaagggaagaaagcgaaaggagcgggcgctagggcgctggcaagtgtagcggtcacgctgcgcgtaaccaccacacccgccgcgcttaatgcgccgctacagggcgcgtccattcgccattcaggctgcgcaactgttgggaagggcgatcggtgcgggcctcttcgctattacgccagctggcgaaagggggatgtgctgcaaggcgattaagttgggtaacgccagggttttcccagtcacgacgttgtaaaacgacggccagtgaattgtaatacgactcactatagggc

SEQ ID NO: 988 - DNA, 640 bp, Homo sapiens
aaattgtaagcgttaatattttgttaaaattcgcgttaaatttttgttaaatcagctcattttttaaccaataggccgaaatcggcaaaatccsttataaatcaaaagaatagaccgagatagggttgagtgttgttccagtttggaacaagagtccactattaaagaacgtggactccaacgtcaaagggcgaaaaaccgtctatcagggcgatggcccactacgtgaaccatcaccctaatcaagttttttggggtcgaggtgccgtaaagcactaaatcggaaccctaaagggagcccccgatttagagcttgacggggaaagccggcgaacgtggcgagaaagsaagggaagaaagcgaaaggagcgggcgctagggcgctggcaagtgtagcggtcacgctgcgcgtaaccaccacacccgccgcgcttaatgcgccgytacagggcgcgtccattcgccattcaggctgcgcaactgttgggaagggcgatcggtgcgggcctcttcgctattacgccagctggcgaaagggggatgtgctgcaaggcgattaagttgggtaacgccagggttttcccagtcacgacgttgtaaaacgacggccagtgaattgtaatacgactcactatagggc

SEQ ID NO: 989 - DNA, 640 bp, Homo sapiens
aaattgtaagcgttaatattttgttaagattcgcgttaaatttttgttaaatcagctcattttttaaccaataggccgaaatcggcaaaatcccttataaatcaaaagaatagaccgagatagggttgagtgttgttccagtttggaacaagagtccactattaaagaacgtggactccaacgtcaaagggcgaaaaaccgtctatcagggcgatggcccactacgtgaaccatcaccctaatcaagttttttggggtcgaggtgccgtaaagcactaaatcggaaccctaaagggagcccccgatttagagcttgacggggaaagccggcgaacgtggcgagaaaggaagggaagaaagcgaaaggagcgggcgctagggcgctggcaagtgtagcggtcacgctgcgcgtaaccaccacacccgccgcgcttaatgcgccgctacagggcgcgtccattcgccattcaggctgcgcaactgttgggaagggcgatcggtgcgggcctcttcgctattacgccagctggcgaaagggggatgtgctgcaaggcgattaagttgggtaacgccagggttttcccagtcacgacgttgtaaaacgacggccagtgaattgtaatacgactcactatagggc

SEQ ID NO: 990 - DNA, 571 bp, Homo sapiens
aataggccgaaatcggcaaaatcccttataaatcaaaagaatagaccgagatagggttgagtgttgttccagtttggaacaagagtccactattaaagaacgtggactccaacgtcaaagggcgaaaaaccgtctatcagggcgatggcccactacgtgaaccatcaccctaatcaagttttttggggtcgaggtgccgtaaagcactaaatcggaaccctaaagggagcccccgatttagagcttgacggggaaagccggcgaacgtggcgagaaaggaagggaagaaagcgaaaggagcgggcgctagggcgctggcaagtgtagcggtcacgctgcgcgtaaccaccacacccgccgcgcttaatgcgccgctacagggcgcgtccattcgccattcaggctgcgcaactgttgggaagggcgatcggtgcgggcctcttcgctattacgccagctggcgaaagggggatgtgctgcaaggcgattaagttgggtaacgccagggttttcccagtcacgacgttgtaaaacgacggccagtgaattgtaatacgactcactatagggc

SEQ ID NO: 991 - DNA, 640 bp, Homo sapiens; identical to SEQ ID NO: 976

SEQ ID NO: 992 - DNA, 639 bp, Homo sapiens
  misc_feature (88)..(88): n equals a,t,g, or c
aattgtaagcgttaatattttgttaaaattcgcgttaaatttttgttaaatcagctcattttttaaccaataggccgaaatcggcaanatcccttataaatcaaaagaatagaccgagatagggttgagtgttgttccagtttggaacaagagtccactattaaagaacgtggactccaacgtcaaagggcgaaaaaccgtctatcagggcgatggcccactacgtgaaccatcaccctaatcaagttttttggggtcgaggtgccgtaaagcactaaatcggaaccctaaagggagcccccgatttagagcttgacggggaaagccggcgaacgtggcgagaaaggaagggaagaaagcgaaaggagcgggcgctagggcgctggcaagtgtagcggtcacgctgcgcgtaaccaccacacccgccgcgcttaatgcgccgctacagggcgcgtccattcgccattcaggctgcgcaactgttgggaagggcgatcggtgcgggcctcttcgctattacgccagctggcgaaagggggatgtgctgcaaggcgattaagttgggtaacgccagggttttcccagtcacgacgttgtaaaacgacggccagtgaattgtaatacgactcactatagggc

SEQ ID NO: 993 - DNA, 397 bp, Homo sapiens
atcaagttttttggggtcgaggtgccgtgaagcattaaatcggaaccctaaagggagcccccgatttagagcttgacggggaaagccggcgaacgtggcgagaaaggaagggaagaaagcgaaaggagcggacgttagggcgctggcaagtgtagcggtccgtgcgcgtaaccaccacacacgctgcgcttaatgcgccgctacagggcgcgtccattcgccattcgaggtgcgcaactgttgggaagggcgatcggtgcgggcctcttcgctattacgccagctggcgaaagggggatgtgctgcaaggcgattaagttgggtaacgccagggttttcccagtcacgacgttgtaaaacgacggccagtgaattgtaatacgactcactatagggc

SEQ ID NO: 994 - DNA, 648 bp, Homo sapiens
gcatcaggmaattgtaagcgttaatattttgttaaaattcgcgttaaatttttgttaaatcagctcattttttaaccaataggccgaaatcggcaaaatcccttataaatcaaaagaatagaccgagatagggttgagtgttgttccagtttggaacaagagtccactattaaagaacgtggactccaacgtcaaagggcgaaaaaccgtctatcagggcgatggcccactacgtgaaccatcaccctaatcaagttttttggggtcgaggtgccgtaaagcactaaatcggaaccctaaagggagcccccgatttagagcttgacggggaaagccggcgaacgtggcgagaaaggaagggaagaaagcgaaaggagcgggcgctagggcgctggcaagtgtagcggtcacgctgcgcgtaaccaccacacccgccgcgcttaatgcgccgctacagggcgcgtccattcgccattcaggctgcgcaactgttgggaagggcgatcggtgcgggcctcttcgctattacgccagctggcgaaagggggatgtgctgcaaggcgattaagttgggtaacgccagggttttcccagtcacgacgttgtaaaacgacggccagtgaattgtaatacgactcactatagggc

SEQ ID NO: 995 - DNA, 434 bp, Homo sapiens
gggcgatggccccactaccgtgaaccatcaccctaatcaagttttttggggtcgaggtgccgtaaagcactaaatcggaaccctaaagggagcccccgatttagagcttgacggggaaagccggcgaacgtggcgagaaaggaagggaagaaagcgaaaggagcgggcgctagggcgctggcaagtgtagcggtcacgctgcgcgtaaccaccacacccgccgcgcttaatgcgccgctacagggcgcgtccattcgccattcaggctgcgcaactgttgggaagggcgatcggtgcgggcctcttcgctattacgccagctggcgaaagggggatgtgctgcaaggcgattaagttgggtaacgccagggttttcccagtcacgacgttgtaaaacgacggccagtgaattgtaatacgactcactatagggc

SEQ ID NO: 996 - DNA, 624 bp, Homo sapiens
tattttgttaaaattcgcgttaaatttttgttaaaccagctcattttttaaccaataggcggaaatcggcaaaatcccttataaatcaaaagaatagaccgagatagggttkagtgttgttccagtttggaacaagagtccactattaaagaacgtggactccaacgtcaaagggcgaaaaaccgtctatcagggcgatggcccactacgtgaaccatcaccctaatcaagttttttggggtcgaggtgccgtaaagcactaaatcggaaccctaaagggagcccccgatttagagcttgacggggaaagccggcgaacgtggcgagaaaggaagggaagaaagcgaaaggagcgggcgctagggcgctggcaagtgtagcggtcacgctgcgcgtaaccaccacacccgccgcgcttaatgcgccgctacagggcgcgtccattcgccattcaggctgcgcaactgttgggaagggcgatcggtgcgggcctcttcgctattacgccagctggcgaaagggggatgtgctgcaaggcgattaagttgggtaacgccagggttttcccagtcacgacgttgtaaaacgacggccagtgaattgtaatacgactcactatagggc

SEQ ID NO: 997 - DNA, 509 bp, Homo sapiens
gttgttccagtttggaacaagagtccactattaaagaacgtggactccaacgtcaaagggcgaaaaaccgtctatcagggcgatggcccactacgtgaaccatcaccctaatcaagttttttggggtcgaggtgccgtaaagcactaaatcggaaccctaaagggagcccccgatttagagcttgacggggaaagccggcgaacgtggcgagaaaggaagggaagaaagcgaaaggagcgggcgctagggcgctggcaagtgtagcggtcacgctgcgcgtaaccaccacacccgccgcgcttaatgcgccgctacagggcgcgtccattcgccattcaggctgcgcaactgttgggaagggcgatcggtgcgggcctcttcgctattacgccagctggcgaaagggggatgtgctgcaaggcgattaagttgggtaacgccagggttttcccagtcacgacgttgtaaaacgacggccagtgaattgtaatacgactcactatagggc

SEQ ID NO: 998 - DNA, 654 bp, Homo sapiens
aaatacgcatcaggaaattgtaagcgttaatattttgttaaaattcgcgttaaatttttgttaaatcagctcattttttaaccaataggccgaaatcggcaaaatcccttataaatcaaaagaatagaccgagatagggttgagtgttgttccagtttggaacaagagtccactattaaagaacgtggactccaacgtcaaagggcgaaaaaccgtctatcagggcgatggcccactacgtgaaccatcaccctaatcaagttttttggggtcgaggtgccgtaaagcactaaatcggaaccctaaagggagcccccgatttagagcttgacggggaaagccggcgaacgtggcgagaaaggaagggaagaaagcgaaaggagcgggcgctagggcgctggcaagtgtagcggtcacgctgcgcgtaaccaccacacccgccgcgcttaatgcgccgctacagggcgcgtccattcgccattcaggctgcgcaactgttgggaagggcgatcggtgcgggcctcttcgctattacgccagctggcgaaagggggatgtgctgcaaggcgattaagttgggtaacgccagggttttcccagtcacgacgttgtaaaacgacggccagtgaattgtaatacgactcactatagggc

SEQ ID NO: 999 - DNA, 546 bp, Homo sapiens
  misc_feature (20)..(20): n equals a,t,g, or c
ttataaatcaaaagaatagnccgagatagggttgagtgttgttccagtttggaacaagagtccactattaaagaacgtggactccaacgtcaaagggcgaaaaaccgtctatcagggcgatggcccactacgtgaaccatcaccctaatcaagttttttggggtcgaggtgccgtaaagcactaaatcggaaccctaaagggagcccccgatttagagcttgacggggaaagccggcgaacgtggcgagaaaggaagggaagaaagcgaaaggagcgggcgctagggcgctggcaagtgtagcggtcacgctgcgcgtaaccaccacacccgccgcgcttaatgcgccgctacagggcgcgtccattcgccattcaggctgcgcaactgttgggaagggcgatcggtgcgggcctcttcgctattacgccagctggcgaaagggggatgtgctgcaaggcgattaagttgggtaacgccagggttttcccagtcacgacgttgtaaaacgacggccagtgaattgtaatacgactcactatagggc

SEQ ID NO: 1000 - DNA, 654 bp, Homo sapiens; identical to SEQ ID NO: 985

SEQ ID NO: 1001 - DNA, 32681 bp, Homo sapiens
aatccgtctgaacttcagttgccttacctgtaaggtaggaatgtttttcagagttcttatgagcatcaactataataatgatatagaagtgagcaatcaactataaagaggctacctgggctgggcacagtggctcacgcctgtaatcccagcactttgagaggccgaggcagatggatcacctgaggtcaggagttcaagaccagcctggccaacatggtgaaaccccgtctctactaaaaatacaaaaattagctgggcgtggtggtgagtatctgtaattccagctactcaggaagctgaggcaggagaatcgcttgaacccaggagacagaggttgaagtgagctgaaatcatgccattgcacttcagcctaggcgacaagagcaagactccatcttttaaaaaaaatttaaaaaaataaaaataaagaggctacctgtacgttactactagatatatgattactatgaagttaccatataaccgatctgtttcaaacaaatcagacttatctagtgggtaagagcaaacccatgggttttgctctcattaattcagccattgttaattaagtgcttacccagtaccatcatcatatgctagtgatgctgctgtctgctcagacctccgttttagagttcctgcagagcttgggggcagctgtggtcttaggcgtattagttgcaatgagtagaaacatagactagcttaatttataggagttttattggcaggatacagtggactttcaggtaccccgagcataggaagtaatagccacataatctggaaagttagcaggtaatggcttttccatctctttctgatttctggcctcagttcatttagatatttatggattcctcctgcagaatcacttcctctgaaaggctcttggttttttattctccatatctttggctcgtacggatctttggcttgccatggtattcgctctgaagcttactatgatcttacttctccagggtcattatcacccagttcccttagtctgtgtcttttatttgtttgtatgtatgtatgtgtgtatttatttatgatggagtctcattccgtcgcccaggctggagcgtaatggtgcaatctgtgctcactgaaacctccgcctcctgggttcaagctgtcctccctgcctcagtctcccgagtagttgggattacaggcgcccaccatcatgcctggctactttttgtatttttactagagacggggttttgccatgttggccagggtggtctcaaactcctgacctcaggcgatccacccaccttggcctcccaaagtgctgcgattatagacatgagccaccacgcccagccagtctctgtcttttaaattcaagagaaagaactggaatagttcagctaaagttgggtattcactttagtcccatcagctatggcagggttgtggagagtgtcattcagttcagagaggctgcctgggctttgtgggaaggacagagtcactgagaatgggggcttattaatatctttcaaatagtttggtggttgcaaatctccatgctttaaaatgtatacgaatttttgaacagccgagaatcattcagggctaactttaataaagagagagtcaatctaggatatgtcatatggggtcaagagaaaataatagctataacctaatgagctttagcttaatctccaaagacggcgttcagaaaggagttaaaaatcatggggtttgtttcttagcagcaccatcgaaattaaggaagggtgtaacttcatttggtaaggactttaaaatgggcatcctcacttggattttttaaattccacttaagaatcatggacttttagacttagaaggcacctgagacatgctttagttctacactcacatctttcaatagaagaaaactgagatttggttaaagggccatgtatacattgtgaaagacctaggattgggtcctgaggcctttggttctaaatccagtcacttgtttcagcagggacaattatcccagcccagtgttctttctgttgtaccttctgtgcctgcttattttaaaaataagaagaagccaaactaaacaaatgatctaaaaagtcatatcgtatagttccatttatatgaagtacaaaaccaggcaaaactcatggatgatgataagtcagaaattcccctttaaaggactggaaggattgacgggaagaggaagtatgaagtaattttctagggtgatgaaaatgttcagtgtctcgttttgagtgctggttacagggagatgcatgtgtatatttatatgatgtatatttatatatacaaacatatgtacccttaagccctctgcattttattgtatgtaaattatatctcagtttttaaaattgacctcacaaccgtgcagtcctgtctactaattgcagcagctttgccgataaggataaggatgcatctctaagcatccagagattgatggcgccacccctagaacaagaactccctgtcttgctgtaactggagcagagcattttccccagaaattatgcagatagggccagtttcttttctgaggtttgtcgtgtgtctaggcacataaaaattacatgtgaaaaattctgccatgagctgcagaagttatggaagccttgggggccataaggccaacccacttcaatccctttaggctgcgtttaattgcagtggacagaagttgaggctggctcaaaggaaaaggggaaagcattggccgaagccagtccaagttctgtcaaccgttatgacttactagctgggtgaccttgggcacttaacaaaacactgagctttagttgtgccatcttcaaatggaggtgataatcctgttctgcctaattcgtggggctgctgggaggacacaataaaataagtgaaagcacttggaaaactagttcctttacattgtcatgttctggaaatgctggctttttatgacagtagacttctgaagcatcccattctgactaggaaatggtcatgaaagcatccctctttctgaggccgatgggcttgtgggggacaggacttttactccttttcatctaagaggtttatacttaccaggctgtgagaactgacatctgtgtttgggctgaaaaattgatagcatacatgcataatagcctcgcgacagctatgctttgtacgccaggagaggcaggtggtccccattagcgaggcatgaattgtgggtgaatggctaaacctggaggatgcagaaaggtctttttcattaagagaggggcctctcctgaacttgtaggcaaggagtgtaaatatacattgaaataatccatcagccaagtgacttcccttcgtcagaccttggagagagaatgctttagttactgcttggaataccagtaagctatcagagttgcctaggataccagtcacatgggcccatcttccagacttgctcaggatgatttattttcctttattttggagagaagtgggggagggggtcagaggtacttgcaaagccttgtccttataagaggggcccttgtgtgaggatatccttacctctctccacttgagttgtcagccgcccttgcccttggcagtagggacgaaaatagcatttcctgtcccagttatcttccccattttctgatgtcgtcccacacagaggaggctttgcattgtgtcctttgaggggaaaggggtggcatcgatgagtggggaggaagcaagagagcatgtagctgggccctgctgatgctgggatcttcctaggatgactgcagaaagaagtagcctggctcctccagctaaccactcaaccaagaaaaggctgtctattcttatctgtctcggagcatatgcttctctcctcccaaggtctcaagacaggaatttgcagtaaatacattcctctaccactgagtcttcttgactcttaaactgaagtgccacattggcatatcttgctactggctgatctatggatgatagatagtttgtcccatttcttcttgctgatttaatctcaagagacaaaatcctaagcagaagttgtggtatgatctagaaaaattcaaaccaggtagtttcatgtgttactttatgcagtgtctgtcttcaaactcttcaaaacatgtaacaagagtgaaaaatgaagaaatactctttttccacctttctgattctttctccccaggcagccgtgtctgtgtttttgtctcgcagaattagagcccattgggaacgatgccaccaccgtcagacattgtcaaagtggccattgagtggccaggtgctaacgcccagctccttgaaatcgaccaggtatgctcctgaagtgagaagcagtggttcaaggaaaggcacctggggagtgcatggcagaggacatcttgagggatggggaccaccggcatcaagagtaagaacgagcaacaggaaggctaagctttgggcctggcccaccctagggaaggtcggtcaccatggcttgggagaggcttcctcttcaacaaaagctgttaggaaagaagttcattctcatgccccagcttgaccctgcttggcaggcctcttgtcagaaccttggcatgagtaggatgttgctgctgttgaaggctttctctctctctctttcagaaacggcccctggcatccattatcaaggaagtttgtgatgggtaggttgaaatggacctcgttttcaacagtggcagctccgactgaaagagcactcctacaccttgaggggagttctgggaaggatctccagttaggcaggtcctcagcatgggggtcttgggaatcattgtcttgggaaggaagtacagttgacaaccatacccctaagacgtttatacttcttaattttttccttaaagtctagcattgccctattgaggtaggatctgagacccctcctcagttctgcacacctcctattgtggtgctcatctttacaaaaggctgaggccatgattttttcaacatgacaacctaaagctttgtttccactgtattccaaataggccacccaatcccttgagcaactcttttgaaaattacttatgagcagcttctgaacaagagagtggccaagtgggatatactgtttttctcttgcataggtggtcgttgccaaacccagagtattataccctccgttatgcagatggtcctcagctgtacatcaccgaacaggttagtacagggagaggcaaaatcaatatgggccttgcttggaattaaacgacccaaggagacggcactatttatcttcactcagcatccaggtagcttccatgtgttgggtaaagagtcactctccggacagactgggaaacaccagcccttgttcttccctagtggctagaaaaaggtggcttttacttcctgagtgcccagggtgctagaggaggatcttagaaattctttgccaaggaataagcaggagaagagggcccgactgaagatcctcagttacatctactgtaaaaaagacaaaacattattgttgattcaacttgcttgtaccactttaacattttatcttagttactttttttgtttatttttcactacccagactcgcagtgacattaagaatgggacaatcttacaactggctatctccccggtaggtattctttcttccttaggagtttattcatgtcacaaacaaatatgagcacctaccatgggccagactctgttctagaaataagtactctggagataagaaagtcagtctttttgtatcaggaaatagtacaggaaaataagtctgtcttggttctcaccacctagtggggagtaaacaaatgcaatagaaggcctgtctcaagggtcttgagagaaagttgcttagggagctgtgggaactcacaaaggggaccacctaactcagcctggagatttccagaaagtcttgccagagaaggcgtcacttagctcagatgttaaaggatgagcaagaattagctagagaaataagaaaaggaaaagtattccagtcagagaaatcagcatatgccaaggcacagaggtatgctgtgtttgggaaaagcaggagtgctgggtggctggaggcttgtagcagtcattgagaagccagatattcaaggttccttgatggcctactcgtaggtttcaactctgtccagaaggaaactggggacattgaagaattttaagcaggaagatatgttatgtttagattttaagttttagaaagatcactttagtgaccatgtggaagatgggccttaagaagaaggttggtggtagtaggaacctttgaagaggctaataaggaatgttaacagcccagtgaaggcaagtggtaatggagatgaaaggatggatatgaagagtatctaggaggtaagctttatgagtatggtgatatgctagatgtggaaggaaaggggagaatggaggatgaccctgatttgtgcaagagcagcccttaaaggtcactaaggaagcaaccagaagggtagaaagaacaccaagaaggtgaagtgactgaggagctttgggcagggagagtgtcaggactgaggagagtatggtctgcaatttttaataagcagagagatttagtaaactgagagcagaaaagctgtctaatgacttgggaggttagaggacactggtgatactcacaaaaaagttatggtggggaggccaggtggccacactgaagtggtcaagtaaaagaaaggtaaaacagtgaggactttgagtctactgctgtatcaagaagcttggttttaaaagaaaacacagagaaggtgataatgcgaaggggacgtggagtcaaaaagatgtgctttttaaaagcaggtaaagcattcatgtgtttcacaaatcaaaaattttcacagagatgtagcaaaaggtctccccgcaactcctgtccccatctgcccagttccccacctttctgacccttcgtgttggttgtttctgttgcaattttttatgtgcccttaagaatgtgttcagatggaagagaggaaggttgaaggtgcaggaaagcaggtaatcaatagaacaggaccttactggaccaggagaggaaggactcaaagcccaggtagagggaatcactttgactgctaggcccatgaagaagacagccaatatggttgcacctttggttacatttgtagaagggcagccagaaaattaagggcatgatggcacttcttttcttggtgcagagagagactggttcatctgagaggaggggaggtatgaagtgatatcagccagcgtttactgaatgcctatattttgctaaatactttgtgtaattaaatcatctaatctttacagacatcccatgagataggtactcttgatagccccattctgtaggcaaggaaactgagggttagagaggttaaattacttgccacttgtcacacagctaataaagtagccaagcccgctctcagacccaggtctgtctgactctaggcccatattcctcccatcatgttcttctgcctccccctcttctcctgaactcttctcatcttaaggacttcattcttccctcctaagctctggtaatttaatatgacagtctgggagttactcacttttatggaagtgccgacacatttcacagacctcttgcacagtgtagttgactttcccagaagcacatctctctggagcgggaggcagcagcccagaaatgctgtctcaggaggaaaattgacatttggagttggaggtttctaagtgggatgcagaccagtgctcttcagattgttctatgctatgaccttttcccgtggcgcacattttctccactgtagagatagcgagggcttctgtattgcagagagcactgtgctttgaagggccagctttgtaatagtaaaagaggagaggcaaaggggagagggccagcaggcctgactccttggcggcagcaggaattgggctccagtcacttgcttaacactgagaaaaaggaaagaagacaggtgtgtttttgttcttaagtctcttgctttctagtggagaacattaaattaacacccaaaaaacagagaatgatgaaacaataaattgtgaggcactatgtagtaatgagctcagcggaaggaaagcccagtgaatactagaggagggattttagccgcagcttgcagaaaaggaggcaggcatcctgctaggaaaagttcatgtgctaggaggaggttttgtcttcaccagccttcattttcaaaaaacaattgggaaattgtttctggctccttgatgttcttaaagtttccccagaactgtcactttgaggaacaatcatatggattctaagagaaagtttttaaaaaattgccaggcttttcacattttaggattaaaagggaccttagaggacatcagattaaattcttcacccaatgcaagaatcccttctacagcgtctttgacaggtggttgtccagattctccttgattgcttctgctgacagggagcttaatacctcaagagaaacctcttctgctgtctaacagttttataaattttattttattttattttattttttttgagatggagtctcactctgttgcccaggctggagtgcagtggcatgatcttggctcactgcagcctccacctcctgggttcaagcaattttcctgcctcagcctcctgagtagctgggattacaggcgcatgccaccatgcccagctaatttttgtgtttttagtagagacggggtttcatcatgttggtcaggttggtctcgaactcctgacctcgtgatctgcccgccttggcctcccaaagtgctgggattacaggtgtaagccactgtacctgaccaattttattttcttttttatttttgagagagagtcttgctctgttacccgggctgcagtgcagtggtgcagtcctagctcactgcaaccttgaattcctgggctcaagcagtcttcccacctcagcctcctgagtagctaggactacaggtgtgcaccaccacacctggctcattttaaaaaattttttgggagtcagggtgtcactctgttggccaggctggtgtctaactcctggcttcaagcaatcctgccttggcctttcaaagccttgggattacatgcatgagccacgcacccagcaagacagcttaaatagaaaaccttcctctattaaaccagtatctgtttctctgtgacttaccatcgttagtgggcctcccagatgcctccagtattcccttggtaggaattttttaaatccataggccaaagcggtacagaaaagatgcagataactacagattggttttggcatactaataactccctgattgattccacaaacatttatttagcaactcctaagctgtgtgaaaaaactagttctgcctcaggtttggatgtccacagaagggcctctgtgagctatccacagagtagtaacctgctccaaggagcagatggcacatatcttgtccctggcctcctagtcccgggctgcacgccagctgatggagaggacccagtcatccaacatggagacccggctggatgccatgaaggagctggccaagctctctgccgacgtgactttcgctactgagttcatcaacatggatggcatcattgtgctgacaaggctcgtggaaagtggaaccaagctcttgtcccagtgagtatgactaaggtctcgttccaaggacttcgacgatttactacatcccacagggcatcctagtctcatttcccttgagtcaaataaggagtttattgaataccacctgtgtgcagagcagtgtgccaagcactagagtccataccaagatatataattccatattgtgattctaaatcgtgtagtctatttgggctctcacaaattaaataacagtacaaaacagtactgtgccaagtgagcagtgaaaataggggctagagaagtcaggaggagagcagtcacgtcgtgacagacctgttaattgctggaaatgtttggtttgatgagggttagtgagcagatggtccagtatctcccaggtgtctgtttgtaatcatcccctgctcctccctcttcagtcacctcccagcccatacacacacacacacacacacacacacgccttcctttgtgtttaccacaggtgtcaacctacccattcaccatctccctgccacacttttgcacagggaggaggagaccagaactttgtgatacccacaagcatcttcatcataccccagagttcacatgcatgcggtgggcagctgtgccttgtgagcagcagtcagtaaacaggtgcttggagcctaacctgccaaagagggagtcagaaatcttctcagcccatagatcaactattgaaattgttagccaaatcgagtaactaatcatagatatttgttttacatattggatcttccagctgtattgaagtcctgaagccttcagctgccatcagcactgacatagttctacagtctcccaagggtacagggttagactggccttagtttcactctcttcagcctgaggataataatagctaccttgcagtattattgtgagaagtattgttaatgagaatgtgtctgaacatgctttgtaaataggaatatcatctgttaattctagagcactgtacagatgtataaaggattaaatgtataaggagaagagaaaaaagagaaaacattttaatccttattctctaccagcactagaataagagctttgcatacatcatcatcttgtcgtctccacaaccctgtgaggttaacgctgtgagactaacttgattttacagaggaagaaattgaattttgaaaagataaaatttgcttggttagtaaggtggacaggaactgaacccatctcttgcactctactgcctcttggcccaaaggttaacatggcacttacacttccttaggttctcccaacaggtgttggagtttgacaaaggtccaatgtcttctttggtcttgggaaatagataagtgattctgtgtccctgggatgaagcatatggagaaggaagatctaattacccagcaacatttttttttttttttttttttgcagcgatagatacctgggctgaatctgctctacactggctaggtgtgcacacaggcacttacagttacagttgcatcgactgatttcccatggggtgttcacattaaaattcatcttttttgtggctgccctcacacctgtgtttcccgatctgaatctttgtctattttgtgtgtgtgttgcacgtgtctcagctacagtgagatgctggcattcaccctgactgccttcctagagctcatggaccatggcattgtctcctgggacatggtttcaatcacctttattaagcaggtgaggcctccaacattctgtctttctctcctccctcagctgccagttcacaaggcttaaggggagatacaggcaatatcgccattctggtgagatcagctttatattccctggggccagatttttcatcctcaagctctagtcttctgtggcttctgaaagatttgcattttgttatattctcagggcctgcactgagatggaactggaccgtcagaactaaatatgatcaaagtagaattagattgtcagtgagactggggataaagccagccagtcaaccagtactagccctgagtcttttgaccgacttcctgagctctctcttctttttgtatatatataaaaaaaatttgcatttcatttgtaaatttgccttctatttacaaatctgcaaggtagcctgtttggattgtcagactaagttcagtgggtaggagagggtacttctggttttaccctcctttcttttacacaaaggagcagtgtcaattcagaatactgaactaaaaccaatgaataatattgtatctgctgccctagaacttcagctatcattggcttaggacattgggactccccgacactggacacaagtgaaatgaccatgtgtcaaggatattataatggggactgagaagaaggattagagtaaaaggcttcaaggtcctttctacctctcaaagtctaagtgtgtttagggggagtgtgtgtcaggggaggtacatggagataaaatgagatcccagtatcagtaaaatcctctgcttttttataccccactttctcaaactggaacccttattttgataaaaagaattaagcttttagattttgaggaaacacaattaagtggatactataatctgagattaaggtatccatgccaagggaatccctggcacattggccagggtagccgtaaaccagataccactatccacctagcaacagctgcccaaatgtgaagcagagagagcttcaagggctagcatcagatgctaagcttctatctttcttgggccctgagcttctcaattgatgtgccatctctgggtctagattgcagggtatgtgagccagcccatggtggacgtgtcaatccttcagaggtccctggccatcctggagagcatggtcttgaacagccagagtctgtaccagaagatagccgaggaaatcaccgtgggacagctcatctcacacctccaggtgtgagtaaaaaaccctacacctccctcccttcacttgtctgtcctcttttctcctcttattttaagtcttccaatcctactctcctttgcttatattccaagctgttggttggcttcttcattcatcacctcttccacactcctgccagaatttctcccatcattcagacttgatcatgtcatgctcctgcccaaaatcctctgtaactctctctgccccttaggttaaaatgaagattttcccagtcttcccataccagggtggtaccaggcaaaattagatgctttctcacatgggcccagtagtctctgtacctatgataattatataaaatactggatttttattatctgttgcccattttgaacatagagcccccttgaaacagagaccaatcattgttgtatcccctgttttgatttaagtagaggctcaattagtgcttgttgaatgaatgctcactgaaccgacgatgcactgtgggtgatttgtaagaaatatcacacaggtgtgagtttggaatatcagttcaaatccaggctcttctgcatactaggtctctgccatcagcaagtaacctagtctcttctggcctcagtttcttcatctctagaataggttaatcaccttcacctctcacactgtgaggatcaaaggagattttaaaaaggtccagcatagaggccaacctgggttaggtattcagtaaattcaggggcttttttcctttgtttgtttgttaagactcttatcacatcctaaaacattttaccagatactgagaccatatgacaaatgaacccattggagcaatgtttctcccgtctccgctgtttttacctcacttccaaccaacctacaccatgtaaggaagctggactttgcaaaacagtggtggcactcctgttgattctcttctgactgttgttcacttctgttttttagacattgtcagaatgttgccagaatcccccaccagttcgaggggaagtcatagctcccagatttgggagtttatagtggccctgtcttcactcagctatgctcccaacttgtttttccccactaatccaagtaaaaagaaagcacaattatttctttgcaactctgatttctccttgtcacttttaaggaattttcagcctcagctttctttgcttttcttttttgagacagggtctcactctgccgtccaagctggagcgcagtggcatgatcataactcactgcaggctcaagcgatcctccccatctcagcctcccgagtagctggaatcacaggcacactccacaacacctggctagttttttttttttttttatttttgtagagacagggtctcgctgtgttgtccaggctggtctcaaactgttgggctcaagcagtcctcccaccccagcctcctgagtagctgggactacaggtgtgagtcaccatgcctggtctagcctcagctttcatacccagcgagccaccaaggttgattaaggtgagagggacattataaactccagatagagaattctgattttcctgtaacctcacatctacttctctggtttttttttttgtctctgaattcagagtggccccagttgcctccctagggatgataggggaacatggcatttcataggagccaatactttcagcccacagctgtcaccagaacttatatgctttcctttttgggctgagggatacttagtgccctctgttagactccctgggtaccatgtgactaaccaggaagcccatcagaccctctggaaagacagccacagaatgcacccaagacatggcaggtggagatgtcaagtaccaggattgtaagattccagagaatgattgtagttattttgtttgttcataataaaataagtttatagtcaaagactttaaaaatacagaaaaacgcaaaattatttgcccattatctcacctccagacatacccactgttaaacattaaattgaatgtcccttcagtatttttatgcatatttttaacaaaatcgggatctcattatatatactatgtgtaccttgattttttttaactgaataatacaccttgaacatttctccatgtcaaagatttttctaaaagggtagttctaagtcttttttgcaacctagacacctttgaaaatctggtaacaagtatatactctcaccagtttggaaaaaataccacttagttggcaaactacatagaataatttctgtatcattcctggggttcacaaatactctaagctcatccctgaatcccaggttaagaatctttaccctaaaacatgacttttaataactacttaagattctcatatgtataaatgttggctaatgtgaccatttggattactttccattcttttttaagtagtactttaatgaaacgccttgtcagtaaatcttgcatagctctctgattactgtcttaggataaattcctattagtgaaattgctgggtcaagagcatgcccactttgaatgcttttgagactgagctccagatcattatttgcttataatctgtgagtgattgttttaaaccatttctaagcatcatcttgctgttcagtcttctaatctccctctctcttctttctccattgacacagctccaaccaggagattcagacctacgccattgcactgattaatgcactttttctgaaggctcctgaggacaaacgacaggtctgtggctgccttttcacatttttcatctgggctcttctgagataattctcaccccatgcactctttgctatgcagagagcacaaatccagcaattttcccaagagttcttcctcttagctgtctggtctggagcccaggagggtggctttgctaaggaagacccagggaagacctatgaggggaaaccagctgggtcttagatgagagcagggcccttcaaactttttcctctaaagggccagagaataaatatgtttgactttatgggccatatggtctatgtgatagctactcaaccttgccattgtagccaaaagcagcctcggccagtaggtaaatgaatgggtatggctgtcttccaataaaatcttatttacaaaaacaggcaacaggcctaatatggccatagtttgccaactcctgggttacagaatcaagaataaggaagaggagaccctgtggctaccctgagtccaaggagtccaatatgaatgggatttcacactaaatcttaggtttaaaggttctctgatggagattctaaacatcttccttcccctgttcattaactgtgacattatgcagatagctctgcctctgtgaaccttagtttcctcacctgtcacatgggagcaacaacatctgccttgtttacctcacaaggatgtctgaggaaaaacaagatccctgtttcacaaataaggaaactaagaatcagctgggtggtggaacaaacactgacctaagagccgaggggcctgggactaagtattctccctgctgctggctggacaagtgtttgtaacctctttttgggtctcagtttctctttctgtaaaatgaaagggccagtttaaatgatctctgacagcccttccaatactaacattctagatttctctgagaaaagcccaagtggtgttaaaagtaagacattttagttctctgacaatctcatgggctcagtaagatgaaattcaagtgggatcatgtatgtacccagctcttggtagattctagagggaagaccagaagcatctgtggttctgtctgtccttgtctttcttggatggcttggctctgttaatctgccttcccggtccttgtttgaatgtaagctgaaagctcattccgtctgcttctctctgtgcttttgctttctgccggcaggacaagcaccttaatcctctagacctgcctgtcactgtaagtagcactgccatgtggaaagggccccagctcttgcaggtggggaagtcaaagctaggcaagaatctcatggtctgatctagatgttcagggcatgccaagacccagggaaaggttgtgtgctgtgaatctcctttgtcaggacacttagggaagtactgcagattagagtcacagaaaggattaagggggtacctgccccagggagtgtggccccagccttcctttataacttgcctttgcatgggtctgtagttcaactagggcagaccagactcagaaacagctcgtaactttgatctagacaataccatggatgcgtcaccttcttacttgctttagtggaagagaaaaggtatccgtgccctttttggactcttactagaccgtgggaatccgaaaaggtttagacaatcgacaaaagggaatttggatgctcatttcttcattatagggagctttagagaggtcagctttgcgaggagatgaaaggggataagtgcctccccctgacaccacagagaagcttttggtctaagacctttatattctagctgcagaccactgtcaattacccaccttatgagttgtccacagcaagatttaatctcagtcgacctcctatagttaccagagaagtttctaggccactgtcctcctctgctagccagtatgtattcagagaatgcaaagtaaaatttaatgttcctggcagcattagccatttggaatatggctagaaatccagaagtgtgacagaggggcctttcagctctgagaaaaatgacacagagctcacagatactactccataggagaggtgtgacagctccctcaggcccactgatttaggattctctataaaattaaatgaaggcagcagtttagaaaatgaagtcatggtaattaacatcagtaagaagtgatggtcgacactggaaggaggagacaagaattatgaaaagctgtcagaaaaattaaaggcattgtaatctgggaccattttgtttatgggaaaatagcttcacatctcagtagctcctcagggtatcacagtgtcacaacacagaataatcactgatgttctttttgatgaagccgactccttagcagtgattaaattatcactgtagtcacttcagaaataaatgtatataatatgtctttaaaagatttgcataagaatggtcaaaataatgattctgagagaacccttaaagctttgctccctggaagattcatttatgtaggaaacttgatttcctgggtgggctaaataaataaagcataactatcaaagtctggatcaaatattataaaaaaggtgagcctgttataaaaaattacccaaaacaccagactcattgttctctaagccagttagaacggaatcctagactacttactgttgtagagcgtccagaccccagccgtctgctgtagggtgggagggggttgctggaccaaagcccttccttgtttggagtcagtgcttcactagagttccttctagccttagcagtggggtctacctggcacgatgcatgtggcttagaaaccatcacactgctctgtgtccatgtgcaatgtccttgtgacacaagcgtctcatcttcaagcagtcctcatctctctttgaagacagtggagttgattgtgccattaggaaaggaaatcctatttgaattaatttgcactcacaaaaatagggaatgttgcagagtgtaaaatacatctgatggtcagtggattttcgttcattcacccacttttcatttgggaggaaaaaaatttaagaaagcaaaaaaggcccagaattttgacatcaccttcctctcgatagtagtcacaggtgtgtgcctgccaccctgccttatatttgcttattttcctccacaggatatggcaaatgcatttgcacagaagcatctccggtctataatcctgaatgtgagttcctggaacatgctgtattttattactattaacaacaattattactgttattgttaatatattattattgaaattattaatgagtgaggaggacacacagaggaaccttatcaataggtaaatacctcttgaactgaatagctttttcccgcgatcctctgtgagcagagttgcctctaggcagccatctcaccagcaattgcagtgcgtccagggagggaccaaggccagctctactgtttgttgccctgcaactccagaatttttatccagagggaatatgttaaaataggcacaaagggggaaaataactcatccaactgacactgattaaaaatctgaattgtgtagggcactgacagaactaagtaagcaagtgtatttgctctcaaagaccttctggcctggtaggaaagactagtgatcatagtggggtgtgatctgggtttgtggtctaggaaaggatggaggaggaacagtgatttctgccttgaagaagagtgtttccggaaacttttagaggaatgtcttcaggtgacccttagaggatgagtaggcagaccgggaataacaggaatttcagtcagagggcagccagaacccagaaggagtgtgtgattaggcacagagcaaggagcaagtagatgaggaggctagagaggtagcgaggaccagatcaggaaaggttagtctcattcctaaggacagctgagggcatttaattgagcttgtgaagtaaccagatttgcattttagaaagagcacatgaaagacatgtgtttgctaaggggtacctgagggaggagagcagagcaggagctggcagggggatctggaaagaggtataaatccctgttaccacctgtggggtggagtagggctgatgttgggaggtggggccggtgggagtggaggaggagagccaaggatctgaattaaaaggaggcaactttggccggacgtggtggctcacacctgtaatcccagcattttgggaggctgaggcgggtggattgcctgaggtcaggagttcgagaccagcctgaccgacatggtgaaaccttgtctttactaaaaatacaaaaattagccgggcgtggtgataggcgcctgtaatcccagctactcaggaggctgaggcaggagaattgcttgaaacccgggaggtggaggttgcagtgagccgagaccaggccattgcgctctagcctggacaacaagagcgaaactctgtctcaaaaaaaaaggaggcaactttatcaactgtcagaaacaagggaaacctgggagaccacagtgaagggaataaaatgaaaaattagaagtcaagtttaagacttaagctaaacatggactttggagtctgccattttccaatctttgatcttgagcatttcacataacttctctggacttcagtttgctcatctggatatgaggactaagtgagctaatataatactgtgcttagcagggtgtctggcactcagtaagcactttgctcgtattggcagaacaggatgcagaggtgataggattgaagaagtaagctctgagcacttgtgaagctgagcagtcagctgctctaaaatgcagagtctgccagacttcaccttgcagaaccagcttctccctgctggctgcttccctggtcacacccagctaccagcctggcaggaggggccccaagcccacaagtgacaggagtacacaggttcccacacattcctgcctacactcctgagcagctgtcctggtcaccctcttctgcatgtgtggggatgagtgcgcccttctgaaggaaatttaattatgtttgagacttactatttaatcgggttagaagttcaactcatttctggacaaaccttgtgaacaagtaaagatttcactatagaaggcagttcagcatcaggactcaggacttaagtggcctggcaggaaatggctaatgcatggtcactgaagtccagggatttcactgagtcaagccagagaactaagaccctgagatacttgacagtcaagtgagacttcaggtaaaacctcaaactgtcactcatcagactggagctgtacttctttaagccattgatgctaggataattaattaccttcctgccctgatgtttcttaagttggagaaagagaattaaagagaatgaaaatcagaatcacattaacttccacctctattcaaagctgttttataaattagggagaagagtgaggagagaggaataggatagacgaaggtagagagagggagcagtggagaagaaaacctcagagtgaggcaaaggaagaggtgtgaaggggaaaagaagtggcgatggcagggaagagcccctggccatgagagagactggggggagtgggaaggaagggaagttatggggcagggggcacagagcagagaacaagagagtaaggctagagagatgaaagaaacagtgagactgagctaagaagagcgatctcacgcttaagagacagagggcgtgcctgtgacagggcgggagctacaggactggacatgatcaccgattcagggggagggagggatgcaggcagaggcctaactccagcatgttagcatgtgctatggaagtgctgtccacaatggtggccaccagtcatgtgtagtactttaaataagtctgttgtggctgaggacctaatttgtaattttaatttcattttaaatttaaatatccgtatgtggctcatggctgctgtattaggaagtgtagatctagagaaacagctagaaaaaggagagagcactggagtcacagtaggggaagaggtctagagcaggaccgtccagtggacatagaacccaaaccatgcacatgattttaaacattttagtagcagcatgaaaaaggaatagggacattaagttcaataatatattttattcagcccatgatatcgaaaacgttaccatttcaacaagtaataaatatgaaatattattaataagacattttacattttcttttttcctactaaggcttcaagatccggtatgcatttacactcacagcacctctcagtttggcctaacatttcatgggcctgggggctaccaaactggacctcacaggtctaaagagattgatctagagtcagagcaaactctagggagagctgatccaaagttagaaggagctttaaaaagatactgagtcagatacctctctaaagtcagagcgctctagagcattgctattcagtagaactctgttaatggaagtgttccgtatctgcattgctgtagccgctagccacggtgactactaagcacttaaaatgtggctggtgcaactaaggaaccaaattttcaacttaaatttgttttaactgatttaaatgcaaatagctgcatatggctagtggctgctatactggacagcacagccctagagacagagctactgagtagggaaattgaaggacatagtggtggtacatgtggaaaatggaggagagcctcatttgggcaagaaagaaccaagagggacaggattcataatggtgggtgagacagagggagtgacaaatacaagggagcaagaagggaagcaggatattgtgggagtgaggacaggatggtgagagacaggaatgtaatcaagggttgatcagctaggacagaccgagggagacatagcatgcaagagaaagacagagacagaacatgagacaggaccaggggacctaaagtggggtgtgggcatcagagggacaaaggaggaggtgatgaaccgacaggggaatgtgggggcacagagacagtggggagggagagtcaggagggagagggacatggtgtgggcggcacagggagcagggacagagtgataggagagaggagaggacaagtgagaggaaggaaggaaggagagggccgtgggagggagctggtaggagagtgaactgttcctcctttgtgttgctatctcagtatcattgaaagaaaatggcctttcccaaagcctctctgctgggtgaagccatccaaaacattttatttttctaagggaaaaacaactctgcctccatgcacaccatctattgttttgcatttagtaggcctgtgaaatgcctgattggaggaaggtccagcccccaatgttctgtatcatagccttgatggagtagcctcccccatttctggtgtggttgggtatagcccctgccttcactctgcttcccctgcccaggggaatgcagaggaagggatggcgcctttcaggcctgcagtgagtcatctctgcctgaaccaagcccattcatgctccatcgccttctagaatatgaagtcctcgtgtgtgggaggaaagctctgttcccttcccaacatacattccttttccttagcatggatgtggcccttcattaaaagagatcagttcagtcccctgctccctgcctgtgctttttctagcatgtgatccgagggaaccgccccatcaaaactgagatggcccatcagctatatgtccttcaagtcctaacctttaaccttctggaagaaaggatgatgaccaagatggaccccaatgaccaggtaggtgctaagtggggcagctgttttctcatggctgtggtgcagtccagccttagtctatgtgccaggcactgtgcttggtctttgtctgcagaagtagtttgcatctgccctagaaaatctagcatgatctgcaccatgagccaagcccatttctgtcctgctgtggtagaggtgatgcctcctaagggattgattggggccaaagtttggcccagaaaagcctgacccactgtttcttttccttgctcccttggttagccgattcacctgctgactgtctgtttcacctcgcaggctcaaagggacatcatatttgaactgaggaggattgcatttgacgcagagtctgatcctagcaatgcccctgggagtgggaccgaaaaacgcaaagccatgtacacaaaggactacaaaatgctgggatttaccgtaagtacctcagagcatagacggtggtaggccctctcccctgatgggaagtcaatggtcccacccagacagagctctgacaaccaaccccatggtggccctggaatagatgacagttaggaagctggtggagctttaatgcttgctttgctttgttgatggtgagtctgtgagtttatgtgcaaagtttggccctgtgaaacgaatccatctgtaggggggttgcggtcagctagagtgggtagagaggggacctgtcctcttacccaaactgctaggttctttgcaaagctagtgtgaatattttgtgatagagtagggcttgaggatggggttaactggaagaagtatttcttgcgtacctactcagtgtgcagcagcatgtgaagtaggttctgggatgcatggtgaggcagccaccgtccagcactcaagagctcacagttcagtggtggtgatgggtgtgaaaagagctaggacagaggtgggtgctgagtggtagcagcatcaagaggagaggcgagagggcatcccctcaggtccctgcatacacggagactgccgcatctcaaattgggtgtctttatttctctagaaccacatcaatccagccatggactttacccagactcctcctggaatgctggccttggacaacatgctgtacttggctaaagtccaccaggacacctacatccgggtaaaggcaggggagctggccttctcagtcctggtgccacatctcctgccttcctccttcatctccctaatcctccctttctcttcccccgacagattgtcttggagaacagtagccgggaagacaaacatgaatgcccctttggccgcagtgccattgagctcaccaaaatgctctgtgaaatcctgcaggttggggaactacgtaagtctctgcagctccctcttcttcagccattccttgtcatcaagagctcagtgagactcaaaattataaacagttacatgtcagtggggtcgggcgtggtggttcacacctgtaatctcagcactttgggagactgaggcaggaggatcacttgagcccaggagtccaaaaccagtctgggcaacatagtgagaccccatctctaaaaaaaaaaaaaaaaaaaaaaaaaaccaaaaattagccaactggtagtgcatgcctctggtcccaactactcaggaagctgaggcaggaggatcactgtgtcaggaggtcaaggctatggtgagcatagtcatgccactgcattccagcctgggcgacagagtgagactctatcttaaaaaaaaaaaaaaaaaaaagatgtcagtgggactagacaaccttaggtgggtttttaattttgttttttgttttaaatcactgcatcagctgataattccatcttatccttatttatgggaatcatggttgttgctttgtttgaactggcaatttgaatcatattccaaagctaccccatgcctgtgggtaagggctggctgagtctgtaacagggtagagggaaggcaagaaaatgcaccctggagaagaaagctaaggacgtgagaaacgcccatcccacgctccctgttaattgcgcgccttaggctgcttttgttcctcgggactttggtgcaaagtttccagacatgagctcccaggcccttgtggacagaggcttcatcttctccctgttttttcacttccacagcaaatgaaggacgcaatgactaccacccgatgttctttacccatgaccgagcctttgaagagctctttggaatctgcatccagctgttgaacaagacctggaaggagatgagggcaacagcagaggacttcaacaaggtcagtgtctccgggctgctctgaggcccacgggaggagaccatcacacgacagcctttgacagctggctggcacctggagaatccctgagctggaaaagcagcttggtctgcagaactgagtcacaagactgaggcactggggagcctcagccccatctggttgttgctccctctgtgaccttgagcttgtcttccacttggtgccgtaggccctcatttgtccattgaagttagcacctgtccctcccgtcctccagagaggtcaggaggataagcattagaagactcactgtggtttattgagtgcttactgtgcaggtactgctgtagttttgtgaactgggaaggttaggagagaagagtggactggcatgatgtgcacaccctgggtacttaatcgatagttatccctcggtgctttcagtcctcactctatgcagagcactgttgtgccaggccctcaaaagctgatcatctaggggtcgagtgttttgaagttgatcatctcatcataaaaaatttggaaagtataaagaataaaaagttacctgtatttacaccatccagtgacaaacatttttgttttcctctagtcttttttatcccctacaggtttttccttcattagcaagatcatactgcgcatgcagtgtggtatcctgttgttttctttaatagttgttttaaggggaccaatgcatttttttaaaacaccacagcgtgccagaactgcgcttgcctttctattcttttgtttgtttttttgagacagagtttcactcttgtcacccaggctggagtgcagtggcactgtctcggctcactgcaacctccacctccgaggttgaagtgatccttctacttcagcctcctgagtagctgggactacaggcgtgagccaccacacctggctaatttttgtatttttagtagagacggggtttcaccatgttggccaggctggtctcaaactcctgacctcaggtgatccgcctgcctcagcctcccaaagcatgagctactgcaaccggctggtatctcatattctttatggcaacacctatcaggagatgtgtcttcctttctctcggtttagagatgagtagatgcacacctaaggatgttaagtgacttgctgaagggacagagtcaagatgtgaacccatttctttctgactacaaaaatccatgctcatttcccccacaccattgaccaattgaaatatatgggaaataaagcatctatcagtgtcagtcatgtgacctgaataaccatctaagaaggtataccttactcacccagcagatgtctgtagtgcctgccctgctcaagaccctggggcaggaaagagccttggtgctccataataggcctgtccatttctcaagagtagtggtgtgagttggctgggttcttctcctcttaggttatgcaagtcgtccgagagcaaatcactcgagctttgccctccaaacccaactctttggatcagttcaagagcaaattgcgtagcctgagttactctgagattctacgactgcgccagtctgagaggatgagtcaggatgacttccagtccccgccaattgtgtaagttccatctcaggggaggctggcgggggaggtggctgccagctctgctttccttccagagctccactgtccccatgaccttccgctcactccagtgtgtgtccaccccagggagctgagggagaagatccagcccgagatccttgagctgatcaagcagcagcgcctgaaccggctctgtgagggcagcagcttccgaaagattgggaaccgccgaaggcaaggtgagaggagacggggcaatccttggtgccgggaagagcctgcctggatggccccttttgtgcccaggcctttcccagtactgtcgttgctcacctgtttggcttcccttgtgttccagaacggttctggtactgccggttggcactgaaccacaaggtccttcactatggtgacttggatgacaacccacaaggggaggtgacatttgaatccctgcaggagaaaagtaggttcatttctctgttgatgtgtcatggttgctggacttgtcaggagacaggagttctagtccagctgtttgtagctgatcatctgggcttgtacctgttacctctctggacctgtttccttatctgtcagcgatttcctctacctggcctactcggtggggtggtttggagaaacaatgagttcacaggtgtgaatgtattgtgtagactgtaaagggtggtacatgactaagtcgaaaggcagtagttaagaggagaagctgtgaagccagactgcccacattcaaatcctggctttgctcctaattaacttgaattctaattaattgcaagttctcccctctgccttggtttcttctcctgtaaagtgggaataatagccacactttcctcctaagaggattgcatgagtaatgtatgcaaagcacttagaagagtggttggcaggtagtcagcataactgttagcagctgccactgctgttggcgatgatggcatcatcatcgccattattgtgaaggagaggggaagggagtcaccaaggtcccgttccttggggatataaatccaagagccctgaagtgaccctcagttagctttgacacagcctcactgggctgtggtctacaggagtgaccaagacggagggaacagtacaaggccatcctccccaccaccctcactgagctcatacagcagcccttggagtttggggctgaggcttcctatgcatctgccccagtacctcccttccagcactgatgtaggcactgaccagcttgcagcatgaacttccagagactaattcccatcatttatcagttcctgttgcagacattaaggccattgtcactgggaaagattgtccccacatgaaagagaaaagtgctctgaaacagaacaaggtgagtagagaggccagtttgagtagctggcccagtgatacttggagagtgccattggtggtggttttttccaggtgcattcttggcatcttcccctctctattcctgaatgttttattaagaattttgaacatacacaaaaatagatggaacctctgtatacacatcacccagactcagcaaccatggccagttctgcccatccacttgtttctctcctttatcgctttgaagaaagtcccaagtatcacactgtttcatctgtaaatatttagtgtacatcgtatagtgtataacattgccaccagtccattagcacacataacaggaaatgaaagtagttatttcagatcaaatattccactgatggtgactttctaccaattgtcttataaatgtcataatttctctacagatatataaatgtttatatggatacacacacacacacacacacacacacacacacacacacacacacccccatacccatcttgtctaaaccagagtctaagactggtcttttaagtttcttaattcataagttcccccgcccccccatcccccaccatcttttcctttgcagtttattagctgaagaaccagattgcttgtttggtagtttcctagcatctgaattttgctgattgtttccccgtggtacagtttaacttgttcctctgtcccagatctgtacattggaagagggatctagaggtttgatccagttcaggtttaacttttttcctggccagtgtcatcagtggtattatgttctatcaagaggcacataacgtctggtggtctctccttttgtgataattagcagactgttgaagctcagtgcctcattccatcagtcaactaaggtttgcaaactcatgatattttgatgcagtcattgcttttcatttatgagctgaaccatgaaacttgcccttatctactattggtttcccagtggtacagtttatataggaaacgagaataaatgctgattcttcttttatgtacttactttcaaaataatgagttagttccttggtatcatgcaacagtgaccaattttgtgtgtgtgtgtgttttgttttgttttttaattgttaagacattcctatgccaaatacagcacgatagaagttgttagtcatcttggtaatataaaaacttttaggataacttacagtcatggatcgtgaccttccagggttctgagtgttgaaaatgacttttttccaatcttaaaaatatcacaacatctttgatgtgacttgggcagggagtgggtaagttaaggttgatttatgctgggcctcatctccagccacacttgtggccgcctaggagcattgatgacattcatctgaatcagcatgtttggtgatgatgccgagtcactaggactttggccaagatcttgatgtgcagaccccaggctgttccatcgctctaatttaaaccctttctccttcaggaggtgttggaattggccttctccatcctgtatgaccctgatgagaccttaaacttcatcgcacctaataaatatgaggtgagcagtgtggcgctgccttagacaacagagctatttctgtaactcttcagttggtggcaggaatgagcaaaacaggaaagtcccctgtggtgggtggctgcagtgtatattgaagcctaggaaggctttgagaagaaggtggcatttcaataggatgggaatgtctcaaaggaggagctgtggttgggggggcacccagatgaagcagcaggtatcattacataatgctggacctgaggttcctccaggcgcattgggtggctgccaaggatctgtcacactctggattgtttatctgtgagctgggctctccacattactcttcagcagcagccataggttgtcattacaaagataaggtcaactaggaatgagtcatttacctgggactgggaaaattctccccttttcagtttctctgtggtcagctacccaagagaacttgacagatccttcctcctaggggctcctggtcacatgttgtaatggatccagtgtggactttgaagccagatggaactggtccttctgacaagggccctgtagttccatctgcagcactggaagatactagatattaaatgagtgattgcatttgagaccctatgtgcctggtgagctctgagagccatcactgggaactagaggtgggacttctggcagaggagacacttgggcagggcctgagctgccgctagtggaatttggttgagaggaaatgaagaacaagcaagtggggaaccaggtgagcaacggtgtggaaaaaggaaaatggcagcagaggaagcaggaagagtcagggagcggtgggatcagaaggcttcctggtcaccccctcttagcatgagacccaccagttccatttctttagtatttactctttaatatgtattgactggattatttttaattttgttttcgggggggcggggcacaaaattgagatcccacagtgacttctgtttgtgtcttgcttcttttcacctaatacatatttcccttctctcgcttctgattttgggtaacttcaggtagatgatgccccagtactcagatctcattttgctgtattcgtttattgcatttttaggttctccttcatattattgtaaggagttgtaatataaaaccccttataaaaaccagatctcttgagaaagtgaaggatcacctcctaatttatctttgctatcattccaaatcagttttgcctatactgattagttccaaaaggaactgttgtgagccccatcagaaaagagaccttggcaggatctcctgctgaccaggggtcacgatgtgacattttgcaacttgctccccacagtactgcatctggattgatggcctcagtgcccttctggggaaggacatgtccagtgagctgaccaagagtgacctggacaccctgctgagcatggagatgaagctgcggctcctggacctggagaacatccagattcccgaagccccaccccccatccccaaggagcccagcagctatgactttgtctatcactatggctgagcctggagccagaaacgacggtacccaggagaagggattttgggcccaggagaaacacttacattctggtgccttgtcttttgcttgtacagaatctgtagtgattttggtggccagtaaatgccagccatttctcaaacccacctcggaccacccagagtttcctcttggtccctgtctactaagagtcatgaaggcagggtgctctgcccactccatcaccatgaagcctgggattgggccacgaggaacaaacagcagatgcccttgccttccagtccaagaaactgcttcttgaaatggatttaacaacagccactcaccttttcctcctgagcctgctctctgatcagctggatccccacgtgagcaacagctggcccaggaaaggctgcctgcagaggacaggtgtgttgggcgtgttgagagccttgaagtgactacctgtatcttagatctgagtacaagcctgaggcttttgcttttgtcttttttgatgagggctcactccagcttcatatggtgccaagacgttgctgcttctgaggttggctctaacatctctggtctttagagccaccagatctctctggcccatacagatatcagagcagacggaaatttctccctgcaagcgctcagtctcatcccagcaagtcaaagacctcctggccaagtcctgccctcttaagtctccaggaacgctgcagggaaaacccagctgaggcctgggcctagactgtggtgaggtcactagattctactgctcttcccccacattaataccttttccttcctcagagagaaatctcccctaacctgaattgcagccccctccagtttgctttcctttggccttccagaccccaggaagttggccttcccttcctagtgctatggtttctgccattggccatgatttcagggagctggctgaggccggctgaggccacacctgtgccagtggggcttccctggtgctgcagcacttgtaaaccacacacacagcctctctccctggacatacgttagcacattggcattcagtattggtggcctggcatggtaggtactacccaatgaagagtgtactatatattttcattactataggccatacttatacagacgtgtatatatatttatataagatctacctatcttaggatggaaccttggggaaaaataaaattgaggggaagtaaaaagtatgtaacacttccagttgtgagccaagattgtaaccagagagcagccaggagcttcctgtcagtaaccatgttttcaataaatactctttcatgtacaaa

SEQ ID NO: 1002 - DNA, 28482 bp, Homo sapiens
aggcagccgtgtctgtgtttttgtctcgcagaattagagcccattgggaacgatgccaccaccgtcagacattgtcaaagtggccattgagtggccaggtgctaacgcccagctccttgaaatcgaccaggtatgctcctgaagtgagaagcagtggttcaaggaaaggcacctggggagtgcatggcagaggacatcttgagggatggggaccaccggcatcaagagtaagaacgagcaacaggaaggctaagctttgggcctggcccaccctagggaaggtcggtcaccatggcttgggagaggcttcctcttcaacaaaagctgttaggaaagaagttcattctcatgccccagcttgaccctgcttggcaggcctcttgtcagaaccttggcatgagtaggatgttgctgctgttgaaggctttctctctctctctttcagaaacggcccctggcatccattatcaaggaagtttgtgatgggtaggttgaaatggacctcgttttcaacagtggcagctccgactgaaagagcactcctacaccttgaggggagttctgggaaggatctccagttaggcaggtcctcagcatgggggtcttgggaatcattgtcttgggaaggaagtacagttgacaaccatacccctaagacgtttatacttcttaattttttccttaaagtctagcattgccctattgaggtaggatctgagacccctcctcagttctgcacacctcctattgtggtgctcatctttacaaaaggctgaggccatgattttttcaacatgacaacctaaagctttgtttccactgtattccaaataggccacccaatcccttgagcaactcttttgaaaattacttatgagcagcttctgaacaagagagtggccaagtgggatatactgtttttctcttgcataggtggtcgttgccaaacccagagtattataccctccgttatgcagatggtcctcagctgtacatcaccgaacaggttagtacagggagaggcaaaatcaatatgggccttgcttggaattaaacgacccaaggagacggcactatttatcttcactcagcatccaggtagcttccatgtgttgggtaaagagtcactctctggacagactgggaaacaccagcccttgttcttccctagtggctagaaaaaggtggcttttacttcctgagtgcccagggtgctagaggaggatcttagaaattctttgccaaggaataagcaggagaagagggcccgactgaagatcctcagttacatctactgtaaaaaagacaaaacattattgttgattcaacttgcttgtaccactttaacattttatcttagttactttttttgtttatttttcactacccagactcgcagtgacattaagaatgggacaatcttacaactggctatctccccggtaggtattctttcttccttaggagtttattcatgtcacaaacaaatatgagcacctaccatgggccagactctgttctagaaataagtactctggagataagaaagtcagtctttttgtatcaggaaatagtacaggaaaataagtctgtcttggttctcaccacctagtggggagtaaacaaatgcaatagaaggcctgtctcaagggtcttgagagaaagttgcttagggagctgtgggaactcacaaaggggaccacctaactcagcctggagatttccagaaagtcttgccagagaaggcgtcacttagctcagatgttaaaggatgagcaagaattagctagagaaataagaaaaggaaaagtattccagtcagagaaatcagcatatgccaaggcacagaggtatgctgtgtttgggaaaagcaggagtgctgggtggctggaggcttgtagcagtcattgagaagccagatattcaaggttccttgatggcctactcgtaggtttcaactctgtccagaaggaaactggggacattgaagaattttaagcaggaagatatgttatgtttagattttaagttttagaaagatcactttagtgaccatgtggaagatgggccttaagaagaaggttggtggtagtaggaacctttgaagaggctaataaggaatgttaacagcccagtgaaggcaagtggtaatggagatgaaaggatggatatgaagagtatctaggaggtaagctttatgagtatggtgatatgctagatgtggaaggaaaggggagaatggaggatgaccctgatttgtgcaagagcagcccttaaaggtcactaaggaagcaaccagaagggtagaaagaacaccaagaaggtgaagtgactgaggagctttgggcagggagagtgtcaggactgaggagagtatggtctgcaatttttaataagcagagagatttagtaaactgagagcagaaaagctgtctaatgacttgggaggttagaggacactggtgatactcacaaaaaagttatggtggggaggccaggtggccacactgaagtggtcaagtaaaagaaaggtaaaacagtgaggactttgagtctactgctgtatcaagaagcttggttttaaaagaaaacacagagaaggtgataatgcgaaggggacgtggagtcaaaaagatgtgctttttaaaagcaggtaaagcattcatgtgtttcacaaatcaaaaattttcacagagatgtagcaaaaggtctccccgcaactcctgtccccatctgcccagttccccacctttctgacccttcgtgttggttgtttctgttgcaattttttatgtgcccttaagaatgtgttcagatggaagagaggaaggttgaaggtgcaggaaagcaggtaatcaatagaacaggaccttactggaccaggagaggaaggactcaaagcccaggtagagggaatcactttgactgctaggcccatgaagaagacagccaatatggttgcacctttggttacatttgtagaagggcagccagaaaattaagggcatgatggcacttcttttcttggtgcagagagagactggttcatctgagaggaggggaggtatgaagtgatatcagccagcgtttactgaatgcctatattttgctaaatactttgtgtaattaaatcatctaatctttacagacatcccatgagataggtactcttgatagccccattctgtaggcaaggaaactgagggttagagaggttaaattacttgccacttgtcacacagctaataaagtagccaagcccgctctcagacccaggtctgtctgactctaggcccatattcctcccatcatgttcttctgcctccccctcttctcctgaactcttctcatcttaaggacttcattcttccctcctaagctctggtaatttaatatgacagtctgggagttactcacttttatggaagtgccgacacatttcacagacctcttgcacagtgtagttgactttcccagaagcacatctctctggagcgggaggcagcagcccagaaatgctgtctcaggaggaaaattgacatttggagttggaggtttctaagtgggatgcagaccagtgctcttcagattgttctatgctatgaccttttcccgtggcgcacattttctccactgtagagatagcgagggcttctgtattgcagagagcactgtgctttgaagggccagctttgtaatagtaaaagaggagaggcaaaggggagagggccagcaggcctgactccttggcggcagcaggaattgggctccagtcacttgcttaacactgagaaaaaggaaagaagacaggtgtgtttttgttcttaagtctcttgctttctagtggagaacattaaattaacacccaaaaaacagagaatgatgaaacaataaattgtgaggcactatgtagtaatgagctcagcggaaggaaagcccagtgaatactagaggagggattttagccgcagcttgcagaaaaggaggcaggcatcctgctaggaaaagttcatgtgctaggaggaggttttgtcttcaccagccttcattttcaaaaaacaattgggaaattgtttctggctccttgatgttcttaaagtttccccagaactgtcactttgaggaacaatcatatggattctaagagaaagtttttaaaaaattgccaggcttttcacattttaggattaaaagggaccttagaggacatcagattaaattcttcacccaatgcaagaatcccttctacagcgtctttgacaggtggttgtccagattctccttgattgcttctgctgacagggagcttaatacctcaagagaaacctcttctgctgtctaacagttttataaattttattttattttattttattttttttgagatggagtctcactctgttgcccaggctggagtgcagtggcatgatcttggctcactgcagcctccacctcctgggttcaagcaattttcctgcctcagcctcctgagtagctgggattacaggcgcatgccaccatgcccagctaatttttgtgtttttagtagagacggggtttcatcatgttggtcaggttggtctcgaactcctgacctcgtgatctgcccgccttggcctcccaaagtgctgggattacaggtgtaagccactgtacctgaccaattttattttcttttttatttttgagagagagtcttgctctgttacccaggctgcagtgcagtggtgcagtcctagctcactgcaaccttgaattcctgggctcaagcagtcttcccacctcagcctcctgagtagctaggactacaggtgtgcaccaccacacctggctcattttaaaaaattttttgggagtcagggtgtcactctgttggccaggctggtgtctaactcctggcttcaagcaatcctgccttggcctttcaaagccttgggattacatgcatgagccacgcacccagcaagacagcttaaatagaaaaccttcctctattaaaccagtatctgtttctctgtgacttaccatcgttagtgggcctcccagatgcctccagtattcccttggtaggaattttttaaatccataggccaaagcggtacagaaaagatgcagataactacagattggttttggcatactaataactccctgattgattccacaaacatttatttagcaactcctaagctgtgtgaaaaaactagttctgcctcaggtttggatgtccacagaagggcctctgtgagctatccacagagtagtaacctgctccaaggagcagatggcacatatcttgtccctggcctcctagtcccgggctgcacgccagctgatggagaggacccagtcatccaacatggagacccggctggatgccatgaaggagctggccaagctctctgccgacgtgactttcgctactgagttcatcaacatggatggcatcattgtgctgacaaggctcgtggaaagtggaaccaagctcttgtcccagtgagtatgactaaggtctcgttccaaggacttcgacgatttactacatcccacagggcatcctagtctcatttcccttgagtcaaataaggagtttattgaataccacctgtgtgcagagcagtgtgccaagcactagagtccataccaagatatataattccatattgtgattctaaatcgtgtagtctatttgggctctcacaaattaaataacagtacaaaacagtactgtgccaagtgagcagtgaaaataggggctagagaagtcaggaggagagcagtcacgtcgtgacagacctgttaattgctggaaatgtttggtttgatgagggttagtgagcagatggtccagtatctcccaggtgtctgtttgtaatcatcccctgctcctccctcttcagtcacctcccagcccatacacacacacacacacacacacacacgccttcctttgtgtttaccacaggtgtcaacctacccattcaccatctccctgccacacttttgcacagggaggaggagaccagaactttgtgatacccacaagcatcttcatcataccccagagttcacatgcatgcggtgggcagctgtgccttgtgagcagcagtcagtaaacaggtgcttggagcctaacctgccaaagagggagtcagaaatcttctcagcccatagatcaactattgaaattgttagccaaatcgagtaactaatcatagatatttgttttacatattggatcttccagctgtattgaagtcctgaagccttcagctgccatcagcactgacatagttctacagtctcccaagggtacagggttagactggccttagtttcactctcttcagcctgaggataataatagctaccttgcagtattattgtgagaagtattgttaatgagaatgtgtctgaacatgctttgtaaataggaatatcatctgttaattctagagcactgtacagatgtataaaggattaaatgtataaggagaagagaaaaaagagaaaacattttaatccttattctctaccagcactagaataagagctttgcatacatcatcatcttgtcgtctccacaaccctgtgaggttaacgctgtgagactaacttgattttacagaggaagaaattgaattttgaaaagataaaatttgcttggttagtaaggtggacaggaactgaacccatctcttgcactctactgcctcttggcccaaaggttaacatggcacttacacttccttaggttctcccaacaggtgttggagtttgacaaaggtccaatgtcttctttggtcttgggaaatagataagtgattctgtgtccctgggatgaagcatatggagaaggaagatctaattacccagcaacttttttttttttttttttttttttgcagcgatagatacctgggctgaatctgctctacactggctaggtgtgcacacaggcacttacagttacagttgcatcgactgatttcccatggggtgttcacattaaaattcatcttttttgtggctgccctcacacctgtgtttcccgatctgaatctttgtctattttgtgtgtgtgttgcacgtgtctcagctacagtgagatgctggcattcaccctgactgccttcctagagctcatggaccatggcattgtctcctgggacatggtttcaatcacctttattaagcaggtgaggcctccaacattctgtctttctctcctccctcagctgccagttcacaaggcttaaggggagatacaggcaatatcgccattctggtgagatcagctttatattccctggggccagatttttcatcctcaagctctagtcttctgtggcttctgaaagatttgcattttgttatattctcagggcctgcactgagatggaactggaccgtcagaactaaatatgatcaaagtagaattagattgtcagtgagactggggataaagccagccagtcaaccagtactagccctgagtcttttgaccgacttcctgagctctctcttctttttgtatatatataaaaaaaatttgcatttcatttgtaaatttgccttctatttacaaatctgcaaggtagcctgtttggattgtcagactaagttcagtgggtaggagagggtacttctggttttaccctcctttcttttacacaaaggagcagtgtcaattcagaatactgaactaaaaccaatgaataatattgtatctgctgccctagaacttcagctatcattggcttaggacattgggactccccgacactggacacaagtgaaatgaccatgtgtcaaggatattataatggggactgagaagaaggattagagtaaaaggcttcaaggtcctttctacctctcaaagtctaagtgtgtttagggggagtgtgtgtcaggggaggtacatggagataaaatgagatcccagtatcagtaaaatcctctgcttttttataccccactttctcaaactggaacccttattttgataaaaagaattaagcttttagattttgaggaaacacaattaagtggatactataatctgagattaaggtatccatgccaagggaatccctggcacattggccagggtagccgtaaaccagataccactatccacctagcaacagctgcccaaatgtgaagcagagagagcttcaagggctagcatcagatgctaagcttctatctttcttgggccctgagcttctcaattgatgtgccatctctgggtctagattgcagggtatgtgagccagcccatggtggacgtgtcaatccttcagaggtccctggccatcctggagagcatggtcttgaacagccagagtctgtaccagaagatagccgaggaaatcaccgtgggacagctcatctcacacctccaggtgtgagtaaaaaaccctacacctccctcccttcacttgtctgtcctcttttctcctcttattttaagtcttccaatcctactctcctttgcttatattccaagctgttggttggcttcttcattcatcacctcttccacactcctgccagaatttctcccatcattcagacttgatcatgtcatgctcctgcccaaaatcctctgtaactctctctgccccttaggttaaaatgaagattttcccagtcttcccataccagggtggtaccaggcaaaattagatgctttctcacatgggcccagtagtctctgtacctatgataattatataaaatactggatttttattatctgttgcccattttgaacatagagcccccttgaaacagagaccaatcattgttgtatcccctgttttgatttaagtagaggctcaattagtgcttgttgaatgaatgctcactgaaccgacgatgcactgtgggtgatttgtaagaaatatcacacaggtgtgagtttggaatatcagttcaaatccaggctcttctgcatactaggtctctgccatcagcaagtaacctagtctcttctggcctcagtttcttcatctctagaataggttaatcaccttcacctctcacactgtgaggatcaaaggagattttaaaaaggtccagcatagaggccaacctgggttaggtattcagtaaattcaggggcttttttcctttgtttgtttgttaagactcttatcacatcctaaaacattttaccagatactgagaccatatgacaaatgaacccattggagcaatgtttctcccgtctccgctgtttttacctcacttccaaccaacctacaccatgtaaggaagctggactttgcaaaacagtggtggcactcctgttgattctcttctgactgttgttcacttctgttttttagacattgtcagaatgttgccagaatcccccaccagttcgaggggaagtcatagctcccagatttgggagtttatagtggccctgtcttcactcagctatgctcccaacttgtttttccccactaatccaagtaaaaagaaagcacaattatttctttgcaactctgatttctccttgtcacttttaaggaattttcagcctcagctttctttgcttttcttttttgagacagggtctcactctgccgtccaagctggagtgcagtggcatgatcataactcactgcaggctcaagcgatcctccccatctcagcctcccgagtagctggaatcacaggcacactccacaacacctggctagttttttttttttttttatttttgtagagacagggtctcgctgtgttgtccaggctggtctcaaactgttgggctcaagcagtcctcccaccccagcctcctgagtagctgggactacaggtgtgagtcaccatgcctggtctagcctcagctttcatacccagcgagccaccaaggttgattaaggtgagagggacattataaactccagatagagaattctgattttcctgtaacctcacatctacttctctggttttttttttgtctctgaattcagagtggccccagttgcctccctagggatgataggggaacatggcatttcataggagccaatactttcagcccacagctgtcaccagaacttatatgctttcctttttgggctgagggatacttagtgccctctgttagactccctgggtaccatgtgactaaccaggaagcccatcagaccctctggaaagacagccacagaatgcacccaagacatggcaggtggagatgtcaagtaccaggattgtaagattccagagaatgattgtagttattttgtttgttcataataaaataagtttatagtcaaagactttaaaaatacagaaaaacgcaaaattatttgcccattatctcacctccagacatacccactgttaaacattaaattgaatgtcccttcagtatttttatgcatatttttaacaaaatcgggatctcattatatatactatgtgtaccttgattttttttaactgaataatacaccttgaacatttctccatgtcaaagatttttctaaaagggtagttctaagtcttttttgcaacctagacacctttgaaaatctggtaacaagtatatactctcaccagtttggaaaaaataccacttagttggcaaactacatagaataatttctgtatcattcctggggttcacaaatactctaagctcatccctgaatcccaggttaagaatctttaccctaaaacatgacttttaataactacttaagattctcatatgtataaatgttggctaatgtgaccatttggattactttccattcttttttaagtagtactttaatgaaacgccttgtcagtaaatcttgcatagctctctgattactgtcttaggataaattcctattagtgaaattgctgggtcaagagcatgcccactttgaatgcttttgagactgagctccagatcattatttgcttataatctgtgagtgattgttttaaaccatttctaagcatcatcttgctgttcagtcttctaatctccctctctcttctttctccattgacacagctccaaccaggagattcagacctacgccattgcactgattaatgcactttttctgaaggctcctgaggacaaacgacaggtctgtggctgccttttcacatttttcatctgggctcttctgagataattctcaccccatgcactctttgctatgcagagagcacaaatccagcaattttcccaagagttcttcctcttagctgtctggtctggagcccaggagggtggctttgctaaggaagacccagggaagacctatgaggggaaaccagctgggtcttagatgagagcagggcccttcaaactttttcctctaaagggccagagaataaatatgtttgactttatgggccatatggtctatgtgatagctactcaaccttgccattgtagccaaaagcagcctcggccagtaggtaaatgaatgggtatggctgtcttccaataaaatcttatttacaaaaacaggcaacaggcctaatatggccatagtttgccaactcctgggttacagaatcaagaataaggaagaggagaccctgtgggtaccctgagtccaaggagtccaatatgaatgggatttcacactaaatcttaggtttaaaggttctctgatggagattctaaacatcttccttcccctgttcattaactgtgacattatgcagatagctctgcctctgtgaaccttagtttcctcacctgtcacatgggagcaacaacatctgccttgtttacctcacaaggatgtctgaggaaaaacaagatccctgtttcacaaataaggaaactaagaatcagctgggtggtggaacaaacactgacctaagagccgaggggcctgggactaagtattctccctgctgctggctggacaagtgtttgtaacctctttttgggtctcagtttctctttctgtaaaatgaaagggccagtttaaatgatctctgacagcccttccaatactaacattctagatttctctgagaaaagcccaagtggtgttaaaagtaagacattttagttctctgacaatctcatgggctcagtaagatgaaattcaagtgggatcatgtatgtacccagctcttggtagattctagagggaagaccagaagcatctgtggttctgtctgtccttgtctttcttggatggcttggctctgttaatctgccttcccggtccttgtttgaatgtaagctgaaagctcattccgtctgcttctctctgtgcttttgctttctgccggcaggacaagcaccttaatcctctagacctgcctgtcactgtaagtagcactgccatgtggaaagggccccagctcttgcaggtggggaagtcaaagctaggcaagaatctcatggtctgatctagatgttcagggcatgccaagacccagggaaaggttgtgtgctgtgaatctcctttgtcaggacacttagggaagtactgcagattagagtcacagaaaggattaagggggtacctgccccagggagtgtggccccagccttcctttataacttgcctttgcatgggtctgtagttcaactagggcagaccagactcagaaacagctcgtaactttgatctagacaataccatggatgcgtcaccttcttacttgctttagtggaagagaaaaggtatccgtgccctttttggactcttactagaccgtgggaatccgaaaaggtttagacaatcgacaaaagggaatttggatgctcatttcttcattatagggagctttagagaggtcagctttgcgaggagatgaaaggggataagtgcctccccctgacaccacagagaagcttttggtctaagacctttatattctagctgcagaccactgtcaattacccaccttatgagttgtccacagcaagatttaatctcagtcgacctcctatagttaccagagaagtttctaggccactgtcctcctctgctagccagtatgtattcagagaatgcaaagtaaaatttaatgttcctggcagcattagccatttggaatatggctagaaatccagaagtgtgacagaggggcctttcagctctgagaaaaatgacacagagctcacagatactactccataggagaggtgtgacagctccctcaggcccactgatttaggattctctataaaattaaatgaaggcagcagtttagaaaatgaagtcatggtaattaacatcagtaagaagtgatggtcgacactggaaggaggagacaagaattatgaaaagctgtcagaaaaattaaaggcattgtaatctgggaccattttgtttatgggaaaatagcttcacatctcagtagctcctcagggtatcacagtgtcacaacacagaataatcactgatgttctttttgatgaagccgactccttagcagtgattaaattatcactgtagtcacttcagaaataaatgtatataatatgtctttaaaagatttgcataagaatggtcaaaataatgattctgagagaacccttaaagctttgctccctggaagattcatttatgtaggaaacttgatttcctgggtgggctaaataaataaagcataactatcaaagtctggatcaaatattataaaaaaggtgagcctgttataaaaaattacccaaaacaccagactcattgttctctaagccagttagaacggaatcctagactacttactgttgtagagcgtccagaccccagccgtctgctgtagggtgggagggggttgctggaccaaagcccttccttgtttggagtcagtgcttcactagagttccttctagccttagcagtggggtctacctggcacgatgcatgtggcttagaaaccatcacactgctctgtgtccatgtgcaatgtccttgtgacacaagcgtctcatcttcaagcagtcctcatctctctttgaagacagtggagttgattgtgccattaggaaaggaaatcctatttgaattaatttgcactcacaaaaatagggaatgttgcagagtgtaaaatacatctgatggtcagtggattttcgttcattcacccacttttcatttgggaggaaaaaaatttaagaaagcaaaaaaggcccagaattttgacatcaccttcctctcgatagtagtcacaggtgtgtgcctgccaccctgccttatatttgcttattttcctccacaggatatggcaaatgcatttgcacagaagcatctccggtctataatcctgaatgtgagttcctggaacatgctgtattttattactattaacaacaattattactgttattgttaatatattattattgaaattattaatgagtgaggaggacacacagaggaaccttatcaataggtaaatacctcttgaactgaatagctttttcccgcgatcttctgtgagcagagttgcctctaggcagccatctcaccagcaattgcagtgcgtccagggagggaccaaggccagctctactgtttgttgccctgcaactccagaatttttatccagagggaatatgttaaaataggcacaaagggggaaaataactcatccaactgacactgattaaaaatctgaattgtgtagggcactgacagaactaagtaagcaagtgtatttgctctcaaagaccttctggcctggtaggaaagactagtgatcatagtggggtgtgatctgggtttgtggtctaggaaaggatggaggaggaacagtgatttctgccttgaagaagagtgtttccggaaacttttagaggaatgtcttcaggtgacccttagaggatgagtaggcagaccgggaataacaggaatttcagtcagagggcagccagaacccagaaggagtgtgtgattaggcacagagcaaggagcaagtagatgaggaggctagagaggtagcgaggaccagatcaggaaaggttagtctcattcctaaggacagctgagggcatttaattgagcttgtgaagtaaccagatttgcattttagaaagagcacatgaaagacatgtgtttgctaaggggtacctgagggaggagagcagagcaggagctggcagggggatctggaaagaggtataaatccctgttaccacctgtggggtggagtagggctgatgttgggaggtggggccggtgggagtggaggaggagagccaaggatctgaattaaaaggaggcaactttggccggacgtggtggctcacacctgtaatcccagcattttgggaggctgaggcgggtggattgcctgaggtcaggagttcgagaccagcctgaccgacatggtgaaaccttgtctttactaaaaatacaaaaattagccgggcgtggtgataggcgcctgtaatcccagctactcaggaggctgaggcaggagaattgcttgaaacccgggaggtggaggttgcagtgagccgagaccaggccattgcgctctagcctggacaacaagagcgaaactctgtctcaaaaaaaaaggaggcaactttatcaactgtcagaaacaagggaaacctgggagaccacagtgaagggaataaaatgaaaaattagaagtcaagtttaagacttaagctaaacatggactttggagtctgccattttccaatctttgatcttgagcatttcacataacttctctggacttcagtttgctcatctggatatgaggactaagtgagctaatataatactgtgcttagcagggtgtctggcactcagtaagcactttgctcgtattggcagaacaggatgcagaggtgataggattgaagaagtaagctctgagcacttgtgaagctgagcagtcagctgctctaaaatgcagagtctgccagacttcaccttgcagaaccagcttctccctgctggctgcttccctggtcacacccagctaccagcctggcaggaggggccccaagcccacaagtgacaggagtacacaggttcccacacattcctgcctacactcctgagcagctgtcctggtcaccctcttctgcatgtgtggggatgagtgcgcccttctgaaggaaatttaattatgtttgagacttactatttaatcgggttagaagttcaactcatttctggacaaaccttgtgaacaagtaaagatttcactatagaaggcagttcagcatcaggactcaggacttaagtggcctggcaggaaatggctaatgcatggtcactgaagtccagggatttcactgagtcaagccagagaactaagaccctgagatacttgacagtcaagtgagacttcaggtaaaacctcaaactgtcactcatcagactggagctgtacttctttaagccattgatgctaggataattaattaccttcctgccctgatgtttcttaagttggagaaagagaattaaagagaatgaaaatcagaatcacattaacttccacctctattcaaagctgttttataaattagggagaagagtgaggagagaggaataggatagacgaaggtagagagagggagcagtggagaagaaaacctcagagtgaggcaaaggaagaggtgtgaaggggaaaagaagtggcgatggcagggaagagcccctggccatgagagagactggggggagtgggaaggaagggaagttatggggcagggggcacagagcagagaacaagagagtaaggctagagagatgaaagaaacagtgagactgagctaagaagagcgatctcacgcttaagagacagagggcgtgcctgtgacagggcgggagctacaggactggacatgatcaccgattcagagggagggagggatgcaggcagaggcctaactccagcatgttagcatgtgctatggaagtgctgtccacaatggtggccaccagtcatgtgtagtactttaaataagtctgttgtggctgaggacctaatttgtaattttaatttcattttaaatttaaatatccgtatgtggctcatggctgctgtattaggaagtgtagatctagagaaacagctagaaaaaggagagagcactggagtcacagtaggggaagaggtctagagcaggaccgtccagtggacatagaacccaaaccatgcacatgattttaaacattttagtagcagcatgaaaaaggaatagggacattaagttcaataatatattttattcagcccatgatatcgaaaacgttaccatttcaacaagtaataaatatgaaatattattaataagacattttacattttcttttttcctactaaggcttcaagatccggtatgcatttacactcacagcacctctcagtttggcctaacaacatttcatgggcctgggggctaccaaactggacctcacaggtctaaagagattgatctagagtcagagcaaactctagggagagctgatccaaagttagaaggagctttaaaaagatactgagtcagatacctctctaaagtcagagcgctctagagcattgctattcagtagaactctgttaatggaagtgttccgtatctgcattgctgtagccgctagccacggtgactactaagcacttaaaatgtggctggtgcaactaaggaaccaaattttcaacttaaatttgttttaactgatttaaatgcaaatagctgcatatggctagtggctgctatactggacagcacagccctagagacagagctactgagtagggaaattgaaggacatagtggtggtacatgtggaaaatggaggagagcctcatttgggcaagaaagaaccaagagggacaggattcataatggtgggtgagacagagggagtgacaaatacaagggagcaagaagggaagcaggatattgtgggagtgaggacaggatggtgagagacaggaatgtaatcaagggttgatcagctaggacagaccgagggagacatagcatgcaagagaaagacagagacagaacatgagacaggaccaggggacctaaagtggggtgtgggcatcagagggacaaaggaggaggtgatgaaccgacaggggaatgtgggggcacagagacagtggggagggagagtcaggagggagagggacatggtgtgggcggcacagggagcagggacagagtgataggagagaggagaggacaagtgagaggaaggaaggaaggagagggccgtgggagggagctggtgggagagtgaactgttcctcctttgtgttgctatctcagtatcattgaaagaaaatggcctttcccaaagcctctctgctgggtgaagccatccaaaacattttatttttctaagggaaaaacaactctgcctccatgcacaccatctattgttttgcatttagtaggcctgtgaaatgcctgattggaggaaggtccagcccccaatgttctgtatcatagccttgatggagtagcctcccccatttctggtgtggttgggtatagcccctgccttcactctgcttcccctgcccaggggaatgcagaggaagggatggcgcctttcaggcctgcagtgagtcatctctgcctgaaccaagcccattcatgctccatcgccttctagaatatgaagtcctcgtgtgtgggaggaaagctctgttcccttcccaacatacattccttttccttagcatggatgtggcccttcattaaaagagatcagttcagtcccctgctccctgcctgtgctttttctagcatgtgatccgagggaaccgccccatcaaaactgagatggcccatcagctatatgtccttcaagtcctaacctttaaccttctggaagaaaggatgatgaccaagatggaccccaatgaccaggtaggtgctaagtggggcagctgttttctcatggctgtggtgcagtccagccttagtctatgtgccaggcactgtgcttggtctttgtctgcagaagtagtttgcatctgccctagaaaatctagcatgatctgcaccatgagccaagcccatttctgtcctgctgtggtagaggtgatgcctcctaagggattgattggggccaaagtttggcccagaaaagcctgacccactgtttcttttccttgctcccttggttagccgattcacctgctgactgtctgtttcacctcgcaggctcaaagggacatcatatttgaactgaggaggattgcatttgacgcagagtctgatcctagcaatgcccctgggagtgggaccgaaaaacgcaaagccatgtacacaaaggactacaaaatgctgggatttaccgtaagtacctcagagcatagacggtggtaggccctctcccctgatgggaagtcaatggtcccacccagacagagctctgacaaccagccccatggtggccctggaatagatgacagttaggaagctggtggagctttaatgcttgctttgctttgttgatggtgagtctgtgagtttatgtgcaaagtttggccctgtgaaacgaatccatctgtaggggggttgcggtcagctagagtgggtagagaggggacctgtcctcttacccaaactgctaggttctttgcaaagctagtgtgaatattttgtgatagagtagggcttgaggatggggttaactggaagaagtatttcttgcgtacctactcagtgtgcagcagcatgtgaagtaggttctgggatgcatggtgaggcagccaccgtccagcactcaagagctcacagttcagtggtggtgatgggtgtgaaaagagctaggacagaggtgggtgctgagtggtagcagcatcaagaggagaggcgagagggcatcccctcaggtccctgcacacacggagactgccgcatctcaaattgggtgtctttatttctctagaaccacatcaatccagccatggactttacccagactcctcctggaatgctggccttggacaacatgctgtacttggctaaagtccaccaggacacctacatccgggtaaaggcaggggagctggccttctcagtcctggtgccacatctcctgccttcctccttcatctccctaatcctccctttctcttcccccgacagattgtcttggagaacagtagccgggaagacaaacatgaatgcccctttggccgcagtgccattgagctcaccaaaatgctctgtgaaatcctgcaggttggggaactacgtaagtctctgcagctccctcttcttcagccattccttgtcatcaagagctcagtgagactcaaaattataaacagttacatgtcagtggggtcgggcgtggtggttcacacctgtaatctcagcactttgggagactgaggcaggaggatcacttgagcccaggagtccaaaaccagtctgggcaacatagtgagaccccatctctaaaaaaaaaaaaaaaaaaaaaaaaaccaaaaattagccaactggtagtgcatgcctctggtcccaactactcaggaagctgaggcaggaggatcactgtgtcaggaggtcaaggctatggtgagcatagtcatgccactgcattccagcctgggcgacagagtgagactctatcttaaaaaaaaaaaaaaaaaaagatgtcagtgggactagacaaccttaggtgggtttttaattttgttttttgttttaaatcactgcatcagctgataattccatcttatccttatttatgggaatcatggttgttgctttgtttgaactggcaatttgaatcatattccaaagctaccccatgcctgtgggtaagggctggctgagtctgtaacagggtagagggaaggcaagaaaatgcaccctggagaagaaagctaaggacgtgagaaacgcccatcccacgctccctgttaattgcgcgccttaggctgcttttgttcctcgggactttggtgcaaagtttccagacatgagctcccaggcccttgtggacagaggcttcatcttctccctgttttttcacttccacagcaaatgaaggacgcaatgactaccacccgatgttctttacccatgaccgagcctttgaagagctctttggaatctgcatccagctgttgaacaagacctggaaggagatgagggcaacagcagaggacttcaacaaggtcagtgtctccgggctgctctgaggcccacgggaggagaccatcacacgacagcctttgacagctggctggcacctggagaatccctgagctggaaaagcagcttggtctgcagaactgagtcacaagactgaggcactggggagcctcagccccatctggttgttgctccctctgtgaccttgagcttgtcttccacttggtgccgtaggccctcatttgtccattgaagttagcacctgtccctcccgtcctccagagaggtcaggaggataagcattagaagactcactgtggtttattgagtgcttactgtgcaggtactgctgtagttttgtgaactgggaaggttaggagagaagagtggactggcatgatgtgcacaccctgggtacttaatcgatagttatccctcggtgctttcagtcctcactctatgcagagcactgttgtgccaggccctcaaaagctgatcatctaggggtcgagtgttttgaagttgatcatctcatcataaaaaatttggaaagtataaagaataaaaagttacctgtatttacaccatccagtgacaaacatttttgttttcctctagtcttttttatcccctacaggtttttccttcattagcaagatcatactgcgcatgcagtgtggtatcctgttgttttctttaatagttgttttaaggggaccaatgcatttttttaaaacaccacagcgtgccagaactgcgcttgcctttctattcttttgtttgtttttttgagacagagtttcactcttgtcacccaggctggagtgcagtggcactgtctcggctcactgcaacctccacctccgaggttgaagtgatccttctacttcagcctcctgagtagctgggactacaggcgtgagccaccacacctggctaacttttgtatttttagtagagacggggtttcaccatgttggccaggctggtctcaaactcctgacctcaggtgatccgcctgcctcagcctcccaaagcatgagctactgcaaccggctggtatctcatattctttatggcaacacctatcaggagatgtgtcttcctttctctcggtttagagatgagtagatgcacacctaaggatgttaagtgacttgctgaagggacagagtcaagatgtgaacccatttctttctgactacaaaaatccatgctcatttcccccacaccattgaccaattgaaatatatgggaaataaagcatctatcagtgtcagtcatgtgacctgaataaccatctaagaaggtataccttactcacccagcagatgtctgtagtgcctgccctgctcaagaccctggggcaggaaagagccttggtgctccataataggcctgtccatttctcaagagtagtggtgtgagttggctgggttcttctcctcttaggttatgcaagtcgtccgagagcaaatcactcgagctttgccctccaaacccaactctttggatcagttcaagagcaaattgcgtagcctgagttactctgagattctacgactgcgccagtctgagaggatgagtcaggatgacttccagtccccgccaattgtgtaagttccatctcaggggaggctggcgggggaggtggctgccagctctgctttccttccagagctccactgtccccatgaccttccgctcactccagtgtgtgtccaccccagggagctgagggagaagatccagcccgagatccttgagctgatcaagcagcagcgcctgaaccggctctgtgagggcagcagcttccgaaagattgggaaccgccgaaggcaaggtgagaggagacggggcaatccttggtgccgggaagagcctgcctggatggccccttttgtgcccaggcctttcccagtactgtcgttgctcacctgtttggcttcccttgtgttccagaacggttctggtactgccggttggcactgaaccacaaggtccttcactatggtgacttggatgacaacccacaaggggaggtgacatttgaatccctgcaggagaaaagtaggttcatttctctgttgatgtgtcatggttgctggacttgtcaggagacaggagttctagtccagctgtttgtagctgatcatctgggcttgtacctgttacctctctggacctgtttccttatctgtcagcgatttcctctacctggcctactcggtggggtggtttggagaaacaatgagttcacaggtgtgaatgtattgtgtagactgtaaagggtggtacatgactaagtcgaaaggcagtagttaagaggagaagctgtgaagccagactgcccacattcaaatcctggctttgctcctaattaacttgaattctaattaattgcaagttctcccctctgccttggtttcttctcctgtaaagtgggaataatagccacactttcctcctaagaggattgcatgagtaatgtatgcaaagcacttagaagagtggttggcaggtagtcagcataactgttagcagctgccactgctgttggcgatgatggcatcatcatcgccattattgtgaaggagaggggaagggagtcaccaaggtcccgttccttggggatataaatccaagagccctgaagtgaccctcagttagctttgacacagcctcactgggctgtggtctacaggagtgaccaagacggagggaacagtacaaggccatcctccccaccaccctcactgagctcatacagcagcccttggagtttggggctgaggcttcctatgcatctgccccagtacctcccttccagcactgatgtaggcactgaccagcttgcagcatgaacttccagagactaattcccatcatttatcagttcctgttgcagacattaaggccattgtcactgggaaagattgtccccacatgaaagagaaaagtgctctgaaacagaacaaggtgagtagagaggccagtttgagtagctggcccagtgatacttggagagtgccattggtggtggttttttccaggtgcattcttggcatcttcccctctctattcctgaatgttttattaagaattttgaacatacacaaaaatagatggaacctctgtatacacatcacccagactcagcaaccatggccagttctgcccatccacttgtttctctcctttatcgctttgaagaaagtcccaagtatcacactgtttcatctgtaaatatttagtgtacatcgtatagtatataacattgccaccagtccattagcacacataacaggaaatgaaagtagttatttcagatcaaatattccactgatggtgactttctaccaattgtcttataaatgtcataatttctctacagatatataaatgtttatatggatacacacacacacacacacacacacacacacacacacacacacccatacccatcttgtctaaaccagagtctaagactggtcttttaagtttcttaattcataagttcccccgcccccccatcccccaccatcttttcctttgcagtttattagctgaagaaccagattgcttgtttggtagtttcctagcatctgaattttgctgattgtttccccgtggtacagtttaacttgttcctctgtcccagatctgtacattggaagagggatctagaggtttgatccagttcaggtttaacttttttcctggccagtgtcatcagtggtattatgttctatcaagaggcacataacgtctggtggtctctccttttgtgataattagcagactgttgaagctcagtgcctcattccatcagtcaactaaggtttgcaaactcatgatattttgatgcagtcattgcttttcatttatgagctgaaccatgaaacttgcccttatctactattggtttcccagtggtacagtttatataggaaacgagaataaatgctgattcttcttttatgtacttactttcaaaataatgagttagttccttggtatcatgcaacagtgaccaattttgtgtgtgtgtgtgttttgttttgttttttaattgttaagacattcctatgccaaatacagcacgatagaagttgttagtcatcttggtaatataaaaacttttaggataacttacagtcatggatcgtgaccttccagggttctgagtgttgaaaatgacttttttccaatcttaaaaatatcacaacatctttgatgtgacttgggcagggagtgggtaagttaaggttgatttatgctgggcctcatctccagccacacttgtggccgcctaggagcattgatgacattcatctgaatcagcatgtttggtgatgatgccgagtcactaggactttggccaagatcttgatgtgcagaccccaggctgttccatcgctctaatttaaaccctttctccttcaggaggtgttggaattggccttctccatcctgtatgaccctgatgagaccttaaacttcatcgcacctaataaatatgaggtgagcagtgtggcgctgccttagacaacagagctatttctgtaactcttcagttggtggcaggaatgagcaaaacaggaaagtcccctgtggtgggtggctgcagtgtatattgaagcctaggaaggctttgagaagaaggtggcatttcaataggatgggaatgtctcaaaggaggagctgtggttggggggcacccagatgaagcagcaggtatcattacataatgctggacctgaggttcctccaggcgcattgggtggctgccaaggatctgtcacactctggattgtttatctgtgagctgggctctccacattactcttcagcagcagccataggttgtcattacaaagataaggtcaactaggaatgagtcatttacctgggactgggaaaattctccccttttcagtttctctgtggtcagctacccaagagaacttgacagatccttcctcctaggggctcctggtcacatgttgtaatggatccagtgtggactttgaagccagatggaactggtccttctgacaagggccctgtagttccatctgcagcactggaagatactagatattaaatgagtgattgcatttgagaccctatgtgcctggtgagctctgagagccatcactgggaactagaggtgggacttctggcagaggagacacttgggcagggcctgagctgccgctagtggaatttggttgagaggaaatgaagaacaagcaagtggggaaccaggtgagcaacggtgtggaaaaaggaaaatggcagcagaggaagcaggaagagtcagggagcggtgggatcagaaggcttcctggtcaccccctcttagcatgagacccaccagttccatttctttagtatttactctttaatatgtattgactggattatttttaattttgttttcgggggggcggggcacaaaattgagatcccacagtgacttctgtttgtgtcttgcttcttttcacctaatacatatttcccttctctcgcttctgattttgggtaacttcaggtagatgatgccccagtactcagatctcattttgctgtattcgtttattgcatttttaggttctccttcatattattgtaaggagttgtaatataaaaccccttataaaaaccagatctcttgagaaagtgaaggatcacctcctaatttatctttgctatcattccaaatcagttttgcctatactgattagttccaaaaggaactgttgtgagccccatcagaaaagagaccttggcaggatctcctgctgaccaggggtcacgatgtgacattttgcaacttgctccccacagtactgcatctggattgacggcctcagtgcccttctggggaaggacatgtccagtgagctgaccaagagtgacctggacaccctgctgagcatggagatgaagctgcggctcctggacctggagaacatccagattcccgaagccccaccccccatccccaaggagcccagcagctatgactttgtctatcactatggctgagcctggagccagaaacgacggtacccaggagaagggattttgggcccaggagaaacacttacattctggtgccttgtcttttgcttgtacagaatctgtagtgattttggtggccagtaaatgccagccatttctcaaacccacctcggaccacccagagtttcctcttggtccctgtctactaagagtcatgaaggcagggtgctctgcccactccatcaccatgaagcctgggattgggccacgaggaacaaacagcagatgcccttgccttccagtccaagaaactgcttcttgaaatggatttaacaacagccactcaccttttcctcctgagcctgctctctgatcagctggatccccacgtgagcaacagctggcccaggaaaggctgcctgcagaggacaggtgtgttgggcgtgttgagagccttgaagtgactacctgtatcttagatctgagtacaagcctgaggcttttgcttttgtcttttttgatgagggctcactccagcttcatatggtgccaagacgttgctgcttctgaggttggctctaacatctctggtctttagagccaccagatctctctggcccatacagatatcagagcagacggaaatttctccctgcaagcgctcagtctcatcccagcaagtcaaagacctcctggccaagtcctgccctcttaagtctccaggaacgctgcagggaaaacccagctgaggcctgggcctagactgtggtgaggtcactagattctactgctcttcccccacattaataccttttccttcctcagagagaaatctcccctaacctgaattgcagccccctccagtttgctttcctttggccttccagaccccaggaagttggccttcccttcctagtgctatggtttctgccattggccatgatttcagggagctggctgaggccggctgaggccacacctgtgccagtggggcttccctggtgctgcagcacttgtaaaccacacacacagcctctctccctggacatacgttagcacattggcattcagtattggtggcctggcatggtaggtactacccaatgaagagtgtactatatattttcattactataggccatacttatacagacgtgtatatatatttatataagatctacctatcttaggatggaaccttggggaaaaataaaattgaggggaagtaaaaagtatgtaacacttccagttgtgagccaagattgtaaccagagagcagccaggagcttcctgtcagtaaccatgttttcaataaatactctttcatgtacaaa

SEQ ID NO: 1003 - DNA, 14886 bp, Homo sapiens
ccggcctcgcacttccggtggggagattccggcctggagctcccagggccgaggtgagtgggtgtgcggccggcctcccggcgcactcccagaggctggggggccggggctggagaagggaagcgggctccccacccgggatctgcgcgggttgacatggggcacgccacgcccctgcccctccccgggcctcagtttcgccgtctgtggagggggcaggggtctccaagcgccctcctgcaaggcacctgccggacgccggctcatctggtatttcctgagcacctgcgacgtcctgggtgcgggacccgggccggaatcggacacggccctgccctctgaggggctgcttcccgcggtgggattggggcgggcagtaaacacgtgagcaaacaaggaaacgtcagaggtgggagtgccacgaggattgggaggggtggggcattggagaaagtattcagccaagcggaggtctgcggaagggagctgaaggcaggaagagcagcaagtaaagaaaaacacaggtttgatgtgtttgacacgtggcagggggccgctgtggcgggtgctgggaccagtggcagaagaatgaggttacagaggccttccttgtggaccaggctgaggagctgggcttagccttagggcatgatctgtttcgtgtgccatctctctggctgctttatagattccaggccttaggggcgaaagaggaaacagggagaccagttagaccagtggcagtcagcaggtgaaagataattgtggcttagactgtggtagtgggaatggagaggaagagaagtagaggggtcaagaagtgtattgaaagtggaactgacagggcaggatttgagaaatgacagaaataagtggtcaaagatgacttcatcatagatttttggttttggcttaagtaaccaagtgtattatgctggcatttactaaatgactttgggatagattgggagcgtgagaaataattacgaaatcttcttagggcatcttaagttttagatatttggagtgcagctaccaaataggcagttagatatatgagtctgatacagaaaaggtcagggctgatgtaaagaatttagaaatcattggcaagtggattgggtaggatgagattatgtagggtaagatttaagagagaagagaagccaggttccaagctttaggcacccaatttttatagattgagttgacaagaaggtgccagcaaaaaagaccaataaggagtccagaaaagcagaagaaaaaccaggagaatgtggtatcgtggcacccaagagaaggttttttctaggaggaggaagtgatccattgtgtaaggtaagaatagagactaagccggcccggcacggtggctcacgcctgtaatcccagaactttgggaggccaaggcgggcagatcacctgaggccgggagttcgagaccagcctgaccaacatggagaaaccctgtctccactaaaaatacaaaattagccgggcatggtggcacatgcctgtattcccagctcctcgggagcctgaggcgggagaatcacttgaacccgtgaggcggagtttgcggtgagccgagatcacgccattgcactccagccttgaaactccatctcaaaacaacaacaacaacaaaaagaatagagactaagccttcgaaggggcagcagggaggagggtgtggtgactcattggagcagtggagatgggctgaagtgagagcagggggtgaaggagttggactggcagtgcggggtcctctggggaagtttcactgttaaggggaccaggaggggagtaagcctctaccatgagccagcatttaatgctgtacctgatgccactttacagttggagaaactgagtccagaggtcaagtaacttagggtcacacagtagtgagtagggacaccaggatttgattctcagtgtctaactccaaagcccacactcttaagcactaaaccatgctgcccaagttacagttaggaagatggagggaagcaggtgtgccagtgatgcaccagccagccttaccttgatgtgactgctgcccccagctaagctgctctctgtggaaagtggggcagaatatggactttccttcctgagcaaatgagatttcaaaaagagttgtttactcctttaaatcttgtttcccttataaaataagggtggggaccttttcagtttcacgtctgtgtctccagtggtgggcctacaggagtgcttgataaatgctcattaagtgcctagatgatctccagggacccttctagctgagatttggctttgtgtttgggcataggtgaccttctgaatcccaataagaaaataagttaaatttgagacagtgcttcttgtaggcggggtagccatagggacttattggaggcaggggaactgggccaggtctgtgaaggaaggtcagcatttgaacagtggagggagggtgttgcggtgttgcagtgctgcagcaggaaatgcagcaaaagcaggagctgcaagaagttggttaacagaagagtgaacagacttccctggcttggaagccacaggaggagccatgagggaagagtgctcagaagaaagctctgttagtgccagcatgtcctgtgagtgcctgtcacaggacagggtcagcagtggttctcaacagggagcaggtttgatcctcaggtgacatatggcagtgtctagagacatttcttgggtatcacaacttgggatggggggaaggatgtgacaggtgtctggtgggtatgggccagggatgttgctaaacatcctgccatgtagaggatgggtcttctcacaaagaattatctgtccccaaacagcagtaacgcccaggttgagaaaccctggcgtagaggaaacagtgtgggttttgagatctgtagacgtatgtttgaggcccatgcgccctctttgttggaggagcctgatggtggtggttgcaggagaagtagagagaaccgtgtaggagactcctgcagtcatttggggagaggatggtggctgagatggtagtggtggagttcaggacatgtgctcatatttgggatatttctgaagatagagctgacggtatttattgattgaatgtgggctaaggggaagagaggaatcagatgagcctaaggcttttggcctgagcaactaggagagtagtggagccatttgctgggatgggaagtaggaagaggagcaggcttggatgaaatgggggtgtggaaaacacgagtcagtttcagacactctagatgtgagtgagatgcctgatattagatatctaagggaagaagaggttaggtaggcattggatattcttctggagttcacatgaatcagagccggggcatatattgggaagacatcagcttacagaaggcatttgaaggaatgagaatgcattaggtcaggtaggagtctcaactcattggatctgacacctcttttttattacaaatattttgtaacagtcccttttattaccctaaaatgaaacatatgattaataaaaactgcctacacataattttttaaaaatcaacaaatgcagccgggcgcggtggctcacgcctgtaatcccagcactttgggaggcaaggcgggcggatcacctgaggttgggagttcaagaccagcctgaccaacatggagaaaccccatctctactaaaaatataaaaaattagccgggtgtggtggtgcatgcctgtaatcagtcccagctactagggagcctgaggcaggagaatcgcttgaacctgggaggcggagcttgtggtgagccgagattataccattgcactccagcctgggcaacaggagcgaaacttcgtctcaaaaaaaaaataaaataaaatataaataaccatgccctataacataaaaggaaagtaattgatagtaaaacaaaatatgtttcaatatgtaagtttctgggcacaatagtgctggaagttgcagtgaagctgtcccttctgtgtggaccctctaggagtgtgatggccacagacacagactgacacagccgtgttgtgtcgcacctcgaaaaccactagtgccattgctgtagatgatgtggtttttccagaatggacacttttggtgccattttgagaccaattttgaccattttcagtctcccttcattgtacataggcgtcttattcttggaagtgttagttcacagcagaaccatggaaacactgcactgtgtttacatgtaaacagagttacattctaggttcagataattataagctaatctttcacctatatggatgtcaaagtcgtgcgggatgcagagcagtaattggctatgtggactgccccttctttatccctgcttactgaacgccaggagcatatccccaaaataccgccacaggtttccaaagctcctctgaagacaactgtagccccagagattcatttggacacagccagctccctgtttgccccggggaggggaaatagtaacaagagttccagagtgcagaatggaatgtaactgctcccttcagaaatgttggggtgggagatggagaatgtgtctgatcgtgaagcctaggaaggcttcgagaagaaggtggcgtttcaataggatgggaatgtctcaaaggaggatctgtggttgaggggggcacccagatgaagcagcaggtatcatcacataacactggacctgaggctcctccaggcacagacaggtctacccggcatgctccgggcactcatcagggttggctggattgacagggaggctgggagtggtttcatttggcaataccgtaaggcaggctctgcttccagggagtagtggttacagcctggtcttacagtgttccagccgttagagtgttggtttccttctccatttttaacccctaaagaccagaccagtcccctgaaaatcgcatgcctgctctctgtcagtcatcaaaccagacggagaacttaaagtacaccagctgtgcgtaaggccagtgtggtcttactggtccctatctttgtgccgctcgtagcctctcaggggacagacattactcaaatcacaccctgcacaagtgctatgaaagagaagtaggagagccgtgaaagcaacatgtatctcaggggactgattcaggggatggggtggggttccctgaagaagtgacctctgagctgaagataggtaggattgatgaaggactgaagggtgggtgcagtgttcgttcatttccttcagacaacgggaagaaagctggtgtgtttggggagctgaaaggcgcccagtggggccaggtcctggagagcctgtggctgagactgggaagaccagcagggccagatgaggccatgggagccgaaagaagggtgctggtctttatcagaaaagcactggaagctgctgaagggttttaagcagtggcctgacatgatcagtttgtgttttaaaaggtcactttggtggcagttcatggagaatagcttgaggtgacaagacagcagacacgacgtgggtctctgggactgcctgtgccgttgtgggcagcccctccagagccctgagtcacgcagccttcagaggcacccatggctacgagaagcacagtctctgcctgaggctccagagcggccctttttccccagcagcagaccttgggacctgtgagcgctgcatccaattaaccatgggaagggtcagcaccagccaccagccccttaggtgaggactctgcctggggctctgctgatggttccgaatcatggagctgcagagagctcctccagcctggagacgttcttggtgaaagctgtggtctaactccaccggctcttcctgcacattgtattcaagaggggtgcctgcccccgctgactcaggagctccggtgctgcagccgccacgaatggggaggtgggccctcgatgtggcctttttgtggaaggcggtgttgaccctggggctggtgcttctctactactgcttctccatcggcatcaccttctacaacaagtggctgacaaaggtaccaggaggccttgctggggcggggtgctgggatgaaggtggccagagccatggctacggtgcccttcatgtttaacaggaaggcacaagcttcaaccagtctaactggaagccagtcacggctgggctggaacagggccctccaagcctgccgtgccagggttccccttcagtgtttggatccagggaaaccaaggagagcggggggtgtgaagggatgagctggggaaactggggctcaagcagcagctatttaccccactagagaagtatttcaatattttaataagtgatacaacgtagtgggccgcagtggctctcacttgggcataggccgtgaggaaggctgggcaggtagctcacaggtgtgttgaaatggtggagacagcaccaggctaggattgagtctcttggctgccacctgtcttcgtgacctaagagtctgtcattccaagcgatgataccgtaactaagggccctacacacatagcaaggtcctcatgaaccaccgaatgagccccactccagcagaggggcgaagaggaagagggagccggtggggggcaggctgtctaaaccaagccggggtgtctgctttgggctccatacagagcttccatttccccctcttcatgacgatgctgcacctggccgtgatcttcctcttctccgccctgtccagggcgctggttcagtgctccagccacagggcccgtgtggtgctgagctgggccgactacctcagaagagtggctcccacaggtaggtgggggacctcagtgagggcagagcaggaagaggggctggggaaccataggatgagaacaagagagacacccgcatgtctggaagccaagtccctcccctcttcctgcactgttcctcctctgccctcttgacctggcctcccaccacccacgctgctgcctcttgtgcactgcgtgccttcccactgccccaccacacacccacaaaaccccccctgcacctgcggccccgcagctccctctcctgccagcagacaccgagcctggagtgcagccctcaggcctggagataagtggtgagcaggcagggtccctgccctcgcagggctgtgacacggacatggagggcactacggagcccagggaggggaccaacccaaggccggggcccatggctggtagaggaagatttcctaggccaggtgccaagtaggcagagccctgaaggatgcgtgggactggttggccctgggaggaggggccctcgtggcccgagggagatttagtgccagctgtggggtctggaagggaactcaaagtgtttcaggatactgagaacccggtgctggccagaggaagtgggaaaaatgagaactgagagggtgggcaggggtcatgtcctggaggccggattccccgtggaggagtttgtgttccatcctgagggaaaagggtttccagtaagggatcaaccagatcaggttaatacctccgctcagggggctcgccggagtgtttgtggaaaccataccggcccagccagttggaatgggccccagccctaatgctagagcagcccccgacctttgggggccagatattaaccctttagttgctggtggaaaagaaggcccaagggccccacaggaggcaccgggatggttcagaagtgggggacactcaggtgcctcagggtaccagcccaccccagcagagtgtggacctcccaagctgtcctgtgggtgcctgtgtcttcacagctctggcgacggcgcttgacgtgggcttgtccaactggagcttcctgtatgtcaccgtctcgctgtgagtactggccatgccctgctgcctcccttcaggctgaagctgtctgtctgtccagcggggtgtctgcacacccggctgctaggccagccactccaccactctgggaccagcccttgctctctcagcctctccctggcacccagcagctctccgggaagtcgccagcctcttccgtaagcccagcgcagaggagatgctgtgcccacctgccaggcagcgtggggaagccagggagctctcccagaaccccatcatcagagcaggggaaggcaggctgcaaggccacagacaggtggccactggtgggtggtacacgcagccgcagcagagccctatgtggcctgggggctacacaagagtttcttcttccctctgatgttttgcttcagagagcactgttcctgccttcttgtcctcctacttctcatccttccttcccgctcctgggctctgccgagggttaggtaaagaacaggactcagggagctcaacgtcagacctgtaacctcttctctctggtgataaccagaggcctcttagtcagagattccttctgattaaaggtcgcttatcactcagatgacagcccagctctgtttggtcatttcgctcagtgatttgtgctcctgctcctttctcggtgatgggtctgagccctgagctccagcagtgcattgtgggtaattttgcttccaggtacacaatgaccaaatcctcagctgtcctcttcatcttgatcttctctctgatcttcaagctggaggagctggtgaggccccagcgtctcttgtgtccttcctgcccccacagatgctaagaataaagtgggagtctgagcagtggcttgtcctgctgtgtgacagaggagacaagcccagtccaggtggcagtagatccctttctgagaagggacctagacatgggcaatactcagaatatttagaaaccagtgtggcagggtaatgaccaaaggtgaaagcactgcaggatgagggtcccagcagagctgggtctaggaagcaccctgctgtgggaggcagtagccctgtgtgttaggcccagggaggaggtgggaccacttgggggcctaggacagccgtcagtgtggcagagcaagcagggctgttggcataccagctgaccgtcagccctacatgctgacattggtgggcaaggactgtccaggaccccctgggatggagctgaagggtggaaggatttcttgccccaggggcagccaagatggctgctgaccccaggctccaaatgtgatgaacccttgaccctcaagacccccgagttagctgccactgctccccatcctaccagcgcgcggcactggtcctggtggtcctcctcatcgccgggggtctcttcatgttcacctacaagtccacacagttcaacgtggagggcttcgccttggtgctgggggcctcgttcatcggtggcattcgctggaccctcacccagatgctcctgcagaaggctgaactcggtgagcacgtgccactcatcctccagagagaggaaccccggcacaggcagggcggaggcagggcagggccggaccagacctgatggtgcctgtcccccgccctgcaggcctccagaatcccatcgacaccatgttccacctgcagccactcatgttcctggggctcttccctctctttgctgtatttgaaggtacgttgggccttccctctcaagggcacctcagtgcagcagaccacagatcctcgccctgagcccaacacagtggtagctgcagagattattgagatcaaagatgcagtccctcccctggaagcgcatggtttggggtccagcatgataaacgctacagagaaagcacatataaaattcagggaacagtaacagtaagtgtgcacagagccctgaaagtgcaccagggctgttctgatctttttaaacataggaactcatttcatccttccaaaaacctggtgtggcagtactattattatcccccattttgcaggtagaacaaaatgaggcccagagaagtaaagataacttgcccaaggtcccatagctcgtaaatgagccagaatttgaagccagcagcctggctccaagtggtccagccctactcttaaccaccctatcttgcctctaaggaatggggaatcagggattgttccaagatgctggagtaatcaggcaagtcagaaaggcttcccaggccgtggtttggagggtgagtgggattttggcaggctgcagggagcaaggcatctcggaagtaggaataggaggttcagccatgtccaggaatataacctggggatgtgtgttcaaggagtgtgggccacgcaggatcagcagagggtgggcttccagagctgggggctgaagaccaggagccagcacacaggagcctggggacatggtcagttgttcctccactgtcgtcctccagggatgaggagagccctggagaactgtgtaggctgggaggtgtgacgccaccttcctttctttgatgttttgggattagcctttgtcccctttctgtttatccttcctcccagagtcccgtctgtaatgccctcagggtcattacagaaaattctgtcccacatccatttaagtttcaagcagtgaagcgtcttgaacctccccaagaaaattattctgaagccccgttgtccaggaaacttctgttcagggcctcgttttttttccttctttaaaatctctccccactccttcattatgcccccttgtaccaaacgccacactctccctcccctcccgtgtgtttacaccatgccccatctctgcaaaacctcatctgaaagcccctggtagtcgtcacttggcaaagctgcatggatttagctcctttaatcttttctggtaaattaatcccccaagcgccttcattacttatgctgctcttccccgaattcccttcaatttgccgacgcctttgcagttctgctgagcccagcaccaaacaagatgtcctacactgtgaggctgttttgcctggggggactgtcactcggcatttctttggtgcttccctccaaaaatctcaaaatactcgtccagcttccagctaccacagttgtctcttgtgcccagttctgggccccccttcaccctgtgctaatacaccacgaggactttcgtgtgggagggacgccgggagtcattcttccagatggacagtgttggagggaccatgactcctccgaaagtctaagctgaatttggggtagggggtgtgcatgcctgtgtttctggagcaaggggccatgtgtttgcattttctttttgggaaatgttcatcaagtgataccacgggttggagaaataccagtctggtcccaggcctctcattttatcagtaaggaaactgaggtccagaaaggggacacatctcagcccaagtcccacagctctgtactagcaagacctagattaaaatgaacgtttgtagggatagaattttgtccctgtttgtaggtgaactggctgaaatgtagaccaaggagttccctgagtgggctggggcactgttggtccttcgtcacttggtagccgccctaccttctttagcccagtagttaccacagctccaaagaccccatgaagtcagcagccatgagcccctccccacagaccagtaagggaatactgtccaaaggtgcagggcacttccatccgtctttccatgcagggccacccccctctacttcaccccagaggctcagacgagccctccccatcattccgctaggatccccatcatcccactaggatctccatcatcccgctaggatctccttcatcccactgggatctccttcatcccgctaggatcccatcatcatcccactaggatccccatcattccactaggatcccatcgtcatcccgctaggatcccatcgtcatcccgctaggatcccatcgtcatcccgctaggatcccatcatcatcccgctaggatcccatcatcccgctaggatccccatcatcccgctaggatcccatcatcctgctaggatccccatcatcccgctagggtcccatcatcccgctaggatccgcatcatcctgctaggatctggcttgtattgcccccaggcgctctggcagccatcactgcttccctggtttccccaggtctcaggccatctgtgtgggatcactttataccttccatgctttttctctgggctgcagacagttagcaggtctcagtaagaactcactactacagtggaagatcttgtgtggttggcattgggctggccaaggcagcccaggacccggcctcccactctctctccctgttgctttcaggtctccatttgtccacatctgagaaaatcttccgtttccaggacacagggctgctcctgcgggtacttgggagcctcttccttggcgggattctcgcctttggtttgggcttctctgagttcctcctggtctccagaacctccagcctcactctctccattgccggcatttttaaggtacagactcgggcgtgatgccagtcctgtcttagagagggagcccccaggggtttctcaccagcagcttcagtcccagctcctgcaccccagggccctgcagagaagagaaggaagtgccccattaggtgccaggcactttgctgagtgctgtgctggcccctccttctgccttgaccacagccctgtgagagggtatgatcactcccatcccacagacagggacacagatggagagccgcccctccccaagggcacagcaggggcctcaaagccagctctgactctgctaggcctggaatgcattcacattttaccttgactgccaactctggcactgggcagtggcctggagccacaggttgaacagcccctatccagactcatcaggaaagagttccgtgattgactggcggtgtcctccaaggccatggccagggctagtgagaccctgagaaagcacccctgtggccagccttgctgtacctctgcctcgcaggcctgtccttccctctcatacctcttctcacttctccttctccctcccacacatttcaacagtcctccctgttcaggggcagggagggacttttctctttggccaggcacacaccagtgttgaagcagtgttgcctaaacccagaaatgcaggcctgtccaagggtcttctggtggccagccgcatgctgaggcatggctgtggttcttggatgaacggccttgccagtcctgtttggagtctctgtttatagagagccccgggaccagttgtgtcttcagtccggggtaacacagcattctcacacataggctcagggctctcttctgtggctgccttctggggcagccgtcctttatccttgtggataaggcgcgatctggacaccctggtccccagcctgggatctggtttgcctcttttattcctgacagaattccatgacaagcacctcctttgttgcatctcacaaaaggaggctggcgggacagcgccgcaagccggccgggtcccctgacctctctgcctgcctgggcccaggatttcagtaagatcttgatctgcccacctgagtgtacctagtgcccccaccttccaccctcctggtcaagcagccaaatctgcctgttgatcatgctccctcctgcttctctgcccccaggaagtctgcactttgctgttggcagctcatctgctgggcgatcagatcagcctcctgaactggctgggcttcgccctctgcctctcgggaatatccctccacgttgccctcaaagccctgcattccagaggtaacccagagtcccttccagaagcctctgttttctgttcttctccctgtgactcttagtgattctgatgcaggaagtgtgcccggtggctctgctgccgtcactcctctaggaagatgtgggggtcatctccagagtgggtgggtggggcctgggtgactcagcacacatgcaaatcagagcaaaccaagaaaaccacgactgggcctgtaactgtggtctctctctatcccaaggtgatggtggccccaaggccttgaaggggctgggctccagccccgacctggagctgctgctccggagcagccagcgggaggaaggtgacaatgaggaggaggagtactttgtggcccaggggcagcagtgaccagccagggcaaatggcttagaagcaggccactccccagcctgctgccagcactcactgtgctcaagccgccagggctcatcatggtagctgggagctgtggacgggagtcaccaggtggtggggccaagccagggactcatgacttttgcccctcccttcagagcctggtcacacaaggggcgagcaccaggccagcctgggactggccagagctgggcccaagctgcgctggaatcgcagcaggagaggggagtgggctggttcttcccaccacttcccaggctctgacagccgagactcatttccaaggcacagcagctttctaaagggactgagtttggactgggttttggacctccaggggctggagcttcatcacctgggcagtgtcttttctcagagagcaggtttctttatagtttggaaataaatggttcacggtccactggccgccttgtgttgctggagacgtgggggcagggaggggacagtgtgggcctggcctctcctttcctttccctgcctggagccttcttcaaatgtctggtcttaagccaggcctccttcattttctcgctcctgttagaacaccagtcccctccccagtggggccccactgcacctgctggcaggaaataaatgaatgtttactgagtactgcattctggagaccttacatgttttcacagcctagtttgaatactggctttgtcactagctgtgtgaccctaagcaaatgacctaacctgtctgtgccgtagttttttaatctgtgaaatggggataatgtctatctcagagtccttttgaagattgagtcattattagtaacagattaaatgttatataagca

SEQ ID NO: 1004 - DNA, 418 bp, Homo sapiens
tcaggatgatttattttcctttattttggagagaagtgggggagggggtcagaggtacttgcaaagccttgtccttataagaggggcccttgtgtgaggatatccttacctctctccacttgagttgtcagccgcccttgcccttggcagtagggacgaaaatagcatttcctgtcccagttatcttccccattttctgatgtcgtcccacacagaggaggctttgcattgtgtcctttgaggggaaaggggtggcatcgatgagtggggaggaagcaagagagcatgtagctgggccctgctgatgctgggatcttcctaggatgactgcagaaagaagtagcctggctcctccagctaaccactcaaccaagaaaaggctgtctattcttatctgtctcggagcatatgcttctct

SEQ ID NO: 1005 - DNA, 6801 bp, Homo sapiens
cggcctcgcacttccggtggggagattccggcctggagctcccagggccgaggtgagtgggtgtgcggccggcctcccggcgcactcccagaggctggggggccggggctggagaagggaagcgggctccccacccgggatctgcgcgggttgacatggggcacgccacgcccctgcccctccccgggcctcagtttcgccgtctgtggagggggcaggggtctccaagcgccctcctgcaaggcacctgccggacgccggctcatctggtatttcctgagcacctgcgacgtcctgggtgcgggacccgggccggaatcggacacggccctgccctctgagaggctgcttcccgcggtgggattggggcgggcagtaaacacgtgagcaaacaaggaaacgtcagaggtgggagtgccacgaggattgggaggggtggggcattggagaaagtattcagccaagcggaggtctgcggaagggagctgaaggcaggaagagcagcaagtaaagaaaaacacaggtttgatgtgtttgacacgtggcagggggccgctgtggcgggtgctgggaccagtggcagaagaatgaggttacagaggccttccttgtggaccaggctgaggagctgggcttagccttagggcatgatctgtttcgtgtgccatctctctggctgctttatagattccaggccttaggggcgaaagaggaaacagggagaccagttagaccagtggcagtcagcaggtgaaagataattgtggcttagactgtggtagtgggaatggagaggaagagaagtagaggggtcaagaagtgtattgaaagtggaactgacagggcaggatttgagaaatgacagaaataagtggtcaaagatgacttcatcatagatttttggttttggcttaagtaaccaagtgtattatgctggcatttactaaatgactttgggatagattgggagcgtgagaaataattacgaaatcttcttagggcatcttaagttttagatatttggagtgcagctaccaaataggcagttagatatatgagtctgatacagaaaaggtcagggctgatgtaaagaatttagaaatcattggcaagtggattgggtaggatgagattatgtagggtaagatttaagagagaagagaagccaggttccaagctttaggcacccaatttttatagattgagttgacaagaaggtgccagcaaaaaagaccaataaggagtccagaaaagcagaagaaaaaccaggagaatgtggtatcgtggcacccaagagaaggttttttctaggaggaggaagtgatccattgtgtaaggtaagaatagagactaagccggcccggcacggtggctcacgcctgtaatcccagaactttgggaggccaaggcgggcagatcacctgaggtcgggagttcgagaccagcctgaccaacatggagaaaccctgtctccactaaaaatacaaaattagccgggcatggtggcacatgcctgtattcccagctcctcgggagcctgaggcgggagaatcacttgaacccgtgaggcggagtttgcagtgagccgagatcacgccattgcactccagccttgaaactccatctcaaaacaacaacaacaacaaaaagaatagagactaagccttcgaaggggcagcagggaggagggtgtggtgactcattggagcagtggagatgggctgaagtgagagcagggggtgaaggagttggactggcagtgcggggtcctctggggaagtttcactgttaaggggaccaggaggggagtaagcctctaccatgagccagcatttaatgctgtacctgatgccactttacagttggagaaactgagtccagaggtcaagtaacttagggtcacacagtagtgagtagggacaccaggatttgattctcagtgtctaactccaaagcccacactcttaagcactaaaccatgctgcccaagttacagttaggaagatggagggaagcaggtgtgccagtgatgcaccagccagccttaccttgatgtgactgctgcccccagctaagctgctctctgtggaaagtggggcagaatatggactttccttcctgagcaaatgagatttcaaaaagagttgtttactcctttaaatcttgtttcccttataaaataagggtggggaccttttcagtttcacgtctgtgtctccagtggtgggcctacaggagtgcttgataaatgctcattaagtgcctagatgatctccagggacccttctagctgagatttggctttgtgtttgggcataggtgaccttctgaatcccaataagaaaatgagttaaatttgagacagtgcttcttgtaggcggggtagccatagggacttattggaggcaggggaactgggccaggtctgtgaaggaaggtcagcatttgaacagtggagggagggtgttgcggtgttgcagtgctgcagcaggaaatgcagcaaaagcaggagctgcaagaagttggttaacagaagagtgaacagacttccctggcttggaagccacaggaggagccatgagggaagagtgctcagaagaaagctctgttagtgccagcatgtcctgtgagtgcctgtcacaggacagggtcagcagtggttctcaacagggagcaggtttgatcctcaggtgacatatggcagtgtctagagacatttcttgggtatcacaacttgggatggggggaaggatgtgacaggtgtctggtgggtatgggccagggatgttgctaaacatcctgccatgtagaggatgggtcttctcacaaagaattatctgtccccaaacagcagtaacgcccaggttgagaaaccctggcgtagaggaaacagtgtgggttttgagatctgtagacgtatgtttgaggcccatgcgccctctttgttggaggagcctgatggtggtggttgcaggagaagtagagagaaccgtgtaggagactcctgcagtcatttggggagaggatggtggctgagatggtagtggtggagttcaggacatgtgctcatatttgggatatttctgaagatagagctgacggtatttattgattgaatgtgggctaaggggaagagaggaatcagatgagcctaaggcttttggcctgagcaactaggagagtagtggagccatttgctgggatgggaagtaggaagaggagcaggcttggatgaaatgggggtgtggaaaacacgagtcagtttcagacactctagatgtgagtgagatgcctgatattagatatctaagggaagaagaggttaggtaggcattggatattcttctggagttcacatgaatcagagccggggcatatattgggaagacatcagcttacagaaggcatttgaaggaatgagaatgcattaggtcaggtaggagtctcaactcattggatctgacacctcttttttattacaaatattttgtaacagtcccttttattaccctaaaatgaaacatatgattaataaaaactgcctacacataattttttaaaaatcaacaaatgcagccgggcgcggtggctcacgcctgtaatcccagcactttgggaggcaaggcgggcggatcacctgaggttgggagttcaagaccagcctgaccaacatggagaaaccccatctctactaaaaatataaaaaattagccgggtgtggtggtgcatgcctgtaatcagtcccagctactagggagcctgaggcaggagaatcgcttgaacctgggaggcggagcttgtggtgagccgagattataccattgcactccagcctgggcaacaggagcgaaacttcgtctcaaaaaaaaataaaataaaatataaataaccatgccctataacataaaaggaaagtaattgatagtaaaacaaaatatgtttcaatatgtaagtttctgggcacaatagtgctggaagttgcagtgaagctgtcccttctgtgtggaccctctaggagtgtgatggccacagacacagactgacacagccgtgttgtgtcgcacctcgaaaaccactagtgccattgctgtagatgatgtggtttttccagaatggacacttttggtgccattttgagaccaattttgaccattttcagtctcccttcattgtacataggcgtcttattcttggaagtgttagttcacagcagaaccatggaaacactgcactgtgtttacatgtaaacagagttacattctaggttcagataattataagctaatctttcacctatatggatgtcaaagtcgtgcgggatgcagagcagtaattggctatgtggactgccccttctttatccctgcttactgaacgccaggagcatatccccaaaataccgccacaggtttccaaagctcctctgaagacaactgtagccccagagattcatttggacacagccagctccctgtttgccccggggaggggaaatagtaacaagagttccagagtgcagaatggaatgtaactgctcccttcagaaatgttggggtgggagatggagaatgtgtctgatcgtgaagcctaggaaggcttcgagaagaaggtggcgtttcaataggatgggaatgtctcaaaggaggatctgtggttgaggggggcacccagatgaagcagcaggtatcatcacataacactggacctgaggctcctccaggcacagacaggtctacccggcatgctccgggcactcatcagggttggctggattgacagggaggctgggagtggtttcatttggcaataccgtaaggcaggctctgcttccagggagtagtggttacagcctggtcttacagtgttccagccgttagagtgttggtttccttctccatttttaacccctaaagaccagaccagtcccctgaaaatcgcatgcctgctctctgtcagtcatcaaaccagacggagaacttaaagtacaccagctgtgcgtaaggccactgtggtcttactggtccctatctttgtgccgctcgtagcctctcaggggacagacattactcaaatcacaccctgcacaagtgctatgaaagagaagtaggagagccgtgaaagcaacatgtatctcaggggactgattcaggggatggggtggggttccctgaagaagtgacctctgagctgaagataggtaggattgatgaaggactgaagggtgggtgcagtgttcgttcatttccttcagacaacgggaagaaagctggtgtgtttggggagctgaaaggcgcccagtggggccaggtcctggagagcctgtggctgagactgggaagaccagcagggccagatgaggccatgggagccgaaagaagggtgctggtctttatcagaaaagcactggaagctgctgaagggttttaagcagtggcctgacatgatcagtttgtgttttaaaaggtcactttggtggcagttcatggagaatagcttgaggtgacaagacagcagacacgacgtgggtctctgggactgcctgtgccgttgtgggcagcccctccagagccctgagtcacgcagccttcagaggcacccatggctacgagaagcacagtctctgcctgaggctccagagcggccctttttccccagcagcagaccttgggacctgtgagcgctgcatccaattaaccatgggaagggtcagcaccagccaccagccccttaggtgaggactctgcctggggctctgctgatggttccgaatcatggagctgcagagagctcctccagcctggagacgttcttggtgaaagctgtggtctaactccaccggctcttcctgcacattgtattcaagaggggtgcctgcccccgctgactcaggagctccggtgctgcagccgccacgaatggggaggtgggccctcgatgtggcctttttgtggaaggcggtgttgaccctggggctggtgcttctctactactgcttctccatcggcatcaccttctacaacaagtggctgacaaaggtaccaggaggccttgctggggcggggtgctgggatgaaggtggccagagccatggctacggtgcccttcatgtttaacaggaaggcacaagcttcaaccagtctaactggaagccagtcacggctgggctggaacagggccctccaagcctgccgtgccagggttccccttcagtgtttggatccagggaaaccaaggagagcggggggtgtgaagggatgagctggggaaactggggctcaagcagcagctatttaccccactagagaagtatttcaatattttaataagtgatacaacgtagtgggccgcagtggctctcacttgggcataggccgtgaggaaggctgggcaggtagctcacaggtgtgttgaaatggtggagacagcaccaggctaggattgagtctcttggctgccacctgtcttcgtgacctaagagtctgtcattccaagcgatgataccgtaactaagggccctacacacatagcaaggtcctcatgaaccaccgaatgagccccactccagcagaggggcgaagaggaagagggagccggtggggggcaggctgtctaaaccaagccggggtgtctgctttgggctccatacagagcttccatttccccctcttcatgacgatgctgcacctggccgtgatcttcctcttctccgccctgtccagggcgctggttcagtgctccagccacagggcccgtgtggtgctgagctgggccgactacctcagaagagtggctcccacaggt

SEQ ID NO: 1006 - DNA, 7793 bp, Homo sapiens
gctggggtggtcgttttgaatggatgaggatgacggatcaggaatagagccagcctgggcccatttgtcctgtcactgtctgtgttacatgaggttccttcttctctcactttttccccactctgctactgaaacaggaatctttctcaaatgagtgttttgtatttcttgcccattcgtatagagaagggttgcctggcgcaatttgatcagggcaggagagggatactatgggatgttctagtcgaagtgtatgtatctgcctgttgcttatgattcacagtattcctgctggaagggttcatttttctgaggcttgaggagaagttgcttgtccaggattctgttcttccttgggtccttggattctcacgctgctgtcgtttttcctgttcagtcctaatccagacctctgtggtctgtcacatagcaccctcctccctctctgtgagtctcctgcttggctctgtcatattcctctttttttccttttctagaaagaaaagtcaaaatcgaacagttcagcagcccgagaacctaatggctttccttctgatgcctcagccaattcctctctccttcttgaattccagggtgagttgcatctctgtgtcttccttgcaggagaatgaaaacttggatgaatgcattaataagaagaattggccaggtgcagtgactcacacctgtaacctcagcactttgggagtctgaggcgggcagatcacctgaggtcaggagttcaagacgagcctggccaatatggtgaaacccagtctctactaaaaatacaaaaagttagctgagcgtggtggcgcgtgcctgtaatcccagctactcgggggtctgagacaggagaatcgcttaaacccaggaggtggaggttgcggtgagccgagattgcgccactgcactccagcctgggctgcagagtgagactccgtctcaaaaaaaaaaaaaaagaattctgtgtatcaattcagtgcctgctgtttcgctggtattttgcgaggcacttgacctaaatcttttcatttaaacttcacgataactctgcaagataggtaatggtattctcattttccagttaaggaaactgaggctcagagaggttaagttacgtgtctaaagttacataacttgtaagtgacagactccatgtcaggtcctggttgtccgaatcagaagcttttttttagattgtacttcattttttattttttattttttgtagagacagagtctggctatgttgtccaggctggttgtgaactcctggcctcaagcagtcccccagccttgacctcccaaggtacaagcatgagccactgcacctggcctagactgtatgttttatcatagtcgcttagagtaggctacccaaagccgaagcttctgcttacccactgttaggacatgttctgcctcctaaaccaatcccgccggatcatcaccgtagtcatgatactgccttttacacctacctgctaggtactgtctacgaagcacttttactttactttctcatttttacccatgtatcagcctgtgatataaaccaggcagttattatcatccctatttaaggaaactgatgctcagggaggaacagtgttttgtctaagctcaaaagtgacagttttattcatttggtgacaaaatgctacttccattttagtgtgggtattaaaggtctttataggagtcaagactagcatgagtttatgactttctcttcaaaaccagattggagctaacccagcgtgtagttattccttccccacctctttcccaggccccaccaaggtcaaccatgtgctgttggaaagggaacaccaacgtgtgttcagtagtcagaaggctctgggagacatatgaggctccatttcctcagtctggccaccatctcctccttttcatttagtaaacacttaatgaactcccactgtatgcaggtaccgtgcgttgcactggggagtcaaggacaagtgagccacagagcctgtccacagaggctcatgggaggaagcacgtgtgcgaaatgataaatgcaggcgtgcacaggctatcacaggagagtaagagagggtgggcatttccacctatgcgagccagggaggtagggctccgcggaagaagtgatgtcggggctgtgttgggaggtctgaggctttccaggacaagagaaggcagcctagccaaggaacagctgggcagaagcacccatgcatgacgaagctcttgggttagggtccagtctgcctggagctgaggatgcttgtaggagaacagtaggcactgaggccagagatcagaaaggacttcctatgttgcgataaggccagctcctgcctctcctaagaagtactgggtatggctgggcgtggtggctcatgcctgtaatcccagcactttgggaggctgaggcaggtggattacctgaggtcaggagttcgagaccagcctgaccaacatggtgaaaccccgtctctaataaaaatacaaaattacccaggcgtggtggcgcaagcctgtaatcccagctactcaagaggctgaggcaggagaatcagttgaacccaggaggcagaggttgtggtgagctgagatagcaccattgcactccagcctgggcaacaagagcgaaactcggtctcaaaaaaaaaaaaaaaaaaagtactgggtatgacatttctcccttaggcagcagtggagcgtcgaagggtttagaaaggtctctctggcagtggtttgcagttcagtttaaggtacgtgagactggaggcagggcagtgaggtatgtggctgttgcaggaggccaggctggagatgatgaggcttgaactgaagcagtaggagaggaaggaatgagcacaaatgataccagagcaggagggggaaacactttggtgactggctactgtaggtgcagcggaggaatgcattggtgactcttactttttttctttttttttaattttaatttttattttttgagacggagtctcgccatgtcacccaggctacagtgcaatggcacgatctcagctcactgcaacctccacctcccgggttcaagcgattttcctgcctcagcctcccaagtaactgggattacaggcgcgtgctatcatgcccggctaatttttgtattttcagtagagacggggtttcaccatgttggccaggctggtctcaaacttctgacctcaagtgatccgcccaccttggcctcccaaagtgctgggattacaggcgtgagccactgcactcggcctggtaactcttttttttttttttttttttttttttgagacagagtctcgctctgttgctcaggctggagtgcaatggcgcgatctcggctcactgcaagctctgccttctaggttcatgccattcttctgcctcagcctcctgagtagctggaactacaggtgcccaccaccacagccggctaattttttgtaattttagtagagacggggtttcaccgtgttagccaggatggtctcgatgtcctgaccttgtgatctgcccacctcggcctcccaaagtgctgggattacaggcgtgagccaccgtgcctggcctcggcctggtaactcttaagttttgcaccttgatggtgactttaagccttcaggcagaactcccaggtgctaatccgtcagtccggcagccgaagcctgagctcaccaccttcagacaccaccagcctccttcagatgcccaaggatgcctgacaaatgtcattttctacacatcttatgatgtgagaaggattgagaagtactgaccagagacacagctacatccctcccttccacaagctgcaatcagtggataataaagaagagtttaataagcatatcctgaccttcctaaagtgtaatgttgcataaacataaagattctggctgcctctggtgcttagaatctatgtcgtgtaggccgggcacaatgattattatactcagttgtatccttggctgcctaaagtgatgccaggcccttggctctgtccagagttcctcttgaggaaaatgaccacgctcagctgctgcctttgttctgtttggttttcagacgaaaacagcaaccagagttccgtgtctgacgtctatcagcttaaggtggacagcagcaccaactcaagccccagcccccagcagagtgagtccctgagcccagcacacacctccgacttccgcacggatgactcccagcccccaacgctgggccaggagatcctggagggtgagtcgtggttggccgaggatgagtttcctagaagggccttgctttctgctcttgttgtgtctcgtctttagagtaacaggctcgagagagcacctcagagccaggcagcaccaagccctttctcgatagcttaggaatgattatagtttcccctttcacagagggaagggagaaaacaagcattagagttgcgtgccaggctgtgtggaaggaacttgagtatttgacgcctgctataattctctcaaaaatcctgtgaggtggcagctattgtcttcttttacagatgaggaaaatggacattcaaagcttagaaaggttaaattgggctgggcatggtggctcacacctgtaatcccagcactttgggaggtcgaggtgagcgggtcacttgaggccaggagttcaagaccagcctgaccaacatggcaaaaccgtctctactaaaaacataaaaaatttagttgggcgtggtggcatgtgcctgtaatcccagctactccggaggctgaggcagaagaatcacttgaacccaagaagcagaggttacagtgagctgagatcacaccagtgtattcttgcctgggcaacagagtgagactccatctcaaaaaaaaaagacctggcgcggtggctcacacctgtaatcccagcactttgggaggccgaagtgggtggatcacctgaggtcaagagttagagaccagcctgaccaacatggtgaaaccccatctctactaaaaatacaaaaattagccaggcatggtggcgcaagcctgtaatcccagctactcgggaggctgaggcaggagaatcacttaaacccaggaggcagaggttgcagtgagccaagatcgcaccagggcactccagcctggcgacagagctagacttcatctcaaaaaaaaacagagaaaggttaaatcgcttgtctgagatcacatagccagtctagtaactgttggaatgaatgtcactttaagtccttctattttcagcatttatgctgtctgcattacatgctaaatttttttcttttctttttttttttttttttttttttaaagagatagggtcttgctctgttgcccaggctagaatgcagtggctgaatcctagctcactgcagtcttgaactcctggggtcaagtgatcctcttgcctcagactccgtagtagtaggactgtaagcctttgccaccatgcctggctttcttttaattttctgtagaaatggagtctcactatgttgcccaggctggtcttgaactcctgggcttcaagtgatcctcccacctcagcctccagagtagctgggattataggtgtgagccaccatgcccgacccaggtttcttgttataatatggatatatagatgtgtcttaggcccttgttaccttctcctgtgctgtgacctgttaacagccaactacaaaatggaacttgtttctccatgggaaatgccaattgtagttaatatttattgtgttcttactatttggcatgtgctgttcttagctcctgtgttttattacttcatctcgtcctcatagcaactctcagaaaactgggagattgagttagagttgtgatgtttgggctagaggatgacaagatgagctgctttgtcggttccagatatctccagcccagcagagatggccctctgcagtctagccgtattttgcccttccaccattcttggctgtgacctggtccagctgggccctgaatgaatgtttgcttctcaggccagtattctcccctcctcaccaagccacctccacacagctctaaggaagctcccccaggtccaggcctcaggggagccctgccctcaggccgaccctactgccttttcagagccctccctgccctcctcggaagttgctgatgaacctcctaccctcaccaaggaagaaccagttccactagagacacaggtaagcaatcactttgagttttccagttttttgtttttttggtttaaggcagggtctcgctgttgcccagactagagtgcagtggtgcgatcctggctcactacaacctccactgcctcctgggttcaagcaattctcctgtttcagcctcctgagtagctgggattacaggcgcccactaccacacctggctaatttttgtatttttagtagagatggggtttcactatgttggccaggctagtctcgaactcctgagcccaagtgatccacccatctcagcctcccaatgtgctgggattataggtgtgagccactgtgcccggccaggcttcccagtttctaagtcaaaaaaccaggaaagactgtggatgtggggttggatctgcagcgccggaaatgagtcccagggttgtaggcaggggaggatgtttgatcatctgctggaaggagcagagtggacatcccattataattcgggtgggtgggaaggttctggttgggaggggtggccctggcattccatgctctgcctgctcctaggtcgttgaggaagaggaagactcaggtgccccgcccctgaagcgcttctgtgtggaccaacccacagtgccgcagacggcgtcagaaagctagcaccatcccggccctccgcctcctggccctgcctctatttattgcattctggttctggccgcgccgcgttgctggggtaagggcaagcactggggtcaagagcctgcacacatgagccttccgggctggaaggctggcgtaggacttggggctgtagcatcatcttcctgaccctggcacctgtgtctacttgctcccgagaagaggagcgctcatgtcttttttgcaccccaagttggctggagcatcggccaccccaagattcatctgtgacctccaggcagcagtctctgctccagaatctctggacggagctgctggcagcttctgcgagaagagagagatgtggaaggcaccttctagaagagagcgtgcctcaggttacttgaacttgaacggagactgtagactcccggactttcccctaggactgggggccctgtaggctgctgttggaggactgggtagagacattggagggaagggaagggcttttctccacacaagggcagagagtccgtctagatttcttgctgtcctgccagctctgcccatgcctgaggtggtcctacctctcacgggcaccctagctgctgacagccctttgtggccgccgtccccatcccctgccctcagcacacacatctgcacacacgcagctttgttctcacctctacctgtcattccagcatccctgcctcttgtcacaaactgccccagcaagaatttgaggttctgacaacagtacccatcccccacagtaccccttcagctcagtttctagaaagctcccttttctttgaaatctgcatgttgaattgaactttgtgattttattttttgtttcaaaaaagtttaagaaaatggaaatgggcaacagtgagtgaagacatattttagcactgaatagaatatttttaaaattaaactatttgaaatatgtcctgtt

SEQ ID NO: 1007 - DNA, 141 bp, Homo sapiens
gagatggagtctcgctctgtcacccaggctcgagtgcagtggcacgatcttggctcactgcaagctctgcctcctgggttcacgccattctcctgcctcagcctcccaagtagctgggactacaggcacccgccaccacgc

SEQ ID NO: 1008 - DNA, 215 bp, Homo sapiens
atctcggctcaccgcaagctccgccacccgggttcacaccattctcctgcctcagcctcccgagtagctgggactacaggcgcctgccaccacgcccagctaattttttgtatttttagtagagacggggtttcactgtgttagccaggatggtctcgatctcctgacctcatgatctgcccgcctcggcctcccaaagtgctgtgattacaggc

SEQ ID NO: 1009 - DNA, 1756 bp, Homo sapiens
gcggccgcgagcccggagcctgcccgcgcgcccccggaacccgcgcccccggccgaggccaccggggccccggcgccgtcccgcccctgcgcccccgagccggcggcctcgcccgcggggccggaggagcctggagagcccgcggggctgggggagctcggggagcctgcgggaccgggggagcccgaagggccaggggatcccgcggcggcgccagcggaggcggaggagcaggcggtggaggcgaggcaggaagaggagcaggacttggatggtgagaaggggccatcatcggaagggcctgaggaggaggacggagaaggcttctccttcaaatacagccccgggaagctgaggggaaaccagtacgagaagatgatgaccaaagaggagctggaggaggagcagagaactgaagaataacgaagttatccttagcgtcctcctaaaggcttttccttttggcatcttaaaagcttgagagataaaatggaaaccccagagaggagtctgggcaggcgcccagggtgcatgctgcctccataaatctgctgagctctagaccctcaatcaggacttgtcccttggctagcaggatcctgagaacacctttggccctgccctgtgtagagatgttcatgtctgttcctgtgggtcactttgttaagctgaagagttttaagagttagagctcagaccctggactgggatttttcttaccactcaaacttgctatccacacaccctgcacaccttagataaaacgaacattttaaaagcagagttcactttcactccagtcccccctcttttgccctcactgaagccaaaccacagaagactttgaggaatgagagacaaatgaggtagagctcacctgtgctcaccagctccgtcagggtggtcagccgacccttttccctgggaaccccacttctctctctggctggcttggttgtcgggggtgagatgccatattgattacagggcagcaaagaaccagtaccaggaatttacttgaccattccccttatttttcatctagaggaatctcggattcagccctttcattgctaagacaccttttcactgaggttcttaccagctcagccaaatctccactctgctatagcagaagcaataatgtttgctttaaaaagatttcttgacctatgccttttcttagaaagtttgatagattagttagaacttcagatcatcagatcagtctcaaatgcgtttcttggaattttatatttgacaatatttatactataccaaactcatttgcagttcttaggtttgttggttaaaacatttttttaaagcagtaagtttatagaaaatgttttcatttaatggaaggctggggaatgtccagcatcaacccctatggcatgcattcccagtggccttctcatctgggcctggaacctttggttcagggcttaggggagaacaggccacatggcaacagccacacagtcattgccttcaacacagagccacgtgtccccaaacagcaatagtcatgcccttgtccaggctgggatctaattgatacaataggtcgttgactccctcctagtagagctatctaggtttgtctggaaagtttccgaccctggcttataggcaccacacctcatgtactcctcatggcttggatctctgtattcagcctttgttcagtccaataaactttgagtagatgatctcaaaaaaaaaaaaaaaaaaaaattcattaacaaaataa

SEQ ID NO: 1010 - DNA, 359 bp, Homo sapiens
aagatgtatactataaaccctaaagcaaaaaataaactaacaaaacaagttatagctagaaattcaacaaaggggatataatggaatcattacaatatccaattaatctcaaaggagtcagagaaaggaaaaaaatgacaaaagaacaaatgagaaaattattaagcaaacagcaaaatgaaagatttaaacttaacgacattcaataattttgtgaaatgtaaattacttaaatatctgaattaaaaagctgagactatgactggattttaaaaaaaaaaagcaaaacacaacatctcaaaatctaactacacgctgcctacaagaaacttatttcaaataggttaaataaagatcca

SEQ ID NO: 1011 - DNA, 6790 bp, Homo sapiens
cggagacccgcccccgcatgcggaaccgccctctgcgaggcccggtttgggccgtgcgggaatgggcgtggcctgggcggggcgggcgctaggacccaccggagcgccgtgaacgtcaccgagcggcgccgaggccccgggttgagcgggaggcgcgatcggtccggtcggtggctccccgcggcggggccgggcccgatctcgggcgggaaccgagcgcagagccggtactgggggaggggagagggggcgggattcccgccgggagggatccggcgtagcagggggcggagtcttattccaaccccgcttcgctttccgcatgtcccgctttgcgctcccggccctgggcatcccgctgtttccctctgcgtccgcggccctgcccttttcgggggcacagctgtggtctttccaccccgcgagacagcggggcgagggggcgcgggcggccagtggatagaggctgatgcccccaagcacggacgccagcgtgggggtggaggttcttccagctgccctgagcctgtgcgaagcgggaggtccttccccagttcccacagactgtggggagggaagagacggtggaagcgagcgggttctgggctcctgggtctctggaactaccctctgcccttgccccaacactcaggtagcgggaaggatgaccacgctcacacgacaagacctcaactttggccaaggtagggaggctggacctgcgggcccgggggcgggggcgtctgggccggcgggcttcctcgagcgcgccaccggcttgtgcccccctgcagtggtggccgatgtgctctgcgagttcctggaggtggctgtgcatctcatcctctacgtgcgcgaggtctaccccgtgggcatcttccagaaacgcaagaagtacaacgtgccggtccaggtgaggcacgtcccagaaccacagagtgggtacagggtggacttttaaaaattctttggtcgggcgccgtggctcacgcctgtaatcctagcactttgggaggccgaggcgggcggatcacctgaggtcaggagttcgagaccagcctgacaaacatggtgaaaccccgtctctactaaaaatacaaaaattagccgggcgtggtggccaaggcctgtaatcccagctactcaggaggctgaggcaggagaatcccttgaacccaggaggcggaggttgcagtgagccgaaattgtgccactgcattccagcctgggtgacaagagcgaaactccgtctcaaaaaaaaaaaaaaaaaaaaaaaaaaacctcttccacttcgggccaagccacctcattccgcagggccctgcccatgccttccaatgccttccagttccaaagtggtgatgcctacccacccctcagaagagagttccccttgccagaagttagggaccaggcctgataagagttaccccgggggtggccgggcatggtggctcacacctgtaatcccagcactttgggaggctgaggcgggcgaatcacaaggtcaggagttcaagaaaccagcctgaccaacatgatgagatcctgtctctactaaaaatacaaaaattagcctggtgtggtggtacgcgcctgtaatcccagttactagggaggctgaggcaggagactcgcttgaacccgggatgcagaggttgaagtaagcccagatcgtgccactgcactccagcctgggcgacagagcaagactatgtctccaaaaaaaaaagttaccctgggggcatggtggcactttgaaggagctcgtgaagctggtgaaccttggtgtgaggagggtatttccaaaaacctccaaatcttctccctaccatttatcctaaactcaatgggttaaggctaaaaggcagacaaagcagtgtgcatcgcactgtagctccagtccctagaagtgcctgtctctggaaggcactcaggaaacatgagaataagtggtagaagctcaaaggacatccaggtggtccccgcttcaagtccccacaccaccattgttttctcacttccagtatggtattcaagacattacttgaggtagtcagcactttattttttattttatattttattttattttattttttgagactgagtctcgctctgtcgccctggctggagtgcagtggcgtgatcttggctcactgcaacctccacctcctgggttcaagtgattctcctgcctcagcctcccgagtagctgggattacaggcgtgtgccaccacatctggctaatttttgtatttttagtagagacaaggtttcgccgtgttggccaggctggtctcgatctcctgacctctggtgatccacctgccttggcctcccaaagtgctgggattacaggcgtgagcactttattatgaaacaggttttgtgttagataatgttgcccaactgtgggctaatgtgttttgagtgtgtttaggtaggcctggctaagctatgatgttctgtatgttatgtgtattaactgcattttccgctggcgatatttgattggtttatccaaacataaacccatagtaagttgaaggtcacctttagaggggaaaggaaaaaacaattgacatttactcacttcttctttatgatgaagtgattgaagcccagagaagttaaggaatttgcctgaggccacacagttccttagttcttaacttttgacatctgattacattttcctggatcctttttctggaaaaatgcccaagtgcacaaagatacaactttagggatttttcagactctggaggagtccatggaccccacattaagaacccctaatggtatattaaatgctcatattgggattgagttcttatctttcttttcctttgagatggagtcttgctttgttgcccaagctggagtgcagtggcttgatctcagctcactgcaacctccgcctcccaggttcaagtgattctcctgcctcagcctcccaagtagctgggattacaggtgccacctcacctggctaatttttgtatttttagtagagatggggttttgccattttggccaggctggtctcaaactcctgacctcaggtgatccacccacctcatcctctcaaagtgctgggattagaggagtgagccactgtgcccagcctgagttcttatcttctaacttctttctctatggataagttcacagttcttagcctctggtttttttttttttttttgagatggagtctcgctctgttgcccatgttgcagtgcagtggcgtgatctcggctcactgcaacctccgcctcccgggttcaagcgattcttttgccttagcctgccaagtagctgggactaaggtgcctgccaccatgcccggctaatttttgtatttttagtagagatggggtttcaccatattggccaggctggtctcgaatacctgaccttgtgatccacctgcctcggcctcccaaagtgctgagattataggcgtgagccaccatgcccggccagttcttagcctcttgagggaaagtggggtctcctgggtagggagccctggagagctgctgggcctcggaccgaaggcagatggggccttaggctcctggttgtgttgggtggtttccccatctgtgctttgggcctcacgagccgcatggtattgtgtgcagatgtcctgccacccggagctgaatcagtatatccaggacacgctgcactgcgtcaagccactcctggagaaggtgagggtgcactgggctccccagccatctcaccccatgctcacccccgtccctgtgtgctcacagtccaactctgggatggggtgaagctaggactctgtggggtcttcatggctccaatacccagaagcctgttccctgcactctggagaccatcccaacccaggggcaggccccaaggcatgcgggccatgttcagggtgccttgggcctgggagcccgggttggagctggctctaagtaggggctgccccagagggttcggggttcttctcacatccgtcccctgttctccacgctaaacgttctgtctgagctgagcccctcagggtttcttccccatctagtcctgatctcagacttcctgggaccttccctatggggcccgggcattctctcagcctacaccactcatgctggagggtgccggcttctcaaactcgctatctggcctcttggggacccccagcctagcagctgagcagggctgtgagtgggccgtttctcctccttccttgggcaagggggtggaggcagggtggtgtagtcggggtggggtgcctggctctgcagtgggggttcctctctttgcagaatgatgtggagaaagtggtggtggtgattttggataaagagcaccgcccagtggagaaattcgtctttgagatcacccagcctccactgctgtccatcaggtgggctgcccctgcccctcgcccactagctggcatcaggtgtgtctctggcaacacacccacccctttaaggcggcccttgaataccttggtaaaggcctgggaggagaaagggcaagaagcaccagcatgacaaggggacagcctgtgagcagctgagatgggtccagagagatgacatgagctacccagggtcacctgggtgggggcagagcccaggacacagaagcagttttctgactccccaggcaagtgtccagtcaactcgaagttgacctctggcacatgcgttagttggtcaactgcatgcttccaatggtgaggtcagggcactggaatctggcaccaacctgtccccacggcctgtgtggccttaggcaagccctttcccctcctggcttggtgtcctggttctgggtcctggctgcacattaaaaccacctagggaggcctcctcaggctgcccctacctcccctgtcccctaccccccgccgaattctgactttatctggggtggggctgggcatttcttttaaactcccttgctggtttaattgtgtggaccggatagggagctgggtcctaggcatgcagcactctcacaggcactggagggggtcttgtaccccaggtctgcatccaggcttgatgcctgtggtggaggggagggcgccagtgtgatgggaagacctcctctcactcccagctcagactcgctgttgtctcatgtggagcagctgctccgggccttcatcctgaagatcagcgtgtgcgatgccgtcctggaccacaaccccccaggtgtgtccactccccaccctctcttcccttggcatttccatggttatctcgggttggtctgtgttcccaggtccatgtttggctgttctgagactcatctcttcctaaccctgagagtccacctcctctgggaagcttccctgattgattctacctggcttccatctccctattgactggggcttttcttagcacttgctttgccatctgctctgggggtgctgctgagccagcaagggaagtgggaagaggctgggcccagtggctggcaccagggcggtgggggagcctccaccaacctcttgcctctccaggctgtaccttcacagtcctggtgcacacgagagaagccgccactcgcaacatggagaagatccaggtcatcaaggtgagatgagatgggtctgggtctgggcgcaggctctagaaacgtgatgtcgcagttccaggcgggcaggggcactgcctgtggccagccacccattacattggtgtggcagcgcctggcacccagcaggtcctcaggcctgtccactgctccatctgggcacttggggcagtgaggagcccaggtggagccacctactggggcccccagctcatcctggctcttctgaagtgggggctctccagggaggggtcctagcccaccaggttcagcgttggtgcctggagcctgttcgtcacttgggttctatggacttggcctctgtgggggatgggggcggtcctggggtctgcatcaccaacagcttcctagtgattctgaggctcaggttggaggcccctggtctggagtgggagggacagcaaagtgagggcaggccagggcccagccccgtcacccccctgacctttgtctcctccctaggatttcccctggatcctggcggatgagcaggatgtccacatgcatgacccccggctgataccactaaaaaccatgacgtcggacattttaaaggtgagcttcgtggggacccgggaagctttatttaggggctgcttaacgaagtgaggcccggtgctgaggccttactagagggcttgcgggagagaacgggggagtgcctggtggagggctcctcccatctctactcttctccaccatggctatggccacgaggccccacctgtggtggaggtctgcccaccaggggcttctgtgtcctccagcagggatgccctggctgtcttgctgactgtggctgtttgcttgtgtccgtcagatgcagctttacgtggaagagcgcgctcataaaggcagctgagggggcacctgccaccccactgatgcccaaactgtcagactttgggggatccccgcctagggcagtgctgcatggctgccctgattccaagtgctcttatcgcctctgtgtgtggatcgcccgccccagcccggggccgctcaggtctgcttggaggatgcctcccccaggagggcagtgagggatgccgcaacctcgacttctcagcctcctggggttccgccggccaacactgtctgtctcaaatactgtgctgtgagttgtttcaataaaggggccccaagggctgggctgagctg

SEQ ID NO: 1012 - DNA, 18902 bp, Homo sapiens
  misc_feature (4483)..(4483): n equals a,t,g, or c
ttttactgaaaacatttattttttatttatttattattattattattttatgagccagagtctcgctctgtcacccaggctggagtgcagtggcgtgatctcggctcactgcaagctctgccttccgggttcacgccattcttctgcatcagcctcccgagtagctgggactacaggcgcccgccaccacgcccggctaattttttgtatttttagtagagacagggtttcaccgtgttggccaggatggtctctatctcctgacctcgtgatccacctgcctcggtctcccaaagtgctgggattacaggcgtgagccacagtgcccggcctgaaaacatttattacaacaaaacgtcagagctatgtgacagtaagttaccacaagctggtagggttgaaccggggcaggagtcgctggtacagggacctcactgcccaccccatgctcagctcctgcctggaggaacctctggctgacccagacacaggatggacagctgtcagaaaatctggacaacagctcggtagggcgattgggcagcctcctcctgtccatgcttctgcccaggctgagcctcggaggaggcctggttcctggtcatcttggggctgacgacaatgctgctgttggtgactcggggcccataccagcctgcccagtactgggtgtccctgcccccatgctggaagaggatgtagcggacaccccgggggtagtctgagaaggtgtaggagacctgttgggaggaagggagaggaagtgaccaccgggacgggggaggggaaggcaggagccaggtcctctaagagagctgcccaggctggaaggcaacagctccaggccagcaggggcaccctgggccctgaggctgccctttgcttcctgccatcctggccctgggaggagtgggtagagagagcaagtgggtgaggcctcacctctgtccatgtggcattgttccactgttggatggtcacaggtgggggctcgaaggaggccaacacgaagtagtcagccgaggccagctgcactttgagttggtaggtgcagccacagtcggctctggcagcaaacctggtggaggggttgagagccctgtgtccaagccaccgagggctggccccaggggtgggggcaggtgggacctatacattggagctcggagcttcatctcccatcagctgacactgctctgcctgcaaggcccagctggcttcagcgctccctatgccccactgtggcccggggataagctgtctgtccatgctggcctctgttaccccatctgagaagagggacccttttgggcatcctactaaagatatgacctcaaaaatcaaaagacccctccagagaggcctggtctgtccaagccatgtcacctgtacttacaatggaccaggctgtggattcagtgggagagtcaagggggtggcctgtgtaatggggctggcacaaagctcaccctctgctcagcccagccacctctcccccctgcagctctgcatacccctccatcctcaccgctttatcctcagagtggcagccctggggcctgcctagaactggggtcctgcttctgccaccggccaagccagagcctggcacagttctgtgcacagagtaggagctccaaaaagagtcatgggatgaatagggaaaggggcaggggaggcaggtaggtcaggggacctgggggttcccacccagtccagagagggctgaggtcctctgttgcccaagtgcctgtcagtgcacagtggctgggcacagtggctcacacctgtaatcccagcactttgggaggccgaggtgggtggatcacttgaggtcaggagtttgaaaccagcctgaccagcatggtaagacgctgtctgtattaaaaatataaaaaaaaatagccgggtgtagtggtgggcacctgtaatcccagctactcaggatgctgaggcaggagaatcgcttgaacatgggaggcggaggttgcagtgagccaagatcacgccactgcactccagcctgggtgacagagcgagactccgtctcaaaaaaaaaaaaagtgcctgtccatgacagtgcacctgggggcctcagcctcctcacctgcacactggggctactgtgtcctgttgactacgtcacagggtggtggggaggccaggaggtgccgcagggtgtgggtgcagagcaggggcggaggccggggctacctggctccagggcactgctgtgcagagtgggcacttgctatgggttgtctcacgtacatgcagcgcagtaagaggagcatgtagagtgtggggacacaggccatggaccctactcaccagtccttaaccacgatgtccggccggaatgtgtctagtagctcctcccagtagccctcggctacaaggtccaccagctgggacttgaggcacattctggggagcagagttgggggcttgcatacctgggtgtgctctgcatggccccccccctcacccaggccttggcagcccctgtgagcccagggaggtggtttggggacctagggtaccccttggccgctgcgggacaggcactggctggggctgactctggcttttcctccagtgcaggagggagtttgacccacttgtgcctgggcggcatttgatcccagtccaaaggcccattgttccagggcacttttgtaaactcaagttcctagcttacggacagatgcctgtagatagccctggcttatcttaactgcccaatggactcctggcctgcttcagtgatccccacccccactgtccattaacacagcactgagtgatttcaggaagcagtgactctgggcaagttttggggccacctccctcgagcttcgcagagaggacttcccttaggaagactttgcctgagacttggcaaaggtgtcctgaccctctgtcccctccacgcaagcctggtaggttcagtttgccttactcgtaggatgtgacaaaatacttcttgactttggggtcaggaaaatctgtcccgtgggctccagggaggctctccaccttccagcggtccccaccattgaaatcaatttgccatgcaaacatatcctctaggaagaacagaagccaaggtgagaccccctgtgtaaatccaaagtccagccctccccacttagtcccaggagggcgggagggagggtggttggcgttagtgaccttcttgggaggcaggacttgctcatgctcaggtctctgcggctgtggacaccaaagggttaaccagcttgttccttctcaagggcattgtgtggccaaggtaccccaccagcccaagtgtaccccaactgcaccttggagcacccctacaaagcacccctccaacacattcccaactgtcctcaccatatcagctctgatctgactctgtccctcccactcagtcccaaactggcctcactcctaacacgcagctggagaaaagaatgcgtgttaccagaaattctaaaccaaccccttcctcacttccatgttgcggtggaactctgggaaatacccaagtatcagttctcaaaaaattacgagaggcctgtgagagtactgtcctcaaagactaatgtgaagccgggcacggtggcttgcgcctgtaatcccagcactttgggaggccaaggcaggtggattgcttgaacccaggagttcaagaccagcctggggaacatagcgacacccccccccccttttttttttaataagtaaaataattttttaaaaaaggctaacgtgttcatcccaacacagactgcttacttgacccagatggcatcccagatgtccaggagggagaggcccttggttaactacataacccaggttggaggccctagaggatgggtttgtgggtttgtcggtgggtcatgggaaccaagattcccatagggctcagatggcctctgcccagggcaagagtgccaagtggaagaacaggtaccctttgggctgggcgctgtggtaacattcatgggtgggcctccattaggtgggcctggtgggtgcaggggagcaatcaccctcttcacactgaacttagaggaccttagaagacaatggcgcttctctactggcgctgcccaggcaatcaccagggcacttttttttttttttttgagacggagtcttgctctgttgcccaggctggagtgcagtggcgcaatcttggctcactgcaagctccgcctcccaggttcacgctattctcctgcctcagcctcccaagtagctgggactacaggtgcctgccaccacgcccagctaatttttttacatttttagtagagatggggtttcaccttgttggccaggatggtctcgatctcctgacctcgtcatccgcccgcctcagcctcccaaagtgttgggattacaggcgtgagccaccgcccccggcggtgtggtggctcacgcctgtaatcccagcactttgggaggccgaggcaggcagatcacngaggtcaggaattcgagaccagcctggccaacatggcaaaacctcatctctactaaaagtacaaaaattagctgggcatggtggtgggcgcctgtaatcccaactacttgtgtgtgtgtgtgtgtgtgtgtgtatgtatatgtatatatgtatacacatatatgtatacatatgtatatatacgtatatatgtgtacatatatacatgtgtatatgtatacacgtgtatatatgtatacatgtgtatatacgtatatgtatacatatgtgtgtgtgtgtatatgtgaaggtgtcactgtggatgctatagtgtggcaaacaaggtccatttggcccctggagcttgaagtttgtagcagaaaaaaataaggaaattctgaaaaaaaaattttttttttttttttgagactaaaagtttcactcttgtcacccaggctggagtgcaatggagccatctcggctcaccgcaacctctgcctcccaggttcaagtgattctcctgcctcagcctcccaagtagctgggaattgtaggcgtgggccagcatgcccaactttgtgtgtttttagtagagacagggctttgccattttgaccaggctggtctctaactcctgagctcaggtgatccgcccatctcggcctcccaaagtgccgggattacaggcgtgagccaccgcgccttgtgaaaagtgttacagggcatgaaatgggggtgctatgctagaggtggagagggctgtttttagattgggagcacagggcaggtctctgaactgagacctgaagaatgagaaggaaccaaggaagtgaggtgggtgtttagggttagagaatattccaggtagtgtgggaattgcaagtgccaaggcccaaggatgagaaggaacgagcctggtggcagcctccaccctgcccccatgccaccttcagcacacgggttgcgcaggaggttcctatgcaggctccgtaggaagtagaagattttccagtcggccacgggctggtcccagtccttggtgatgaagccctctcgcaggcacttgcgtttccagagggtcatgaggtcgatgaggtcccgccagaggctgcagaccaggcggcagttcagcagcagctggcgggcgggcacgtgcgtgaacagctccagcaggatgttctcgggcagctcgttaatgctgtccagggctgctttggagtggggagcatccatggcctgtgggggcaacagcagttatgagcctgaccagggaggtgggccctcaggtccccagggaaccaggccagggactcctctccaaccctgcattagccaggtgtggtggcacatgcctggagtcccaggtacttgggaggctgaggcagaggatcccttgagcctgggaattcaaggctacagtgacctatgatcgcgccactgcacccctgcccgggcaaccaagcaagactctggctaaaaaaaaaaaaaaacccacaaaagagcatttctgaggctgagggtccttccagtaaacagtagcccctcagtggaaagagtagtcatgggacacacattcagaagagtgcaatacaaatagtaaagtctttagagacacattttttaaaaggcccctccccaatttaaaaaaaattgcttaattttaaagccagtgggttgtgtggactgtaagattttgtggaggccacacttgtctgcaaagttctgtgagggttttggtgattgttattttaatgctctggattcactgttagaatataaaatctttttttttttttttttgagacagagtcttgctctgtcacccaggctggagtgcagtggtgcaatctcggctcactgcaacctccgcctcctgggttcaagcgattctcctgcctcagcctcccgagtagttgggactataggcgcatgccaccatacccagctaattttctgtatttttagtagagacggggtttcatcgtgttagccaggatggtctcaatctcctgaccccatgatccgcccacctcggcctcccaaagtgctgggattacaggcgtgagccaccgtacccggccagaatataaaatcagttttacatcccagactcattaatgttcatttagtggtgagctagcgctgagaaaccaccttcctatctccagaagcttactttggcctggaagtcacatgtgataaaacaaccccatgggaatcccccacggcacccggctgagctgtctttggtgtcaggccagaatccacttggagatggccggaaaaaaaaaatcagatggagggtggctgagaagactgcctgggtttgaatcctggtctgcagtgaccagttgggaagctgtgaaaaggagggggtaactgtcccgaccctggaagggccaggaggaccaagtgaagcacagagcttcagtcagcattgctgtcagcacaaaccggctctcaacactgtcctccttgtacctctgcactgcgcacgggttctggaaaacttcaagcagtgccacagccctggcctgaatctgttacctgggggcacctggttagtcctcttaaggggatcccaggtacttgccccaggtaggtgggggttggccggcagccagggctctgcactgtcactcaggtgggcctcatctgcttacacatgaggagagaatgttctccacctacaagcagggaaacagaaccttgctggcctctttttttttttcttcccccccaccccgagacagtttcactcttgttgcccaggctggagtgcaatggcgtgatctcggctcactgcaatctccacctcctgggttcaagcaattctccagcctcagcctctcaagtaactgtgattacaggtgcccgccaccacacccagctaatttttgtatttttagtagagacagggtttcaccatgttggccaggctggttttgaactcctgacctcaggtgatccacccgcctcagcctcctgaagtctgggattacaggtgtgagccactgtacccagccttttgctgtggcctcttctgattttccatagaggcttggccaaagcagcagttcatggtcttctgaaggctcccatctcagaaaacaggagggtgggtgcatgctcacttctgcccagggaggaacactttacatggcagagaaaacaggtgaggtacttgtgcctcgtgaaaaatgctttgcaggccgggtgcggtggctcaagcctgtaaccccagccctttgggaggccgaggggtgcggatcacaaggtcagaagttcgagaccagcctggccaacacagtgaaaccccatctctactaaaaatacaaaaaaattagccaggcgtggtggtgtgcacctgtaatctcagctactcaggaggctgaggcaggagaatcgtgtgaacctgggaggcggaggttgtggtgagccgagattgcaccactgcactccagcctgggtgacagtacaaggcaccgtctcaaaaaaaaaaaaaaagaaaagaaaaaaggctttgcaaccttggcaacacagggaggccccgtctctataaatagtgaaaaaattcgccgggcatagtggcgagtgcctatggtcctagctacttgggaggttatggcgtcaggatcttctgagcccaggaggtcaaggctgcagtagctcacaggtgtgagccaccgaacccagcccctcagatttttctaccttacagtccatgaggcctgccgaggtcacactctagggaaagaaggagcctgctggagcagagtgagccatgattgctccatggcactccagcctgggcaacagagcaaaactgtctcaaaaaaaaaaaaaaaaaaaaagagaaaagaaaaatgctttgatggaaaaaaaaaataacaaaaaaacccaatgtggccaagtcttctaagttctgagaagcaactgtaagcatttgaaaaaaaatgtaaaagttgtcaattaaaaatgcttgtagtctaggcaacatagtgagactctgtctctagaaaaaaagaaattaggtcgggtgcacagactcaggcctgtattcccagcacttcggtaggccgaggcgggcggatcacaagatcaggagttcgagaccagcctggccaatatggcgaaaccccgtctctactaaaaatacaaaaattagctgggcgtggtggcggacgcctgtagtcccagctactcgggagggtgaggcaggagaatcacctgaacccgggaagcggaggttgcagtgagccgagatcgtgccactgcactccagcctgggcaacagagtgagaatctgtctcaaaaaaaaaaaaaaaaaaaaaaaaggccgggcgcggtggctcacgcctgtaatcccagcactttgggaggccgaggtgggcggatcacgaggttaggagatcgagaccgtcctggctaacacagtgaaactccatctctactaaaaatacaaaaaattagccgggcttggttgcaggtgcctgtagtcccagctactcgagaagcaggtgcctgtagtcccagctactcgggaggctgaggcaggaggacggcctgaacccgggaggcggagcttgcagtgagctgagatcgcgccactgcactccagcctgggcgacagagcgacactccgtctcaaaaaaaaaaaaaaaaaaaaaaaaaaagaaattagctaggcctggtggcccgtgcctgtagtcccagctatgcaggaggctgaggcaggaggaacgcttgagcccaggaagtcgaggctgcagtgagccgtgatcatgccactgcactccagcctgggtgacagagcaagactctgccataaataaataaataaataaatgctggcagcttctaaaggcactgtctagactctagacgaaataaaagtcactgggctccaagctagaggcatctaggcaccaatagcttcccaccgtggtgaccgaagtctggtctctggcccagtccgcattttcttgcgccccttcccccccccggccctgggcattttgtggtggggaagtccatgccagccctaggaagccctctcacaccgatcggggtccccaactgcccggcccggcgtctcgtgctcgccttctccgcacccaccctcccagcaagctctagtggcattgttacttcaccggtttctcggaaacagaaactgtggctggggcaaggcaagcgccggatctcgcaggcgtgtgggggcctggaggtcccttgacagttctccgaacccggcgccggcctcgggatgtggccggggtggaggcggccgcagagcctccgcctgggtggccccggggccaggcccccagtcgaagtccgggcccagccgcccgcgccccccacccctggccgcccggaccagcgcccgcaggctccgtgaacgcccaggcgccggagaccccggctccccactcgcccgccgcccgtccccccggggacgcgacctgggcgcagcggcggagctccaggtcggcccgagcctacggcctcggcttcgttgtcgctgggccccgccgccgcgtcacgcgctgcgctcggtccccacccccgccccggaccccgctgccgtccctctcggcccggcccctaaccctcgccgcgggaagacgaacctgggatccccagggcccgggccctcgctgcggcctgcgtgtcctgaagctgtctccccctccaggcggcgggcggctcagcacccacacctgcacccgcctcctacgcagggccgaagctcccgaacgcgcggccgctccccggacctccgcactagttccttccttatgcggcccagggctccacccttgacccgcggtcccctccctagaggcaggacctgacacccagtgggctccttctttccctagggcgtgacctccgcaggcttcatagactcaaaggtaaaaaacctgaggtgctaggaggtggctaacgcctgtgatcccagcactttgggaggccgaggtggggaggatcgcttgaggtcaggagttcgagaccagcctggccaacatggcaaaaaccctgtctctactaaatatacaaaaattagccgggcgtggtggcacaggtctataatcccagctcctccggaggctgaggtgggagaatcgcttgaacctgggaggctgcagtgagtggagactgtaccactgcactgcagcctgggcgacagagccagaccttgtctcaaaaaataaaaaacctctgaggttttttatcaggattaagttcatgaatttcttccatcagtcaacaaatatttagcaagcaccttgttcaggcaaccaccaagggttgtgcaggctgtgtactgcacaaggggactggcccaggacacattaattgcagtcagggctacatgttctccgtggaaggccgtccttttgcagtttgccatgggctggtgggtggtgatcctgccctggccaaagcccttatctagctcacccttgactgagatagctaaatgtgaggagtacttattgagcactggattatagtccatgttcacactgctataaagaaatacccgagactgggtgatttataaaaggaaagaggtttaattgacttatagttccatatggctggggaagcctcaagaaacaatcgctgggcgcggtggctcacgcctgtaatctcagcactttgggaggtcgaggtgggtggatcacgaggtcaggagattgagaccaccctggccaacatggtgaaactccatctctactaaaaatacaaacaaaattagccgggcatggtggtgggcgcctgtagtctcagctactccagaggctgaggcaggtgaatggcgcgaacctgggaggcagagcttgcagtgagctgagattgcgccactgcactccagcctgggcgacagagcgagactccatctcaaaaaaaaaaaaaaaaaaaagaaaagaaaagaaaaaaggaacttacaatcatggtggtggaaggtgaaggggaagcaacgaccttcttcacatggcggcaggagggagccggggaaaccgtcacttgtaaaaccatcagatctcgtgagaactcactcactatcatgagaacagcatgggggaaaaccgctcccataatccaatcacttcccaccaggtctctccctaaacacccaggattaccattcaagatgagatgtgggtggggacacaaagcttaaccatatcacgcaccaactgtgtgccaggcaccattctaaatgcttcggcttcatccaatgtccgtaaagctgttggcaaagagtaacaccaggaggcagagcctgggtggcactgctgatctggcacaaggtggactcaagagctgcccagagatgtccacacaccccaaccccagcctgtggctgggcctccagaggaagccagcagtactggacggctgccaggtgagatacctgcagctcactgaggggtctgcccatgaacctgtttctgtgatggcctggttcctgaaatgccaacccctctgtaccttagacagaagccatgccattgtaccatctgcaggtccaggcaggaccacctaaagtctgcctttccttccagaaaccacagggcacaggttagactgggcacaccttttatttggctgcatgcagtagggcgaagtcaggagaacactgctatctttccagcaggacaagaggcaagttccaagggtggttggctgggagacagaggtcttgggaatggcagttctaggggtggggtgggggcttggaatgctctccaagccagagggggccgggcctggatttgggaggtggacaggggattcttcaaaccccctaccatactcatccagggctcatgtgtccagctgtcagagcaggtcccaatcctgctccccatctaccctgggacatcctgtacaggattccctcagtcctctgggaacctaaccccacctggtacccatctagcttctggggctccactgacagtgaggacagtccacacccgacctggaccccaccccaccctgggtctgtccatctcagtcccggcctgagcctctgggccaaagccacctcttctgagcaggcaggcagagcgagagactgggagcagcagacaggggcagagcacggcccatgagcccaccctccacttcccagattggtcagagttacatggtcacctccctgcacctgcaccatcagggcagctgcaagcttgccagttgtcttgcctgtccctgctccgagggtcaaagaacacaggtagaatggtcccaggaggggaagggagagacagatccaggctggcctccaagctcgactttctgaggggcccaggggaacatgctgcacctcccacatctcaggtgctccgtctctgaaaggggcacacgcaggcttccccggccatcattcaggtcaagacctttcggggagagctggcccgaccccagcatgcgagggctgcccacactgagaggctccacaaagaagaggctgctaggggcaagggttagaggtctggggacacctggcctccacctccccttcccaagcccagcccttttctgacagcagttgtttaccagtcagggttcagcagatgggggctcagggggtgtcagggcagcgggggcccgatggtgatgctgctgttggtgaccctcgggccgtaccagccggcccagtaatgagtgtccacgccgccgtgctgaaaccagatgtagcggacgccgggcgggtagttggagaatgtgtgggagacctggcagggcaggtagaggggggagaaaggtcaagggagctgactcaggctgggtgtggcggctcacaccgggaatcccagtactttgggaggctgaggtgggagggttgtttgagcccaggagtttgcaactagtcttgtcgcaaaccagagagtgagataccatctctacaagaaaaaaaaaattagccaggcatggtggtgtgtgcctgtagttctaggcaggctgaggcaggagtacaggctaaagtaggagttcaagactgcagtgagctgtgatcacgtcactgcgctccagcctgggcaacagagtgagaccgtgtctctaaaaaacaaaagaaataaaagatgagccttaacaaaaagggtgggagcagactctgagtgtggcactgcctgaggggggcaggggaacaaggaaggggctgagttcttggtgccagctagaaatcagtggagttctagtttgaactctgtgatttgggacagaccaattcctttctctgtgcttcagtttcctcatctataaaatggagcaaaatcctgctggtctactccacaggattatcattcagcccaaaggaatggaaagaaactgcaagctgccaaaggatgtccaatatactcatcacggggcacatgtattatttaggttaaaattaagtaaaagtgcccggcgcggtggctcatgcctgtaatcccagaactttgggaggctgaggcgggtggatcacctgaggtcgggagatggagaccagcctgaccaacatggagaaaccccgtctctactaaaaatacaaaattagctggcgtggtggcgcatgcctgtaatcccagctactcaggaggctgaggcaggagaatcgtttgaaccgggaggcagaggttgtggtgagctgagatcgcgtcactgcactccaacctgggtgacagagcgagactccgtctcaaaaaagaaaaaaaaattaagtaaaattagatgaaataaaaaattcaggtactcagttgtactaggaactggctcttactaactgttcagtggtcacatgtagctactggctaccttatggatagcatagacacagaccatttctatcactacagaaagttctattggacagggctggggttggcaaacgatggcctgcaggcccactgcctgtttttataaataaagttttactggaacatagccatgtccattcgtttacatattgtctagagctgttttcacacaacagcagagttggagagttgagtaattgtgacagagacaatgtgacctgcaaagcctaaaatattcgtatccgccattttaagaaaacatttgctagggctgggcacagtggctcatgcctgtagttccagcactttgggaggctgaggcagaaggatgacttgaggccaggagtgcgagaccagcctgggcaacaaagcaaaactccatctctacaaaaaaaaattttttttttaattagtggtggtgcacacctgtactcccagctactcaggatgctgaggcaggaggatgacttgagcctaagagtttgagtctgcagtgagctatgaatgcgccagcctgggtgacagagaccctgtccctaaaaatatgttaagtaaattaaaacaaacaaacaaacaaacaaatatttgctgaccccagtctagaaaacagtagtaatcaatactagtaattagtaacagtcagtcaaccttttggaattttttttcttttcttttctttttttgttgagatggagtttcgctcttgttgcccaggctggagtgcaatggcgcgatctcggctcacggcaacctccgcctcctggattcaagcgattcttctgcctcagcctcccaagtagctggcatgtgccaccacgcctgggtaattttgtatttttagtaaagacggggtttctccctgttggtcaggctggtctcgaactcccaacctcaggtgatctgcctacctgggcctcccaaagtgctgggattacaggtgtgagccactacgccctgccaaccttttggaatattttttggccctggctttgccagcatcatttcactgatttctttcagagctctatgagggaaacactatatacccattttacagaaacagcgagtgaagctcagagcattggaagcacaggtgagaaggtgcagagcttggatctgaacctaggccccgtctgaccacagcctcagccttggacgatctgcctctgcccccgtcccccaggcccacgcacctccctccacttggcatcgctcttctgctggatggtcgccgggtctggctggaaggtccccagaggcgcgtgcgcggacgacaggagctgaacgcacagctggtacttggacccgcaatctggcctggctgcgaacctgcagggagagggagggcccatcagggcctcggagattgggggcagggcgggggtggggcgcctgattggcatgccccaccccagaccctcgccccaggcactcaccagtccttgacctcgatgtccggccgtgtggtatccatcagctcctcccaatacccttcggccttgaggtccaccacctgggacttgaggcaggtgctgggggcaggcagaggggtgggaggggctgggctcaccactagggcagtgaggggctaggactgccccttccagggtgggagagaccccagggtaaattgatttgggctttcccctaccccaagtccccggatcttactaatatgaagtaacgaagtatttcttgacctggtcattggggaattccttcctctggtctcgagagagatcctccaccttccactcatcgcctccattcacatccaggctccagaactcgaacccctctgatggaaaagcagagttcacactgaagggaagcccctcagtggccgccttctcccaaatgccccttcctccccactcctctgcctgcatcttggcggctgccctcaagccctgtgctgtgggacgctgcagatcacagtgcccaccgcgtattaggtgcttcctgtgttgcaggcacagggaggtgacttccctgggggccctgagacacatggtgatggaaatgaccagacctcttctgtgatggagaacgctctgatgtgggccagacagacctgggtctagtcccagctctaccagtactcggttgtctgaccttggaccagttgcttttcctctctgacccttggtcgtctcctctgtaaactggagtaagaataggggctgagaagcatttttggcaaagtgccaaaatgttttaggacttgtggcccacatactatctctattgtatagtttttttgttgttgtttcttttcctataaccccttaaaaacacaaatctttttttttgtttttgttttttgagatagggtttcgctcgtcacccaggctggagtgcaatggctcgatctcagctcactgtaacctctgcctcctgggttccagtgattctcctgcttcagcctcccgagtagctgggattacaggtgcatgccaccacacctggttaatgtttgtatttttttgtagagatggtgtttcgccatgttggccaagctggtctcgatctcctgacctcagatgatccacccaccttggcctcccaaagtgctgggattacaggtgtgagccactgcacccagcccagctgccttctgtgatggacaaagctctgatgtgggccagacagacctgggtctagtcccagctctaccagtactcagctgtgtgacctcaggccagttgcttttcctctctgagcctcagttgtctcctctgtaaactggagttaagaataggggctgggaagcttttttggcaaagtgcgaaaatattgtaggaattgtgggccataaactatctctattgtatagttttttgttgtttcttcttcttctttttataacactttaaaaatgtaaaaacaattattagaacaattattaatgcctcagccagatttggctcatgcacagcttggaggagtggttttattatcattttgctccagaatttggtcatgttgtggaaaatgaggttcccatgccatcccagtgtcaacccaacaacacagcaagcaaggatcagtggaagccttgctttacctgttgttgtaacatactgagaagacgactggatctcccattcttccacaagcaaaacccctttggccttctgggaccatgtcagtaggcccaaccctggagcctagaaactaggccaacaaaatatggctctgacttcctggccttgtgtcttgagcagaattagtctcagttggccaacattccctcgcctaggaaaggtcactggggaaataatcttaagagcagaataagaggccgggcgcggtggctcatgcgtgtaatcccagcactttgggaggccaaggcgggcagatcacctgaggccaggagtttgagaccagcctggccaacatggtgaaactgtgtctctattaaaaatacaaaaaattagctgggcgtggtggcgggcaccggtaatcccagctactcgggaggctgaggcaggagaatcgcttgaacccaggaggtggaggttgcagtgagccgagatcgcaccattgcactccagcttgggcaacagagcgagactccatctaaaaaaaaaaaaaaaattagccaggtgtggtggcacatgcctgtaatcccagctacttgggaggctgaacttgggaggtggaggttacagtgagccaagattgtgtcactgtactccagcctgggtgacagagtgaaactccgtctcaaaaaaaaaaaaaaaaaaaaaagagtatagtaagaataagaaacaccactcttggcctcagtttgcccatctgaaaaatgtgtgcactaacagtagctacctctttgggttactgtgagagaagtaaaggtgttaaaccatccaaagtacccggctcatactaagtgctcaatacatgttcctggtgtcatgactgtgtactggaggcatgccagacccggcctgtaccccaccttcagcgcacgggttgtgcaggaggttcctgtgcaggctccgtaagaagtagaagatcttccagtcggccacgggctggtcccagtcctcagtgatgaagccctctcgcaggcacttgcgtttccagagggtcacgaggtcgatgaggtcccgccagaggctgcagaccaggcggcagttcagcagcagctggcgggcgggcacgtgcgtgaacagctccagcaggatgttctcgggcagctcgttgatgttccccacagccatggcttgtggcttctggacaccctcctgtagctgttgaaaagctatgctgcaggcctcatccctgctctgccatttatctcgggagagcatggtgcctctcccagcctgtttccttctctgtaaatggatgccttacctccaggggtcactggggcggtccaaggagcttgggacacatcaggtactttaataaaaggtgagctctgatttttttctctggcctctcacaatagaggtggaaggcactgcccaaggtcaaaaataagggcagagggggaagaagcccggatcttctttgattccagggccagcctttttcagtaggccagtctttaatggggatataatgcgcagccgggcagagcaccccaggcctccggtgcc

SEQ ID NO: 1013 - DNA, 1066 bp, Homo sapiens
tttctggacacgtggcctgtagcagcctggcatctgtggcgcctcgtgtggctgctggcatcggtgaggcatgagctatgagtgtgccagcctcgggcccttggttttgtctgcctctggcatgtttgcattggtggtggagctgacctttgccccttagagagtctcctgtggccttcaacggggaatgggggccagatgatagcgcgggccttgtgctgcgggaaaggctacttcctcagtcagaggtcatctggagggttctcccctgcggttggaagtgttcatgcaaattccagatctgtcctggcccagcttggaggtgggccttcctgactgggccatcccttgcgagcgttctcagcccacactggctccctctgcgcaggcccctacttgtgaaggagctgagccgcactcggtgggctgtcctggggcacccatgttgtgtgttttggttttgtttattttgtatctgcctggtttttccaagtctaatcaggatgtcccctggggtgacattctttgctgagagaagggcacatgcctcggttccctgggctgtagaaagccagtgctcagccttgctttctgccgcagacttggtgcccggagactcgctatcaaagtgcagtggagataatgtccaatgggaggctgaggcaggagaatggcatgaggcagagcttgcagtgagccaagatcgcaccaccgtactccagcctgggcaacagagcgaggctctgtctcaaaaaaaagaaaaaaggaaaaaaatggttatctgcatcctggttaaaatcagtaccaccacgtcccacacgtggtaacatggacttgctggataggacctccttgctccatgggcctggaagcagctgcttcagaaggaaggtggtgcggccggcggcagcggagggcgcgctgtgcagtgacgagatggtgcaggcccgtccacagccctggcccagagaaggagagacctcactgacccctgctgggcctgcctctggccatcttcattttgaaattcggtatcattgtctccagagggaatgagcagctcttt

SEQ ID NO: 1014 - DNA, 692 bp, Homo sapiens
ataaaggtgaaagtagctctctagtagcctgtgacagggaggatcatcagacaggtgtttacttccttcctggattacttttccaggagacacccagatgtggcaatagctcttggggttttgggctgacgtacaggagctgaagctgtgatgtcgcgtgtccgtgtccttaggacagtgttaagtggggagctgcccccatcctgcattctcagcagatagcaggcatgtttgccagccggttggttaaacaagctctgaaaacataaacattgatggttttggtggtttcatgtgttgtcgtgtgacgtaagcagatgctaccacagcagagccagaggtgagcaagacgtagggcagagaatcccactcacagtaacacaggaactaaaacagctttttaaaatgtgtttgcaggccaggcatggcggctcaagcttataaccccagcactctgggaggccagggtgggaggatcacttgaggccagaaattcgagaccagcctgggcaacatagggagacctcaaatcaatgtttaatgacctgggtgtgggtggtgcacacctgcagtcctggctactcaagaggctgaggtgggaggatcccttcagcctggaagctcaaggctgcagtgattatgccaccacactccagcccacatgggtaacagagcaagaccctgtctctaaa

SEQ ID NO: 1015 - DNA, 643 bp, Homo sapiens
tcacgagagggggcacagtcgtgcagcgggaggagcgagagtcggccactgtttgggtgccatgggtgtcctgggtagagttgagggcctcccccgggaaggataatgctgagccccaataggaaacactgccctgagctatctgatggccagccctctgtccatgggggagccatttcttttccttatctctaagctaatacccctctttcctgaggttctctcttactgcctaagctgtttggctctgggagttactggctagcttgtccccgtcgggatctcatccccatcggtatctctggcagggcttcttgaccagctcccccctggacctgcggctggagacggagttgtgccgctctctccgtcctagtttgccttttgaggcttacccactcctccacctgggctgttttaaaatgattagagcagaacctttcaatcaattctatcaaatgcatctgtagagctaagggggcggtcccttatgtgaaacctaatctttatagctaggccgatgggtgtgctcaccgccgaggcacgtcattacgatgctctttggctagtcattgtcattagaaatgtaaacactgattggggaccttcccgcaggagctgtctgggctgcctgctgtctcca

SEQ ID NO: 1016 - DNA, 1118 bp, Homo sapiens
gactgcgaaggagaacgcagcaagcccaggcggcggtggaaaggctggaggacacacctaaacatgtggaatcccaatgccgggcagccagggccaaatccatatccccccaatattgggtgccctggaggttccaatcctgcccacccaccacctattaatccaccctttcccccaggcccctgtcctcctcccccaggagctccccatggcaatccagctttccccccaggtgggccccctcatcctgtgccacagccagggtatccaggatgccaaccgttgggtccctaccctcctccatacccaccgcctgcccctggaatccctcctgtgaatcccttggctcctggcatggttggaccagcagtgatagtggacaagaagatgcagaagaaaatgaagaaagctcataaaaagatgcacaagcaccaaaagcaccacaagtaccacaagcatgacaagcattcctcctcttcctcctcctcttccagcagtgattctgactgaatacaggccctggacccttccctcaagtcccaccagttctgctctcccatcaagcttcagatgccacgttgtactgggggaatgtagcccttgtgctccccaccccctacctccacctgagcctcaccctgctgttgagccctgagtggctaggggaaataggaagaggattgccatggcctggccatcttgttgctgcttggagagatcatatagctaatgaattaggcaggggagctattttttgaagatgatgaactaaatgttgaagacaagtttgagatctgtaaaatgtgattttttacttccacttataatacttgtgattggggaggtttgtggaaattcaattatgatgaaaaacctctatcttttttgtaatgttggcatacttgggggatttagtggcaaatacattccccagcaggccttttgttggttgcactaactgcaaggttgctgggaagtagagtccatttggttgatgagctttgactgcggttttggaaccttacctctcctccttagcccaatatgctgtctcgggtcctattcaaataaagttatttctcctggtctaaaaaaaaaaaaaaaaaaaaaaagaataa

SEQ ID NO: 1017 - DNA, 415 bp, Homo sapiens
ttgaggaggaattatttaattattcaggtgcaccgacccagtcagattaacatccaaaggactgagccctgaacaaagagtcaagctaccttttaagcatttcgtggggctgggggagatctgtgcagggggaagcatatcacagaagtgagaaacaaagacagtcattcaattgagacatgcattatatcatttttttttcaaggaacagcatgttttacgacttgagattatctgtctagtgatcttacagctgcacagctagagaaacagagtcttcacaatgcctgggaaagggagagataaggctcactagccatagaaaaacaggcagttaattttaaaggactccagctctttctcttcctcagggggaattgggttttcttacatacaactaagttttgcttacaca

SEQ ID NO: 1018 - DNA, 101 bp, Homo sapiens
tagagatgggggtttcaccgtgttagccaggatggtcttgatctcctgaccttgtgatccacccgcctcggcctcccaaagtgctgggattacaggcgtga

SEQ ID NO: 1019 - DNA, 13191 bp, Homo sapiens
catttcattatctatctcttctgagcctgttgtatctggagcagagctgggcaggaggtggtaagcagaggctctggggcctcctagaccctttgcagagggaaccggagatgtcttccaagtccccaagtctggcaccacctcgtctcaatctcactttcccctccaggtctagcagacttggcctccatccacagggccttcttagcgcatgccctcttcgcacttactcccacttccctccccatccctcgatcctctgtccagaggtcccaagggcctgttcagaccctgaactctgcccagcagcccctcactctgtcctctaccagggcgccttccctggggctcctgctcatcctgcagtgcccctcccctcccaacccctgtgggggtgtcccatcactttccccagcacccacttcccacaggccttccctcctcccctgcctgctgacccggcagctcccgacagcacggccttgtttcccagggaacaatgcatctgtgtcacggacaacaatgtcctttcatgtcaggcgcactggccccggtgcacgccgggacgtggcacaaagggtgctttgtgcagctcagggatgtgagttcctggctttgccatgttggtgctgccgacccggggcctctgtccttgggtcccagttatgcaacagtcagtcgaggctgtggggctggcccaggggctttatctgtctccctctccaacttttgccaagttacccttctgggcttccgccagccaggagcccacactccctcagccctcccacacgctcctctcacctcctagctgggcttcgctgacttgaacctggccgagtttgcgggctcgggctccacggtgcgctgctgcctgctcgagggatatgacacgaagaacactcgccaggacaactccatccttaaggtaccagggatcctgccacctctgccaccctgaccacgggatggggacaaaccaggctgctcatcagaatcctctggaggagggttgttaaaaatacaggccttacctgaataggtagacatcgggaaggggcgagccctggaatcaggaaaccactatcagagggaggcctggctccgctgttggcctcagtttccccatcaagttcagagagggggccctgacagtctccagggtttggcaagcacctgcagtgggttcacgtcatgctgattgcatgccctctcttctcttgtggtcccctgacagcagccccacgagctgtggtatctttgattagtcccagcttcaaatgggagggagttaaggcacagacgttaagtcatttgcctgaagtcacagacagagctggcacctgaccaccagccagttgacttcttggcccagctcctaactcttccccaagtgacacgtggtagcctggcccccagtggattatcagtgaaaatgatggctgctgagggccccgggggcaggtttccagtggacagggcagccccacccccaggcagctgcctcgttggccttttgggaacagaaatgtctgggtgtccgtcaccagcacacctctcttcctctgtttccacacctttcacctggccgggaaaacaggctgtcctaacagcgcctctgcaaggggacccagggagagcctatggtatctggagcagagctgggcaggaggtggtgagcaggggctctggggcctcctagaccctttgcagagggaaccggagatgccagaaagggtccaggctgattgtcttgggagctggagcctttcagcctcagtcaggctgaaaagcacaggcacagtagccctgtgcacctcaggccagatcaagggagcctgggggccaggtagccttgggttcaagggaagctcccccacatcctgtctgcaaggtcttgggagtcacttcccctctctgagtcttggttccctcatcaacagccttgggctagctaggatgctttcatggccgagtgaataagccatagaaagcctcaacctagtggtcaccctttctttttttttttttttttttttgagacagagtctcgctgtcacccaggctggagtgcagtggcacaatctcagctcactgcaagctccacctcccaggttcatgccattctcttgcctcagcctcccgagtagctgggactacaggtgcccgccaccacgcccggctaatttttgtatttttagtagagatggggtttcaccgtgttagccaggatggtctcgagcccctgacctcgtgatctgcccgccttggcctcccaaagtgctgggattacaggcgtgagccacggcacccggccgaaagcctcaacggagtggtcaccctttcataagtggtgacgtcaggatctgtgctcctcttttccacttgctcatctctgcctgtcactccatctcagcctagattttagggcccaaatcttgccacatttgggctgttgttagtttgcaatggcttcatgctttttcatcagactttcaccaaaccctgcccaccacctgctgtgccaggccccatgagccctcttccctctcctgcctgctgggttgagctctgtggtccttacacagggccggggtgagtgtgtggcttcaccatggagaagctcattgtctaggcctgtagctgatggcagtccgctcactctgccaggcgcagggctgagcccaggcctcaccttgctatgccctcccctctggtctgccaggcaggccttggttccatctctgtcctccacacagggaaactgggctcagagaggttagtggctttgccagagcccccaagccaggagggggcagagagacaggattggaatccaagcccttctgaggccagagccgaaaggctgcagggggccctgcgcctgggcaggctgtgggtggtcagggcatagctgattgctcccctcgccacaggtcaccattggtatgttcctgctctctggagatccctgcttcaagacgtgagtgctggcacaggcctagggagcggatgggagcccagtcccgggcactaggggtggaggaacagggactctgggtgtcctctgttttcatctggtcctgaagcagggcaccctagtcacacctgtctgtcttcccaaggccaccatcgactgccaagtccatctccatcccaggccaggattcctccctgcagctgacgtgtaagggtggtgggaccagcagtgggggcagcagcaccaactccctgactgggtcccggccccccaaggctcggcccactattctcagctcaggtacagttcctcatctgtccgcccctcccctgctagcggcccgaggggtttacctccatgtcatgcccaggtccccagggagacgctgactgaggggagagtgatggtgggagggtgtttgcatgctcctgctgggctgatgagacctgatcaccttgtgcgtgctggctgtggtgctgggccctgagatcacagctgtgccttggactgagactgatgtggcctccccatcctcaaggccctgcagtctagcagaagaaacaggcctcaatcaagccatagataaatgcatgtctacctgcaaacaggataaaagctggggaagacaggcccagaaggtgggatccatctggggccagggaaggcttccctgaggatgtagtatctgagctgcattcagggggtgaggcacagtatacctggcagagggacgtgctgggagctcttgctctcccacatactctatgactttgactggccagtttgcgtctctctgtctcagtgttctttggaaaatgggattggtaatagcaattacatcccaggtcactttggggattaactgtccacatgtgggcacctgcccagcacatggtaagcacttagtgggcactctgttttttgtttatgtttttttagacagagtcttgctctgtcgctaggctggagtgcagtggcgcaatctcacctcactgcaacctctgcctcccaggttcaagcatttctcctgcctcagcctcccgagtagctgggactacaggcgagcgccaccatgcccagatataccttttttttttttttttttttgtatttttagtagagactggatttcaccatatcagccaggatggttgccaggatggtctcagtctcctgacctcgtgatctgtctgccttggcttcccaaagtgctgggattacaggcgtgagccaccgcgcccggctgggcactctgtttttattaaattatcactggtactaatgttatgaaaaatgtgaacgagccccaacccccagaggagatggtgtggcaattaggaggagggggtgttgccaggacaggaggctctggcctgcccccaagtgtttgctgggccccctcaaccctaagcagggcccccagaggtatgagccttggactgcctccaggctgattagtgaacaaggtgtcacgtgacaaccctgatttgtcccacagaatcagttagagcacaggcctcatgtggcccagcagatgcttgccgagtgattctgcctctgggaactgagagcagtgagagaccctctgacctcaagggcccagcttccctccactcccttttccactgcagacccagctagctgaggcccagaacagaaagctgggggcttcccagcacaattactctctccagcccctggatggggttccccagaagagagatgtgtctggggactaggccaccccagcgcaggtggtgccttcgtgtgaagtagaagaggcccctcccccaggcagggtgagacttgagtgcccacttgcctctggagctggcctccccccatatgcagagaacctgttggggacttgaaaagccacatagttatggatgggcacacaggccagcctggggtgtcacaggccagcctggggtgtgttgggcgggaaggcaggtggatactcagagccctgggtaggtcccacctagtcccttttgcctcctgctggggagtgccaggaaagtctgttttgaagttgggcttatgggtgacttgggacaggactgtgggcctgtccctttgggccagaccgctcgccctcaccatgtcccttccactccaactccgctgacccaggccccttccagcctcggggcctctgccgatgctgttctctgtgcctggaaagcccttgccctcttgaggccttagctggctccctccagcaatgtgtcctggaggtctgccattaaggccgtctccttggagaagcctcccctgtccccagactgggccagacccccagtaagcactgctccctgctgtgcacctctcactgcggttgtgggtagtggaggcagtttttgttcagcgttcttcttcctcgctgacctgtggtgggcaccccacccaagtgtgccctctgtggaatgaagggacctgggttcggagggtgacctatggctcaggctggttgctgctcctctgaacctgtttttcagtctgttaaatggcgccctgccatgggaggctctgtgagggcacgttgtgaagggcgacagtgagcagcactgggtgacccctgtcacctcaccccctgccccttcctgccttccagggctgccagaggaacccgaccagaacctgtccagccctgaggaggtgttccactctggccactcccgcaactccagctatgccagccagcagtccaagatctccggtgagtggctgcctggccctgcccccgtggcctcctccttcctcgggatcccccattgtgatgctcccctgcgtcgcccctgacaggctacagcacagagcactcgcgctcctccagcctctcagacctgacgcaccgccgcaacacgtccaccagcagcagcgcctctgggggccttggcatgaccgtggagggccctgagggcagtgagcgggagcaccggcccccggagaagccgccgcggccaccccggcccctgcatctgtccgatcgctctttcaggtgaggcctactgcttggtgccccctggagaacagacctctcccggtggtgccttgaacctccgcttctttacctataacacagggaccgtaaggtccccacctcagagggttgggtggtgacgattccactagctgatggccctgaagggtgcagccatgcccggcgtgcagcaggttctgttcatggctgctcttgcggttttgtggatcagacaagagcacgatctgctaggtggccttaggaagctgacttacctgctcattgcctggcatcctcgtctataaaatcggctcatgatggcagctgcaccctattgtgcatgtgaggtttcagtgaagtacagcacggagcgcacagggacattctgagcgccgctgcggctgactggcattattgtcgtcgttctgtgcttgtacctgttactgccctgaccgttgtgacttgtccccccacgacctgacccaggcggaagaaggactcggtggagagccacccgacctgggtggacgacacgcggatcgatgcggatgccatcgtggagaagatcgtgcagagccaggatttcacagatggcagcaacaccgagggtgagccgtgctgggctggtgggggcgaggccacctgctccaagggctggccctgccgcgctcagcctccatcctctcctgtgtccccacagacagcaacctccggctgttcgtgagccgcgatggctctgccacgctgagcggcatccagcttgccaccaggtagggcaggcttagggaggggtcgtcggggcggctggggcttgggggtgagagcagagtccccacagtccactcacctggccttgaacgccaaatcttgtcgccacagtgtgaccctgggcctgtcatgtctctgaacctccctttccccatctgtcaggctgtgtggacaccaccacctcacctgggagcctggggcagtgagggcacggacaggttcggtggtttcccacagttcacaaggtcacctccagcaatgcctggtgcagggctcagcacatggcaggggcctcacacgcatttatttagaaccctcccttctacttcctcccagctccagggactcgggaagaatggtggtggtgatgcctcatgggtttactgaacaaatctttccctagcaccagctaggcactaggccctaagtgaaggcctggttcaatgcaggctgctgcctacacagcatccacagatggcaggggtagatgggaccaaagttgcgggaacgacagtttatagagtgctgcgtcacagacattcatttggagcatgttgactatgtgcctggctctccatgtgctttggctaaccaaatgaatgagcgagtgagcgaatgagcttcccacaggcgggctgctgagggcaggtggggagcccgcctaacatccacatccccagggaagaggcgtggccaggccgctgcgcagaggctaccctctcaagctgctctgctgactcctgctggccacggcctggaatggcagctatcacctcccagtagcctcctgggctgctctcgggtgggggtgagggggcggtgagcaagaaggaaactgaggggctggcttccttatgggtttgtaaacacacccctccctggccccctctgaaaatgaggaagcatcttggggaaagaaaccaatctggttgggagcgagatcacagcagagctacatgctgagccccgagagtccccgactccagggctgggcctgggctcggcagggaaaggagctgaccaggtttcctgacttcccactgccctcttggtcaccctcacatccctctgagcctcagtttcttcacctgtcaagtggggcaggatgcagtgactccctgccgaggtgaccgtgaggatggggtggcacagccagatgtgcccggaagggctctgcaggccccacagactctgatgcttactatctgtgtcactgtgggcaagggacttaccatcgctggggcacggttttagcccctttgcaacacagggctggttaacagtacctgcttgtgaaacacctccagaggcctggtccagtggagcgctcaggaaatggggtatcgagggggacatgctgacctgtctctcacctgcagggtctcttctggggtctacgagccagttgtgattgaaagccattgaggagcaggtgtccgggctggagaagagtcctgctttctctggagtccagacctgtatcattccatgaggaactttccccttcagatcacctctgcgccacatctcatccatgcctcctccatgcactccagtccacactccccgtagcatcattccattgcccctcccatccatgctgggaccctcctggcccaccaaggcccaggcaccactgtgaatattctcctctgaaccactagagggcaggccaggcaggccaggcgggcccgtgcagcttgtgggcaagaaggagctggcaaggaccggcgctgctggagactgacccagccctctggctgaggacatgcagcggctcctaaatgtagagatgcctgtggctgagggggcctctctacctgtgtccccactcactccaggagcactggctttggtcacgtcttagcagcagggccttgctccgttgttcccttgccctggtggtgggggggccagaccacctccggaatcctgccacctgtgactgtctgactgcttagtgcttcagctgtcccttccttgtgtcctgggggacctgctggcggcctcttcctgggagccatgacctcagaccccacccacactccagatcgagacccctgcctccccccggcaaatgtcctcccgctgccttgcagcctgcactttgcacatgctcacccccagcacagtcccactggcccctcacctccccttccctgagctccttcccaaggactcctggtcactgcctgctgtgcagtcagaggcccagggtccagcagcccggcgggaacgggtgctgcctcttcctccagttagctccagctcaggtctgagacccgtgctgagaaaggtctgagcaccgaccgtgccctctgcccagggctgggtcctgagcagctggttttcctgcaggaaggttggagcaagcaaagtccttctctgccctcagggtcagctgcccagactggggcggatgccagagaggcaggtgggctgtggctggactggtccggagctggcttccttaccagaaaagcctcagccttcctctggaagcatcccccgttctgggcaagggggaagggctcctttaaggggtgtgctttcccagtggggagcagtctggccctgccccctactaaagcctctgctctcagcactttcccccaagtccttgtaacttgcttgaaggtgggttctggctgccagccagtccctggacaaactctcctgccccttttaaatttcactcattttgtataaacccagcaggctggtgtttacttagccctgtagcttttttcattttttctttccgtctttcttcttgagttcacggttcaatattgcctcctcgccctggtgaggggaggtgctgcttttctgccccacctgccggctggttccagcagcgctggggcccagctggggggccgggatgggggcttctctctctgggaggggtgcaggtgccctccccaggctgggagggttccttccctagctccccatctgcccccgctggtgagagttgggcttcttggtcttggaactccctggcattgggaacagagcatttccagcatttgttgttgttttactcacctaacccttagaaaatgaatgttagaaggtgcctgccgaggcgggacagagtgttcgctcgcgctggagaaggctctgctcagccctgagagtcccttcctgccccaccgatactggcactttaaaaaggaagctgaccgcacagtgtccagacgaattggcccccagaagatggggagttctgtcctgcccttctgtgtctgcgtgacctcacccagcctaggagggaggtgcattcagggtagatttgcctctcattcaaagttctggggctttgggtggaaaacagccagctttggcgctgttggggagactcctccagaccaggaaccccagaaggagacagagcctgccacatcctcccacgccaggccctgggccagggtgattggactgagaatttggccacaaccaaattgatgctggctggaaccagaggccagaaagcctggccttgtccccatgtgggagccctgtcctcagccctcttgtccccttgagctcagtgaattcccaccaggtgcccacagctcctggacttcaaattctatatattgagagagttggagagtatatcagagatatttttggaaaggagttggtctatgcaatgtcagtttggaatcttcttgaaagtttaatgtttttattaggagatttaaagaaaataaaggtctacaatatctttaggttttttttttttcctgtttaccgcacaaactgaccacatggcatgtctatcaggatggagggtgtccatgttctcctctgtctttagggaggtgataaggagatgggcggaggggtgtttttttctttgactcccctcctttctaacagaatgttgccaccactgcttgagtgggctgtgtttgttcctctgtcccagcttctgttgtagaaaataacattgttaggggaactcaggctagtgtcagcgtcttggtttggggagaaaaaattaaatgtttcggtttttgtttcttttgctgttttgtttttaccttgttactttatcatattgactttagggtcaaaggcaacatcagaagaagtcagatatgtatagtgacattccaggggtggggaaggtgtagggatccagggttctcccggtcttggccacaggcacaatcatcaccttcatcgttccagattcctggggagaaaactgagaagatcgttacctgccagcctcatacggagcaaaagctctgtcctcagggccaagttctaaccactgctctgtagaccttctctgcaatcaagtggcctctaaggagcatgcctgaggacaaataactgcgcctcagtttcctcacctgcagatggggttatcaaataacacgagtgtgcagcctgacctgtaggaggtgtgagtgtgttcccaaactaaagccccaggctgccatcatttacaggcttggcttgccccgggcccctcacccccgtttctgaccatcccaagtctctctgggacaggcaagtcactctggttctttaataagcttggaggtgttgggaagcttcagtggtactggccaggccaggaggaatcaggccaccagggctccatctctatcctgggatagcattcaccccactcctcctcagggctgaccccgactcatggcccctttaaaccctgaaggccgattctgccccttcctctgttatatgcacaactgaggaaggaggtaaaagtgggctcctaggtgagcccaaagtctcctgagagataagggaaaagaattggactgtaggtttaaaaaagttgctcttggccgggcacagtggctcacgcctataatcccagcactttgggaggctgaggcaggaggcagatcacctgaagtcaccctgaccaacatggagaaaccctatctctactaaaaatagaaaaattagctgggcgtggtggtgagtgcctgtaatcgcagctactcaggaggctgaggtaggagaatcgcttgaacccaggaggtggaggttgcaatgagccaaaatcgcgccattgcactccagcctgagtgacagagcgagactccgtctcaaaaaaaaaaaaaaaaaaaaaagttgctcttgtcagctttgggagggcagactccatagttggagatgggcttccaaccaaccaaggagataaatgccagagggagcgaaccatgccaggctcaaagcacatctctccccaaactccccaggtggggacagcaggccaaaggcctccacataacccctcagggaggcctggagtccagatgctgtactccagtatctaaacaatcactcaatcttaaagctgacaggttcaaagctcttactttgggccgagcgcagtggcttacgcctgtaatccaggcactttcggaggctgaggtgggtggatcacctgaggtcaggagtttgagaccaacctagccaacatggtgaaaacccatctctactaaaaatacaaaaattagctgggcgtgttgacacgtgcctgtaatcccagctactcggtaggctgaggcagaagaatcgcttgaacccaggaggcagaggttgcagtgagctgagatcatgccactgcactccagcctgggtgacagagtgagactcccgtcttgggaaaaaaaaaaaaaaacaaaaaaacctctttctttgggccaagcctccactgagtgccagggatacagcagcaacctcagaccctaccctcggggctgacagggctggatcaacaattgcatcagtgaattaaaaggcacaggaggctgggcaccgtggctcacgcctgtaaacttttggaggccgagttgggaggatcgcttgagcccaggagttcgacaccagcctggataacatagaactccgtctcaaaaacaaacaaacaaacaaaaaaaacgttcccgactggcttccctgaggaacgtggcgtcccagtgagaccggatgggtgaggagcagccggcctgtgagtggtgggggaccgcgttcctatctcggagctgaagaagcgtggaagatgatctggcccaacatctctttgttctcagaggaagggccttccaagaccggggaggggcctgtgcgtgggtcccggtccgaaacgtgtctgggctgctgcgagagacagtcggtgaaggaagggaggggacatccgaagggtggcccgggaggccgggcgatggtgaggagggcgcctcctctccaccaaatcctccccatccatgcgggctagggacagaccctcccccgcccaccctaggctggaaagtgaacgttctctgcacctctcccacctacagactaagtagggcacccggtttccgtgtcggcttcaccactgactcggaatgggatctacctttctctgagcctcacttttcccatctgaaaaatggaacttccgatcccgcac

SEQ ID NO: 1020 - DNA, 1316 bp, Homo sapiens
cggaaccggatgtggcttgcggctcgggtggctgagcgcgcggggaaatggtgagattggcaccgtgtgccggagataggggcgtctgggggtggggtcccgggtctgctcaggagctggggcatgggcacttggaacggggattgctctcccgcccccactattgtacggacgacaacgcggaggcctagcattctctcccagcctagaaactgatccctagtcagccctctaccatctgttgaatgggaagcttagaccgtgatcgggccgcgacgccccgcttccattagtgcgccgaaatagagggtcacttcgtcagctgagacctcccttttctccaggccacggggacagaccaggtggtgggactcggcctcgtcgccgttagcctgatcatcttcacctactacaccgcctgggtgattctcttggtatgtcattctccccgtccgctgctcaccttccccgagccctggcaccgccagagcaactactatataggctctaggcacggcgctggcttcattgcctgcctcatctcttgaactctccagaacaactctatgaggaagatgccagtggtaccgcattttatagatgagatagctgaggctaggggagaaggatctggcccaagattgcatccttagccgctacacttataactctgtttccggcttgctttgacttttgggggagttctgttccttctgggttagcctgctgactcttaggcatggcaaacgccagtgatatttgtgaaggcctttaggatatttttttcttgtgggaaaacttgttggttattgcttaagaagtgcagtgtgtctggaagtgcagaacttggtatcctttagagaaaaaatattagtgaagaagccctggaggcccaggttgggagtcagtcgaggattcctcaagtaccatttgctaggctgtgaggtgccttagggcaggtctcttgtgccctgttctcttgtccccaccaccaacctatagcaggcaccaaagcaagtgcccggtaaataccaataagaaattaaggaaagaaacaaaccacgacacccaaatgccgtaatcttaaagaaaagcaaatgcagtcccagtcctctgaatgggtcagccccttagatggaggaggtgggacgtttgggcttgggggctcggcaaggcaagcaagacacaccagagctcttccctcgatgccagccattcatcgacagtcagcatgtcatccacaagtatttcctgccccgagcctatgctgtcgccatcccactggctgcaggcctcctgctgctcctgtttgtggg

SEQ ID NO: 1021 - DNA, 309 bp, Homo sapiens
ttcttttcttttctttttttttttttttttgagatggagtctcgctgtcgcccaggctggagtgcagtggcgcgatctcggctcactacaagctccgcctcccgggttcacgccattctcctgcctcagcctcctgagtagctgggactacaggtgcccgccacctcgcccggctaattttttttgtatttttagtagagacggggtttcaccgtgttcgccaggatggtctcgatctcctgacctcgtgatccgcctgccttggcctcccaaagtgctgggattacaggcgtgccaccgcgcccggcc

SEQ ID NO: 1022 - DNA, 5959 bp, Homo sapiens
tttaaaagtaaacaaatctacttttattcagaaatgatgctttttaagtaagggtaggaaatcttcattttctttaataactaactctttttccctcttcctaatttaattcaatttttacagaccccctattgataaagatgtaagatctgctattcattgtctttcttatacatagaagtaaaatcacagaaataattattattttatgggaggataaaacatttatttaaatggaaacactaatctttattttcatcatgctgaagtgtgtggttacaatttccaataaaacactatatataataagcaaaataagttagtacattgtaaacttatgcacagtttcatcaattaacagtttaagaacaaacaagccatttaagactttggagctacatttagtaaaaaattgcaaacactcaaatcttatcaaccccaagtaagacagtaaagagctattcaagacttcttcaaaccaattacacaaatacatgtttatttttggttacagtcccctgctatgcacaagaccattggaatgctggaacaattacacattttaaaacggcaaaaagcaaagcaaggagataacatgccagccttagagaagctgtcttgaaagtgcaaactgcgttttctcttcctgaaccactaggataagaacgggtacctcagacgacacggcagggtcatgagcatgctttctataccccactggtgggacatttactggaaccaggtctccatgcctttgaagatacctccggttttaaacagtgaacaggcttcaactaaatatagtgcaaatcaaataccaaggagcaaaacgacagaatagagactgtcacagatgattgacttcctgtttctctacctggcacaacccacatgggacacattggcacacggtaacaacaacttctatttaggttttgatacggaaggcggtgcggcggagcgaatgcagggcaaccacgcaacagcccctgagcaaggccccgatgttatacacaggatccgttccccctctctgagtactgaatgcccacagaaccgtggggaccacgggggcagccacagccaggagatccaccaggaagctgctgctccagtactgcctcacgacgcccccgcgagccagtgggatgacaccatccaacctctcttccacgcaggctgcaaaatccagctctctcatgaggcggtttgcatgaacttctgcatccacattggcgtagggggtctccacgggagacaaaaggatggctgagtttggatttcttggagttaaatcaaccactaaggcagagagggactctgggaagctctccatcgagtctggttcagactcatcaggggacgccaagctcgagggacaggggtcctggagcttctgcagcacactctgaatgagctctgagatggctgggctgtagggcaccacgtcggtctgaacggctcgctccaccaccacactgccctcctcctgacccatgactatgggcagcagctccaggacgttagccccaggggtggaatgcacaagctccaggtcaccagattctgtggtggtggctgtcactatctcatcgaacaaatctgtgctgttggctatgctatctcctaccagtagctccctgtcagccccttcccccgtgacctgctcttccagagataacccatctgccattgtgtcaagaggggggttgagggttaagctcttctctggggaatcacatggaaagtctaggcacagttcgtccctcagagagccactgtgtgccatctccatgctctgaaggagagactccagcttcttgttttggatgtttatgtccacaaaatatttctgaatgcctttatctttatcagccaagctgctccgcatggtttcgatgacctgtttgagctgtttaatctctttcctggcttctttgagtgccaactgggcctctacccggtgacactcctcctcaatccagtcctctcgcatgcgggccagctgggacttaagctccacgatttcactttccctagagtgccaagacaagcatggttaattaaaaaaaaaaaaaaaaaaaaaaaaaactttcaactgggcaacaggcagttcaggcagttctggcacagagccaagagctcatactcttccacttgaaatacagatgtgaaatcagttttcaatgcagggaactcaagagaacacagaaaaacttgagaaaacactccagcctaaactgaaagaagcagtacattttctctttggcggagattagctgtgaactttctctttacttgtaaaatggctaaagtaataatagtaatcagaatcagaatcaaaatagctaccacaattttttttgagtactcattatgggtcggatattgcactgtgttacaagtcttatcttctactcaatccttaatatttgaaactttattattagaacatcttagcatctgttagcctgtttttatctccatatcctaccctttccaaatgtctatagtttgtggaaggccagttcacttttaattacctaagacagaaggtagactgataagttttagccttgctaaattgttcatatggtattccaatgataaacatttttgaaataataaaatgctacacgtggcagggactttacatgatgacaagctgcttattctgtctcctctcaggtaggataatattgaattcatcctacactaaggagaatctatcctatttttcagatccttcacaggacaaccctatttcaagatctttgtatataaattctttcttatatataattttttcatattcagtccttacattctcagtggatatgaagatagggtagtcaggatcctcatatatatgaagagacatcaatattgctcatttaagtttaggctagaatattttcccaagttttgctgcattcccattccttcctcgagtgctccaatcctcccatggactctgcaaatcacagaccaaacacttccagacataaggtctgactcaccccagaggggagtttgggtctcaagtctatttcagacagatgatgagccagattaattcggaagatgaaaaatttcccttcctcgcagtctgcacccttacctgcccacagttttagcaaccaaggtattgagttttctttatatctttgtggcagcagaagaggaggtttgggctgatcaggtagcccagactcttagagaatgcacatgccaccctcaccctgagctcacagctaccctggtcagagctttcctggtctgttccaaaatgttccaggggaaaatgatcaagcagaaaaactggcctgctgcccagatgtcaaaagtcttctccctcagataagatctcttaagcatgggctttttttttttttcagccttaacacttggccaagaacaatgagccccttccttcggcacagaaatagcatgcaggaatcacaatgcacacagatatccattcatgcacggatataaacacggcttaattggtccacggttgtgacccattctgctggaagtatgggattgttcccgcacgtgtttttgccatttaaaaatagtcatgcacacacctgattatttcacatcaaagctgtatacactgcaaaacaacaacaacaaaaaacgacaacaacaacgaaaaacaaaggttcccctctaacctacgggcctccctgaactcctgaaacagccatatcacacagagttatgaaatgactcttttcagaggctgactttaaaaatttgaccaaaattgaatacaatcattttttcttttctatctttctatagtttgggttcatatttcattttatggagaaagaagttgtcctacaccccaccgttcaaggaaggcagattcacctttcatggagtcggcgctcagattccttcagcttggttttgaggtgtctcactgtcacctctttctgctgcagtggagtcaaatactgctctgggtttgggggtctgacaccatgattttcaccgcaagacatgtaccttccagaacgcctgaaacaatccaagtaatgaaatgttactttttgccgtttccttttctataaaaagaagagtaacacagagtgttatcaactgaatgtctgtgtccctccagaattcatatgttgaacttcttaccccaatatgacggtattaggtggtgacgactttgggaattagcccataagggtgaagccttcataaatgggattaatgctcttataaaaggaaccccagagagctttctagctttctttttccaccctgtgaggatacattaagaggtcagcagtctgcagcccagaagacagcccttcccagaaccagaccttgctggcaccctgatctcagacctaaacctacagtatgtagcccatggttctcgaaagatttggaccaacatctagagtactttgttatagccacccacattgacccagacacagctaacagcttgagaaggaatggtagctgtgtgctggggtcttaaacctcaataatgggtgacctcacttcagaaggtgagctgtaatagaattgccgatcttaggactgttaattactttgaagattgaagggggtattggtgtatttatggagagaatagggaccgtggaggaggagaattctctatggcttaggaatgttctcatacaaaataatgcaccattgtccaggtgcctgagctgtcagttcagagtaacatgcagcacagtgggtgagggtcaggggatgggcccgggcagaagagaaggaagccagccagaggacctaactttctgcacagtgtgccactgcctaaagatcctgatggctatttgctgaatgcaagttgttctaaaatcaatccctgctgtgagtatgccagtttggaggaaatggaaagatccttcttctgaagggaagaagtttcttcctctacttaactctccccagtgtgttttgtaagacaggctcaatgttttacaaaacagcccttgctggaatcttggcccctctcaggcctggctgggagctgggaatccctgctgtaagagagctgactgacgagaatagggatgcccagcaggaagaaggccgaaggaggagggcagccagctccttccctgactctggacccagtcccagccactatgctgccagctccctgagcacctgcctgcctccaagatgacctgtgtccatgcccaccatccagtcctcctgtcgtggcctctttggaaatgcagttccttctttctgctccacactccctacaatctcatatgaattaacttgttgcttgctcttcagacctcaattccatttcactttctcagggaggccacccctgatcgctccagactgcgttggacaccctccccacctttcacacacccctgtagcaacaggtgcctacagaatcatcttaagttgtttttgtttgtttgtttgtttgagatggagtcttgctctgttgcccaggctggagttcagtggcgtgatctcggttcactggaacctctgcctcccaggttcaagcaattctcctgcctcagcctcctgctgcctctgtggcattttctctccctattcaggaactgcttagattgctgtgccttgttagaaattgtggcttgcgctctttctgcagcagcccttgaggaatgagccgaatgtgggaaagaaaaatgcagtgtcttgtagaatcaggcaagggatcaagagttgtataacttttttttttcttttttaaagaaaagcttaccaagtaggacaaactaagatgcatgaattaggtgagcaggactcacctcatgatggggctacagtcgcttcctttgtaggagcctgagttgctactgcttggggaagaaggtgcataactgggatggatattgacagggctcagctgattcctgcacagcatggacagaaggtccttttcccgcgg

SEQ ID NO: 1023 - DNA, 1213 bp, Homo sapiens
aaaagattgttttctctttcaaggaaatgggtcctgatgaatatgaagagatggaagaagaggaggaggaggaagaggaggaagacgaggatgatgattcagcagatatggatgaatcagatgaagatgatgaagaggagagacggaggagagtctttgatgttcccattcgcagacgccgctgctcacgccttttttagcaagccttctgctgatggaagcactaggatgattctaggctgttaaatagatttctcaataatgtaaataactaaattgttctctgcatatagcaggaaaactagcatgaaatattgtttcaggccctgggttctatgtgacactacattaggaattggattgtttgggtttgctttgtgtttttgaggtagaggaagaaatgggaatcttttttttctcttccaggagtcagtggaagaatagttctctagctaaggaacggacatacctttgttttaaaatattttatacttacaaaaatctagaaatggagagggaactgttttgaataaggatttaaaatacctgcacaaggatagagagaaactatgtgactcattctgtgaaaagacttcttgcagttgtgagttatttagaaatgatcaaaatttgtaattaggctaatccatttagtgattcctaatattttgtactcacagagaactaattgactaaacaacttgaacgctagtggtttgtccttagacaatctgtctttgaatttaaagtctttatcgctaagaccttgactttaaatttttcatcactacaaccttgaatttaatttcaggtcttcaacatgatgaccttggatttaatttaaagtcttcaacactatgcgctttatcatattattcacagatgcatttttgaaatgtagtatgtaaaagtatgtaacgtgctgtttattaacaaaagattgttcacaacatctcatgtagtttaaatttgtaaatactgcttctgttttgtttctcctttatacacttgactgtctttgtgataagtgacatgaattttatgttaggattaagtatgttttcctgaaacttggattttttttgtaattatataattgagagttaagaatgaaatccttcaagtgttaaaaactcacattttaaaagcaaattttggttccaattctgtattttgtataattgcttattttccataaactaatattagtcag

SEQ ID NO: 1024 - DNA, 1213 bp, Homo sapiens
aaaagattgttttctctttcaaggaaatgggtcctgatgaatatgaagagatggaagaagaggaggaggaggaagaggaggaagacgaggatgatgattcagcagatatggatgaatcagatgaagatgatgaagaggagagacggaggagagtctttgatgttcccattcgcagacgccgctgctcacgccttttttagcaagccttctgctgatggaagcactaggatgattctaggctgttaaatagatttctcaataatgtaaataactaaattgttctctgcatatagcaggaaaactagcatgaaatattgtttcaggccctgggttctatgtgacactacattaggaattggattgtttgggtttgctttgtgtttttgaggtagaggaagaaatgggaatcttttttttctcttccaggagtcagtggaagaatagttctctagctaaggaatggacatacctttgttttaaaatattttatacttacaaaaatctagaaatggagagggaactgttttgaataaggatttaaaatacctgcacaaggatagagagaaactatgtgactcattctgtgaaaagacttcttgcagttgtgagttatttagaaatgatcaaaatttgtaattaggctaatccatttagtgattcctaatattttgtactcacagagaactaattgactaaacaacttgaacgctagtggtttgtccttagacaatctgtctttgaatttaaagtctttatcgctaagaccttgactttaaatttttcatcactacaaccttgaatttaatttcaggtcttcaacatgatgaccttggatttaatttaaagtcttcaacactatgcgctttatcatattattcacagatgcatttttgaaatgtagtatgtaaaagtatgtaacgtgctgtttattaacaaaagattgttcacaacatctcatgtagtttaaatttgtaaatactgcttctgttttgtttctcctttatacacttgactgtctttgtgataagtgacatgaattttatgttaggattaagtatgttttcctgaaacttggattttttttgtaattatataattgagagttaagaatgaaatccttcaagtgttaaaaactcacattttaaaagcaaattttggttccaattctgtattttgtataattgcttattttccataaactaatattagtcag

SEQ ID NO: 1025 - DNA, 807 bp, Homo sapiens
agggttctgtctttctctcctgggacatgtgtctttgacaccctgagccaccatgtaagaagtccagctaccatgaagccgtcatgcagaagagaccatgtagagacatcacacagagatagagggaggcacccaggagccccagctgtttcagactccagatatttggatcatcctgcgcgggtaccagacatgtgaatgaagaagctcgtgagatgactgcagttccagctaccatcggactgcaacatcacgggacaccccaacccagaaccaccccactgaatacttcccaaacaccaacccacatgaaccatgagagataataatgactgttgctgtttcaagccactaaaaaaataaaaatatttttttaaaaagtagaggctactgatggttgaattgaaatgatgtgtctttatggtaggagctcaataaaaatcttagatctcttgttgacagtgcataaaagttaccagtagaggtcatacttgattaatattttcatatcctcttttctgtaagtatatagcttaataattattattcagtatatgaatataagctcagtaaaactgtatcttggattgttacaagtggtctgtttgctaccttctgtgaattaccaactactgtgtaaaaaataagtactggcttagtgaaatatttaccattaaaaccatactgagctgggctgggtcgcatgcacctgtagtcccagctactcggaaggatgaggtgggagaactgcttgagcccaggagtttgaggctagcctaggcaacacagcaagaactcgtctctaag

SEQ ID NO: 1026 - DNA, 807 bp, Homo sapiens
agggttctgtctttctctcctgggacatgtgtctttgacaccctgagccaccatgtaagaagtccagctaccatgaagccgtcatgcagaagagaccatgtagagacatcacacagagatagagggaggcacccaggagccccagctgtttcagactccagatatttggatcatcctgcgcgggtaccagacatgtgaatgaagaagctcgtgagatgactgcagttccagctaccatcggactgcaacatcacgggacaccccaacccagaaccaccccactgaatacttcccaaacaccaacccacatgaaccatgagagataataatgactgttgctgtttcaagccactaaaaaaataaaaatatttttttaaaaagtagaggctactgatggttgaattgaaatgatgtgtctttatggtaggagctcaataaaaatcttagatctcttgttgacagtgcataaaagttaccagtagaggtcatacttgattaatattttcatatcctcttttctgtaagtatatagcttaataattattattcagtatatgaatataagctcagtaaaactgtatcttggattgttacaagtggtctgtttgctaccttctgtgaattaccaactactgtgtaaaaaataagtactggcttagtgaaatatttaccattaaaaccatactgagctgggctgggtcgcatgcacctgtagtcccagctactcgggaggatgaggtgggagaactgcttgagcccaggagtttgaggctagcctaggcaacacagcaagaactcgtctctaag

SEQ ID NO: 1027 - DNA, 129 bp, Homo sapiens
tttttgtatttttagtagagacagggtttcaccatgttagccaggatggtctcgatctcctgacctcatgatctgcccaccttggcctcccaaagtgctgggattacaggcgtgagccaccgcccccgg

SEQ ID NO: 1028 - DNA, 11003 bp, Homo sapiens
gctaggagacctgttctgatgatgtgtgtggtcctcaccacactgccctgcctcaccttttccatagcagtgactgaggtatggaatttttgatttcttctgctacaagattatgagattttataatttcttgttattggaatttgatagagcagcgtgctcaacaaatttcttgacatctatgtaatccaatcttcttccaggttgcaatatatgttatttaaagtactgagatcattgttacctctgtgattgtgaaggaaagtctagtagccaatttttaaaaattaattttgtgtttgtgtgtgagacagtaatgatatttgaacgtttaaaaagtgaaaaatgtgaaagttgatctatatttgtttcttctaccaacctgatgtttttcatgattgtcctcaattgtaaatgaatacaacaagatctaagggaaggaccacttacattttaatacctttgataagatgtccattgataataatttgcatgtgttatttatttgaaaataatactgagtttatgttttgactaaatatagcttcaaaagatcttggatagaaaccagcagggcaggaatatcttaggcagaactttcaggcttgtaagtacttcattatccaagaaggtcagagaagaatgccccactaatcttattgatttgcaaggtgctgtggaagataacttttattttcccaaagcatacttaatttactaaattacttaatttaccttgtgatatttcacttgtatgtgaagcaaatattcattaagtatatattacaggccaggcactgttaggtacagggcataggggacccaggaaatatggccgagtctctcatataattttctgacattagagagaaaaataaacaggcaattagaacaagtatcacaagtgttgtgagacagggcagtaccgagtaatgtatgacattagaaattacatggttgttagaatgcattgtaggtgctgctagaatacatcatagatgctaaattaggacaatgtatgaaggcatagaataattttgggaggttactcacatgtgctttgcttccagtgaactgcaacagggaatatttcaatctagatctgtcttttcccctctcaaagaccttgtaaatcatttggaaggttctcaaaagctgtaaaaatttagtttacaaccttttaagaaacatcactgcggtaaactgatggcatatctggagctcgatagccctttttggctcttttttatgatgtctcttccattgttacatctttttctttcctttcctttttttcttacttaattttcaccgaagtataacacataaacagaaaagtgcacgaaacatacaagtacagtaacaatggaataccacaaagcaaccccctgggtaagcatcgctcaagtcaaggtcaagaaggaaactttggccggctccatgcccacactcctttatttttatttattattttattttatttttgtatcagaaacccattgcttgctcactctttttttatgctcctttcaatgactccctttccctcctttccagaagtcacttctaacttgacttctgatactgcaggctagtttgtctgtttttgaaatttttccaaggagaaatcaaatgatgtctggcttcttttatttaaaatatggttgtgagggtcattcctgtttctgtaaatacctgaagctcattcgttttcagctgtagagtattacattttatgaaaagatcataatttacttatctgttctactcttggtcgccatcttggttgtttccagttttggcaattacagagaatgcggcagtgaacatctgtgaatatgtcttttggtgtgcatgagcaagcatttctgttggttatgtatgcaggagcagaactgatggatcatgagatattgaaatgttaaattgtgagagataaggtcaaacagcttttcaaacagattgtactgatttctatagcatctctatagaactcaccagcagagaaggagcattcaccagcgcttgcgttgtttcttatttttttggagacagagtctttctctgttgcccaggctggagtgcagtggtgcgtgtgatcttggctcactgcaagctccgcctcccaggttcaggcgattctcctgcctcaggctccccatcagctgggattacaggtgcccaccaccactatgggctaatttttgtatttttagtacagacggggtttcactgtgttggccaggctggtctcgaactcctgacctcaggtgatccacccgcctcggcctcccaaaatgctgagattacaggtgtgaggcacccctccaggcatcattgtgtctttttatttcagctcttctggtgggtacgatcctgaatctcactgtacttttaaattacatttctccagtaattaacaatgttgagcatcttttcatcttgcccattttttattgtgttgcttatcttttaaaaacgtatttggaagacttattttcatattcagattatacaagccttttttgattatatgtattgcaaatatctttatgtaacttgtcttcacacttttatatctttttgatgaaaagaagttcttaacttaaaaatagtccagtttattgctttcctttatggatagtgcttgggtcactcacttgtagaagattttgtcattgtgaatctgaatttcaaagtcttaaaatctttcatatatatatatttttgtttgtttgtttgtttgtttgtttgtttttgagatgaagtgttgccctattgcccaggctggactgcagtggtgcaatctctattcactgcaacctccaccttctgggttcaagtgattctcacctctcagcctcctaagtagctgggacgacaggcatgtgccaccacacccggctaatgtttgtatttttaatagagatggggtttcaacatgttggccaggctggtcttgaactcctgacctcaagtgatttacctgccttggacccctgaagtgctgggatttcaggtgtgagtcactgtgcccagcctcctaattatattttgaaagctatattgtttcttcattcttttttagattcacaatacatctggaactgatttttgtatatgttgtacagcagtgagttaatttttttccccacataacattcaatggaccgagcaccattttactaaaaaatccatccttcccacatttctctgctgtgccacctttgttataaatcaagtgtagatatacataattcctatgccaactctacactgtcttagttcttgcagctttatactagttctttatatccagaagagtaaatcttcctagcttattctttttcttccagaatttcctgcctttttaattttcatataaattttattgtcagcctgtccttttccacaaaaagttgcaacagtggttgaagttgcattgaatagtatcatttttccttccttcctccctccctccttccctacctcctttctctctctctctctctctctctctttctctcactctgttgcccaggccagtgcaatggcatgatctcagctcactgcgacctctgcctcctgggttcaagcaattctcctgcctcagtgtcctgagtagctgggaccactggcatgtgccaccatgcctggctaattttttttgtatttttagtaaagatggggtttcaccaagttggccaggctgatctcgaactcctgacctcaggtgatccacctgcctcgtcttcccaaagtgttgggattacaggtgtgaaccactgcaaccagcctacactgtttatttcattctctggcgcattaccctggctaagacctccaggacaatgttgaacagaagtggccatggtggcatctttgtcttattcctgatttcagagggaaaactttcaatatttcatcattaatacaatgctttccatagttttttgttattgtggtttgtttttgtttctgttttttgtggggcagggtcttgctctgtcacccaagctagagtgcagtgtcacagtcactagtcactgcagcctcgacctcctgggctcaagtgatcctcccatctcagcctctcgagtagctcgaaccaaagatgtgtgccaccacacccagctaatttttaaatttttcatagacttgggttctggccttgttgctcaggttggtctcgagctccaggctcaagcaatcctcccacctcagccccgcaaagtgctgggattataggtgtgagccaccacacctggccttgccgtagctttttgtaaacattttaagcagacgaaggaagtgtcccaaagtctagccagaattatctgagttctgtcttcttggaagactctaaatgttcatatttgttcttctagctctttgaggctggattcttagaagctctgctcagcagtagagttggaaggagttaccccttcaatattacagggagcccactactgttttttgcatgtatttaccaaggtctgtctttaactgaaaatatgcttccattgatatgagtccttatgacagctttagaaatgattcaaaaccttgtggcatttaaaacctgatgagttaaaaaccaaccttctagttttttagtaaatgtaattataattaatttagtgctgcattcagactattgaaagcattttgagcaaagaaagcacaataatttaatgcttgtaaatggttttctctaaacaggttcaaaagagcattaatgggtccgctgatgtcttacctgatatgttacctgacctgcccgtatctctggttctgttatccctgatcatggttgatattattgaaaaactcaggatatatcctcttagagggagtcaaaagagtaagtgttcttttaaatgtgaatattttttaaagtttgatatatttttcacatttctgccactgtgttatctgacaacatgtttaatgataccttttcttagggctaacattactgatagaagattgcaaatgaagatatctaaacataattatttttaaacctaccttgatagctagatagctgcttttgtttgctattcgcattttagtagtactgataaattaaaaattatcaaatagttaataccaaaaaccttaatgtttattccagcaagaaattatccaagtaaattattatagatgtatatttttctaggaagtctcttaaagcttatgtttaaatggattaataaaaagcttagtttggagacttttactacaggaattaatatgactgtggtagttgtgtcctagataatcatgtgtttttaattgtgaattataaaaatgccaaagatcacactaataaaaccaagatatggctgggtgcagtggctcacacctgtaatcccagcatttttggaggccaggatgggaagatggcatgagctcaggagtttgagaccagcctgagcaacatagcaagacaccatccctataaaaaaataaaatttaaagaaaactcaacaagatgtgtcacatctcctccaaagtgatgagttgaaactaaatacagattggcccttacaaaaagatattttgttaatggaatattttatttatttagtcgtaaattactccagctttcattaaatttcttgcggtagtatctgtgtttaattggcaatatttgtatgctagttactgtgtggctaagattttgtcatgttgtgcatttgaaatgggtaaggtttgtcaggttgttttctgatggggtgaatggagtcaactgagtgagcctcaggagacagcttcagagtgacggggtcaccactggggctcgtcagtcatttatgggtcagatatcagtaccttccagtcactcttgctgctcagatggaaagcaaaactgaggtggaggccactaggaagttggagaatctgagcctgtcactttgtacttcatcctcgggtgggagatgacggtctgttatggctaacataacacaggtgacatgtaggtggataagatggcagccggggccatctgttgagtggaaagcacacccaagtcacatctgccctccagagtcaagcgtatttgtcttaaactcaggagagttgggaatctccaaatcctttgctacatctctagattccttaaaaatgcaaatctatttttaaatataatttttttttcaatttgagctggggtcttgctatgttgcctaggctgacctagagttcttgagctcaggagatcctcctgcatcagcctcctgagtagctgggattctagctgtgcacggctgcacccagcgttaaattggatggtttctgatgactctgtattttccatattaatataaatttcctgtccaagttaaaaggtctttttaaaaaagaaagacacgtgtatctttttgggaataagttaataacattttatttttgttagtgatgagttgtttttttgttttgttttgttttgtttttgagacggagtcttgctctggaatgcagcggcatgacctctgctcgctgcaacctctgcctcctgggtttaagcaattctcctgcctcagcctcccgagtagctgggattgcaggcatgtgccaccatgcgtggctaatttttgtatttttagtagagacagggtttcatcatgttggccaggctggtctcgaactcctgacctcaggtgatccacccacctgggcctcccaaagtgctgggattacaggtgtgagccaccgtggctggccattagttgggtttttaaaggggaatttccttgcatccataacttcaataatgacactgagaattgaaataagacatctaaagaagaagtagatctgggggagaagactctagcacaatttgtacaactgcttctcacttgaagagcctccttcttgagctgttctccgtccaaatttaggaagattagtgtctggtttgatagttccaccgtttaataaattcacacttaaaaaaactagcagtcacttgaaatgcctttgtaaatatgaatcatacatgcttttaatttgtatgcaaagaccttgaacccaaattgtctcctacactcattttaacatgaaattaatgatataaattatgtaaattttgaatccatgaggttttctcatttattacttggaacatgaattaatatatgaatacattaacatgtaaatcttaaatacataaatctgaacctaagcaaatataccataaatatggtttcactacaggtgatacttgcaagtaaaaaaaattgactagaggcgggggatgaacaagatctagaataatttggctccctttaggaaatgtgggaaaagtgaatatgttctttgctctttccagatagtctgaaatgcatacatgtctgtcagctagcagcagtttggactttatgctagatgaaaccaacataatctacaacgttttgatttatggacactctcacagcatcctaaccatcttcattccaagctacaaaacttttatctttgtgtagcttttctttttccaaaattttaaataagttattctgctgacaaaatatgcttatgcttaaagcagtcttcaccggaccaaggaatcctttctactaacttcgtattaccagtggaaatctctcagtatcaagtaattatcatgcaacagcttctaagtgcatcgtttcatggaggtagagcagtgcatgggagcatttttctgacgcgtggatctctgtagcacggcagtctcacagatgtacgtggtacctaggaatgccaatccccagtcccgtgcagaaataacaagaatacaaaggatagcctgtgggtacaaatgagcgcaccttaatgcttccatttgaattttgctaactgaatcccatgtattaacgctcatttagcattgcaaccatacctgtttctaggacattaccatttttacggagagatagataggttgccagctctcactccaggcccagctccctggcaatcatgaccttgaaccacctagaagcaaagtgagcccccatctaaggtcttgtgattgctgctgctgctctgggcaatttcagctttgtaggcagagtgacccatcttggtggggtacacactggtttgaggctcaacagtaaagaagaggactttcatctcctcttcttcactgtcttttttctgctcccatttaattaattagttaattaattaattttttgagacagagtcttgatcctcctgcctcagcctcccaagtagctgggaatacaggagggcaccaccatgcctggctaatttttgtatttttagtagagatggggtttcaccctgttggccaggctggtcttgaactcctgacctcaagtgatctgcttgccacagcttcccaaagcactgggtttataggcatgagccaccgtgtccacctgctgctgctgttttaaaccagacccacagtgggtctcctgtgcccttatttgttggtccagacccctgactaccttgctgcatctgctttgcactcagcttttcactctcacgtgcaaacccctcagcatgctattttctaccactcctgctcggctctgctctaaatgctgttggtgctgctgttgcttgtgtctgggatattggtggatgttttgctggtgctttagactgacttcctttcttctgctagtgggaatattggcttcctgccaccgagttctagttttctaaagaggtttcaggcagagcactataataactgtttttttcttggaaacaacagccttttagcccttagagtgtatatgtaccaacaaattggctgggcttcagtgatttcaggtagtggccattctactcccctggaaaccaccatttcccctcccacttatagaactcgtggctgaatgtggcagagccagactcctttgaggcagcttttctccatgggggtctcatagatcctcaaatcaggcttagctatattgcctgaacctcaatccttgccatcgttagagtcctctccttgtcactacctagattccttaacccccatcaaaaccagtgggtgcaaacagacctatgaaagtgtccatgattagagagagagttttcagtcctaccttcaagactcatttgaataggacttgcagcccaggccagacatgctgttacaaagtgctacaatagattttaatagctaaagtactatggtgccacagatgaaggaaaacttcattttatctaaggtgatgaaggtaagagaagactaaagggaagatcttgggtttgcaggagtttgtaggtagacatggtaaagaaagctttctacatagaagaaaggttgggcctccaagaactaaggcgtgtatgtagcaaatggccatgtttgggaagtgaaaatgaagcagtgttgttgtctggggtagatacccaaggttcgtcatcttgtgccaagaagattaaggacatggacacacacaaggagtgagtttaggagcggaggtttaatagacaaaagaaagaaaggagagcagctctctctctttcgagacagaggggctcctaaatgggaattccagccatgacagagtgcaccgggttttatagacaggctttaggaggtggtgtctgatttacatagggctcagagattggttggactgggtgtgatgtttacatagcacccagaaaaggctggtcaccccaccgtaatcttattatgcaaatggactttccacttggctggtgccatgttgcctgctcctcactgtacatgcagctggcaaagagaagggaagatggagccaccattttgaccatgcctagtcccaggtggccttttcctattggcacagctgccagcattcacctgtacacgcttccagcttgcttgtctgtgtctgcagctcgattttacaggctgctgtttgttagaaaatgatttgggagtgcttttcattaaaaggaaaaccttaccaaggactcccgtaccctcatatctgcctaaataatttcttcttaactcctatatcaaaattaagcttggttggatttcacaccttgaatcaacaaacctggtgctgggaggcaagtttccttcttaaaactgactactgttcatcaaattgtcatttcagaaacctacaatgttacttcaagagtgactaaaaatttgcatgcagcccggcgtggtggctcacgcctgtaatcccagcactttgtggggctgaggttgggggtgggggggatcacctgaggtcaggagtttgagaccagcctggccaacatggtgaaaccccgtttctactaaaaatataaaaattggttggccgtggtggcatgcgcctgtaataccagctactggggaggctgaggcagaagaatcgcttgaacccaggaggcggagattgcagtgagctgagatggtaccactgcactccagcctgggtgatagaacatacctctgtctcaaaaaaaaaaaaaaaaaaaaaggaaagaaaatttgcatgcgtgtgtgtgttgtatgtgtgtgtttgggagaagggagagcttcatcatgatcaacaatatttttgtgtgtttaagagttgatgttttatgtgagatttcatttgggggaaaaaaaagcttcctctgctaaatgtttaaaaatcattaacctagggcttcattcagcattgtaaccgcacctgtttctaggacactaccatttctatgaagagatagataggttgccaactctctctccaggcccagctccctggcaatcatgactgcaccacctagaggcaaagtgagcccccatctaaggtcttgtgactactgctgctgctctgggcagtttcagctttgtaggcagagtgacccgtcttggtggggtacaaactggcttgaggctcaacacctttgaaaaacagataaaccttttaacatgccatgttgaattttttctttccaatgttgcatttttccaaaagaacacatactcattttaaaaagttataaaatagagataaacaaaaaagaaaagg

SEQ ID NO: 1029 - DNA, 279 bp, Homo sapiens
gagacagagtctcgctctgtcgcccaggctggagtgcagtggcacagtcttggctcactgcaagctctgcctcccgggttcacgccgttctcctgcctcagcctcctgagtagctgggactacaggtgctcgccaccacgcccggctaatattttgtatttttagtagagacagggtttcaccatgttagccaggatggtctcgatctcctgacctcgtgatccacctgccttggcctcccaaaatgctgggattacaggcgtgagccaccgtgcccgg

SEQ ID NO: 1030 - DNA, 1880 bp, Homo sapiens
aaaaaaaggcggtgggggaaattatctccacaaaacaaaaagtccggcaataagcaataagctgtccagggctgatacagggcatgatgaggtcatcacagatccaggttctttctgttttttgctctgcattcgtagcctgtggctttgtcattccctcatctggaaatggcggctgcagccccaggcacaatggcccgttgaggaagaagggggacgatgtgcagtgtcaggttattttatcaggaaagttcaaagcttctcagaaatcttctgttggaattctacctgggtgtcataggccagaacacaacccaaataaccaggaaaaatgtgaaagtgagaaaatagatcgtccacccctaacaatggaggcagcaagtgagaggggattgggaatgtgtgttgatttcctcaacagtgtttgacataaccactttctagctttataatcttaggcaagtaactcaacttcccagttcctcttctgtaaaatggggataacacctgaaaaggttgttacaagattcactgaaatagtttctatgctcagtcagtaatcagcattcaatcaatatgagctctaacatgatgcttgacagttatgcaacgaacagttcatgaagagctttgtaagccatattgataattttgtctttatccttagcacagtgagaaggtattaaaggattttatgcagggaagtgacatgatcatatttgtgttttcaaaagagccctcaggctgggtgtggtaacttgcgcctgtaatcccagcactctgggaggccatggcaggcggtgggcggatcgcttgagcccaggagttccggaccagcatgggcaacttggggaaaccccacctctaaaaaaaaaatgccaaaaaaattttagctgggtgtggtggcactcgcctgtagtcccagctgctcgggaggctgaggtgagagaatcacctgagcctgggagaggctgtagtcagctgtgattgcgccatgcactccagcctgggtgacacagtgagaccctgtctcaaaaaataaataaaaaataaaaaaaggagccctcaatttatcctctgcctctgacaaatatattccattttgttacattgcaaaaatttcagcacattgctttgcttacccatctttgctctggaacgacttttaattcttcttttggcaatcttggttgttttgagatgtgtgaaattagaatcatatgcaggtgtttgagttcttttgattttgctttttaaaagagttttttttttgttttgttttgttttgtttttagaatggggcaatgtaaagccagaatatcaacgtccttttgtcaagattttcaaacctatttggctgatagtgcacttacaagaataggtaaaaaagatcccaaagattttacttcacttacttgaactactagccctactattaagagccacatcaagctttacatgttcataaaaaaaaaaaaaaagagctgcaacattcctttcgcactcccactcgcccatgaggttcttccacttccttcctatggctttttttagaagcgagtgtgtttttctcacgtccggcaacaaaggatgttttgtgctactactgaggtttgtgtgtgtgacttactttagaactctttctagaaaatgcgattactatttgcataggtctggtagaactttgtattgagtgaaagtctccgatgactgtttttgtttttgtgtagatttgccactgcttaacatcaaatcactttcccctgtgtgttttaaaatacctctaataggacctgtcaaaattctcccagaagtctcacaaattcttacctttaaagaaagtgtaagtgataccttcagtgtattgtatttattcttat

SEQ ID NO: 1031 - DNA, 1470 bp, Homo sapiens
aaaaaaaggcggtggggggaaattatctccacaaaacaaaaagtccgacaataagcaataagctgtccagggctgatacagggcatgatgaggtcatcacagatccaggttctttctgtcttctgctctgcattcgtagcctgtggctttgtcattccctcatctggaaatggcggctgcagccccaggcacaatggcccgttgaggaagaagggggacgatgtgcagtgtcaggttattttatcaggaaagttcaaagcttctcagaaatcttctgttggaattctacctgggtgtcataggccagaacacaacccaaataaccaggaaaaatgtgaaagtgagaaaatagatcgtccacccctaacaatggaggcagcaagtgagaggggattgggaatgtgtgttgatttcctcaacagtgtttgacataaccactttctagctttataatcttaggcaagtaactcaacttcccagttcctcttctgtaaaatggggataacacctgaaaaggttgttacaagattcactgaaatagtttctatgctcagtcagtaatcagcattcaatcaatatgagctctaacatgatgcttgacagttatgcaacgaacagttcatgaagagctttgtaagccatattgataattttgtctttatccttagcacagtgagaaggtattaaaggattttatgcagggaagtgacatgatcatatttgtgttttcaaaagagccctcaggctgggtgtggtaacttgcgcctgtaatcccagcactctgggaggccatggcaggcggtgggcggatcgcttgagcccaggagttccggaccagcatgggcaacttggggaaaccccacctctaaaaaaaaaatgccaaaaaaattttagctgggtgtggtggcactcgcctgtagtcccagctgctcgggaggctgaggtgagagaatcacctgagcctgggagaggctgtagtcagctgtgattgcgccatgcactccagcctgggtgacacagtgagaccctgtctcaaaaaataaattaaaaataaaaaaaggagccctccatttatcctctgcctctgacaaatatattccattttgttacattgcaaaaatttcagcacattgctttgcttacccatctttgctctggaacgacttttaattcttcttttggcaatcttggttgttttgagatgtgtgaaattagaatcatatgcaggtgtttgagttcttttgattttgctttttaaaagagttttttttttgtttggtttggtttgttttaagaatggggcaatgtaaagccagaatatcaacgtcctttggtcaagattttcaaacctattgggctgatagtacacttacaagaataggtaaaaaagatcccaaagattttacttcacttacttgaactactagccctactattaagagccacagcaagcttacatgttcaaaaaaa

SEQ ID NO: 1032 - DNA, 3332 bp, Homo sapiens
aaaaaaaggcggtggggggaaattatctccacaaaacaaaaagtccgacaataagcaataagctgtccagggctgatacagggcatgatgaggtcatcacagatccaggttctttctgtcttctgctctgcattcgtagcctgtggctttgtcattccctcatctggaaatggcggctgcagccccaggcacaatggcccgttgaggaagaagggggacgatgtgcagtgtcaggttattttatcaggaaagttcaaagcttctcagaaatcttctgttggaattctacctgggtgtcataggccagaacacaacccaaataaccaggaaaaatgtgaaagtgagaaaatagatcgtccacccctaacaatggaggcagcaagtgagaggggattgggaatgtgtgttgatttcctcaacagtgtttgacataaccactttctagctttataatcttaggcaagtaactcaacttcccagttcctcttctgtaaaatggggataacacctgaaaaggttgttacaagattcactgaaatagtttctatgctcagtcagtaatcagcattcaatcaatatgagctctaacatgatgcttgacagttatgcaacgaacagttcatgaagagctttgtaagccatattgataattttgtctttatccttagcacagtgagaaggtattaaaggattttatgcagggaagtgacatgatcatatttgtgttttcaaaagagccctcaggctgggtgtggtaacttgcgcctgtaatcccagcactctgggaggccatggcaggcggtgggcggatcgcttgagcccaggagttccggaccagcatgggcaacttggggaaaccccacctctaaaaaaaaaatgccaaaaaaattttagctgggtgtggtggcactcgcctgtagtcccagctgctcgggaggctgaggtgagagaatcacctgagcctgggagaggctgtagtcagctgtgattgcgccatgcactccagcctgggtgacacagtgagaccctgtctcaaaaaataaataaaaaataaaaaaaggagccctcaatttatcctctgcctctgacaaatatattccattttgttacattgcaaaaatttcagcacattgctttgcttacccatctttgctctggaacgacttttaattcttcttttggcaatcttggttgttttgagatgtgtgaaattagaatcatatgcaggtgtttgagttcttttgattttgctttttaaaagagttttttttttgttttgttttgttttgtttttagaatggggcaatgtaagccagatatcaacgtcctttggtcagattttcaaacctattgggctgatagtacacttacaagaataggtaaaaaagatcccaaagattttacttcacttacttgaactactagccctactattaagagccacagcaagcttacatgttcaaaaaaaaaaaaaaaagagctgcaacattcctttcgcactcccactcgcccctgaggttcttccacttccttcctatggctttttttagaagcgagtgtgtttttctcacgtccggcaacaaaggatgttttgtgctactactgaggtttgtgtgtgtgacttactttagaactctttctagaaaatgcgattactatttgcataggtctggtagaactttgtattgagtgaaagtctccgatgactgtttttgtttttgtgtagatttgccactgcttaacatcaaatcactttcccctgtgtgttttaaaatacctctaataggacctgtcaaaattctcccagaagtctcacaaattcttacctttaaagaaagtgtaagtgataccttcagtgtattgtatttattcttatatacctttgcaaagacttctcatcacttccttaaatatgtctgatagtgccataatgagaaggggacatggtaattaaccatcaactttggttttcatggagaaaatctatctggagcagtcacagtatcctatgctggagctatcagatgccttgacattagatgtttccatctaattgtaattctctgagcaaggagacaaggtgggataaacagaattctcagatggctgagaattataccctaaatcctgggagagaatttacctttccattgtcagataatatgaatcatttaaaacatgtgctggaacagctttgccttttcttgaggaaaatggggtttctctctcaaagagaaagataaatgcgcctcagaagattttagtggtcgatctctgtcagtgtactaccagcaaaaatcccagcaatcaatattacaaagaggcagcactcacttgagtacagaagtaacaacattagctgcttcgtaaacaagatggcatgggagatattctgttttgagtaaatgacaagtcctacagtctagataggaagatttctcctccatatggattttgtgatttcgtcttgtgttgagtaaggaaggggagcttggattccaagatcaatttaatgtctatattccttggcattgtcatgttagagcagcacatctcagatggctttcaatagttattttagcattgattttcctctactagagtaaatcaaaagatgatttagaaaatcaaagtcagttttccttggagttttctcagaataaagggaagctgtggtgttgaagggtttttttggctcctatttacatatgatgcaaaatcaatctgtgtgaatctctttcctctgttgagctctactataggctctactatatgcagagccttgggtatttctgtgcgagggggattatgcaaaagaattttaaggcatgccacttgactttgtgaaaccaagtatttgtttaaagagacacgatattatagtgggaggctgttttgtgagaacccacactttcatgtcagcaccctgagatgggatcccattacgccctttaaccaggcaagggactttatgcagttcttcgtcaggaaaatggagacaattaaactgcttttctcataggttgttgtgtaaaaggcagcaagatgtggctgtgtaagaacatgactgaagccagactgcttatgcttaaaacctaggtgagctgtttacacctgatatgaccttggacaagtctcatctaacttctcttgcctcaggtgcctcatctgaagatagcagtgatgttagtgtctgcctcctgcctcataagcctgtcatgttgagaccatcctggccaacatggtgaaaccccgtctctactaaacatacaaaaattagccaggcatggtgacacgcgcctgtagtcccagctacttgggaggctgaggca

SEQ ID NO: 1033 - DNA, 3482 bp, Homo sapiens
gcgccaccaccgccgagaccgcgtccgccccgcgagcacagagcctcgcctttgccgatccgccgcccgtccacacccgccgccaggtaagcccggccagccgaccggggcaggcggctcacggcccggccgcaggcggccgcggccccttcgcccgtgcagagccgccgtctgggccgcagcggggggcgcatggggggggaaccggaccgccgtggggggcgcgggagaagcccctgggcctccggagatgggggacaccccacgccagttcggaggcgcgaggccgcgctcgggaggcgcgctccgggggtgccgctctcggggcgggggcaaccggcggggtctttgtctgagccgggctcttgccaatggggatcgcagggtgggcgcggcggagcccccgccaggcccggtgggggctggggcgccattgcgcgtgcgcgctggtcctttgggcgctaactgcgtgcgcgctgggaattggcgctaattgcgcgtgcgcgctgggactcaaggcgctaactgcgcgtgcgttctggggcccggggtgccgcggcctgggctggggcgaaggcgggctcggccggaaggggtggggtcgccgcggctcccgggcgcttgcgcgcacttcctgcccgagccgctggccgcccgagggtgtggccgctgcgtgcgcgcgcgccgacccggcgctgtttgaaccgggcggaggcggggctggcgcccggttgggagggggttggggcctggcttcctgccgcgcgccgcggggacgcctccgaccagtgtttgccttttatggtaataacgcggccggcccggcttcctttgtccccaatctgggcgcgcgccggcgccccctggcggcctaaggactcggcgcgccggaagtggccagggcgggggcgacctcggctcacagcgcgcccggctattctcgcagctcaccatggatgatgatatcgccgcgctcgtcgtcgacaacggctccggcatgtgcaaggccggcttcgcgggcgacgatgccccccgggccgtcttcccctccatcgtggggcgccccaggcaccaggtaggggagctggctgggtggggcagccccgggagcgggcgggaggcaagggcgctttctctgcacaggagcctcccggtttccggggtgggggctgcgcccgtgctcagggcttcttgtcctttccttcccagggcgtgatggtgggcatgggtcagaaggattcctatgtgggcgacgaggcccagagcaagagaggcatcctcaccctgaagtaccccatcgagcacggcatcgtcaccaactgggacgacatggagaaaatctggcaccacaccttctacaatgagctgcgtgtggctcccgaggagcaccccgtgctgctgaccgaggcccccctgaaccccaaggccaaccgcgagaagatgacccaggtgagtggcccgctacctcttctggtggccgcctccctccttcctggcctcccggagctgcgccctttctcactggttctctcttctgccgttttccgtaggactctcttctctgacctgagtctcctttggaactctgcaggttctatttgctttttcccagatgagctctttttctggtgtttgtctctctgactaggtgtctaagacagtgttgtgggtgtaggtactaacactggctcgtgtgacaaggccatgaggctggtgtaaagcggccttggagtgtgtattaagtaggtgcacagtaggtctgaacagactccccatcccaagaccccagcacacttagccgtgttctttgcactttctgcatgtcccccgtctggcctggctgtccccagtggcttccccagtgtgacatggtgtatctctgccttacagatcatgtttgagaccttcaacaccccagccatgtacgttgctatccaggctgtgctatccctgtacgcctctggccgtaccactggcatcgtgatggactccggtgacggggtcacccacactgtgcccatctacgaggggtatgccctcccccatgccatcctgcgtctggacctggctggccgggacctgactgactacctcatgaagatcctcaccgagcgcggctacagcttcaccaccacggccgagcgggaaatcgtgcgtgacattaaggagaagctgtgctacgtcgccctggacttcgagcaagagatggccacggctgcttccagctcctccctggagaagagctacgagctgcctgacggccaggtcatcaccattggcaatgagcggttccgctgccctgaggcactcttccagccttccttcctgggtgagtggagactgtctcccggctctgcctgacatgagggttacccctcggggctgtgctgtggaagctaagtcctgccctcatttccctctcaggcatggagtcctgtggcatccacgaaactaccttcaactccatcatgaagtgtgacgtggacatccgcaaagacctgtacgccaacacagtgctgtctggcggcaccaccatgtaccctggcattgccgacaggatgcagaaggagatcactgccctggcacccagcacaatgaagatcaaggtgggtgtctttcctgcctgagctgacctgggcaggtcggctgtggggtcctgtggtgtgtggggagctgtcacatccagggtcctcactgcctgtccccttccctcctcagatcattgctcctcctgagcgcaagtactccgtgtggatcggcggctccatcctggcctcgctgtccaccttccagcagatgtggatcagcaagcaggagtatgacgagtccggcccctccatcgtccaccgcaaatgcttctaggcggactatgacttagttgcgttacaccctttcttgacaaaacctaacttgcgcagaaaacaagatgagattggcatggctttatttgttttttttgttttgttttggttttttttttttttttggcttgactcaggatttaaaaactggaacggtgaaggtgacagcagtcggttggagcgagcatcccccaaagttcacaatgtggccgaggactttgattgcacattgttgtttttttaatagtcattccaaatatgagatgcgttgttacaggaagtcccttgccatcctaaaagccaccccacttctctctaaggagaatggcccagtcctctcccaagtccacacaggggaggtgatagcattgctttcgtgtaaattatgtaatgcaaaatttttttaatcttcgccttaatacttttttattttgttttattttgaatgatgagccttcgtgcccccccttcccccttttttgtcccccaacttgagatgtatgaaggcttttggtctccctgggagtgggtggaggcagccagggcttacctgtacactgacttgagaccagttgaataaaagtgcacaccttaaaaatgaggccaagtgtgactttgtgg

SEQ ID NO: 1034 - DNA, 1820 bp, Homo sapiens
gccgagactgcatccgccttgcgagcacagagcctcgccttcgctgctccactgccagtccacacctgccaccagctcaccatggatgatgatatcaccgcgctcgtcattgacaacggctccggcatgtgcaaggccagcttcacgggcgacaatgccgcccgggcagtcttcccctccatcgttgggcaccccaggcaccagggcgtgatggtgggcatgggtcagaaggattcctatgtgggcgacgaggcccagagcaagagaggcatcctcaccctgaagtaccccattgagcacggcattgtcaccaactgggacgacatggagaagatctggcaccacaccttctacaatgagctgcgcgtggctcccgaggagcaacccatgctgctgtttgaggcccccctgaaccccagggccaactgcaagaagatgacccagatcatatttgagaccttcaacaccccagccatgtacttggccatccagactatgctgtccctgtacgcctctggccgtaccactggcatcgtgttggactccagtgatggggtcacccacactgtgcccatctacgaggggtatgccctccccaacgccatcctgcttctggacctggctggccgggacctgactacctcatgaagatcctcaccgagcgccgctacagcttcatcaccacgcggagcgggaaatcatgcgtaacatcaaggagaagctgtgctacctcgtcctggacttcgagcaggagatggctaccgcggcttccagctcctccctggagaagagctaccagctgcccaacagccaggtcatcaccattggcaacgagtggttctgctgccccgaggcgctcttccagccttccttcctgggcatggagtcctgtggcatccacgaaactaccttcaactccatcatgaagtgtgacttggacatccgcaaagacctgtacaccagcacagtgctgtctggtggcaccactatgtaccctggcattgctgacaggatgcagaaggagattaccgccctggcgcccagcaggacgaagatcaagatcattgctcctcctgagcgcaagtactctgtgtggattggaggctccatcctggcctcgctgtccaccttccagcagatgtggatcagcaagcaggagtatgaggagtctggccctccatcgttcaccgcaaatgcttctaggcggactgtgacttagttgtgttacaccttttcttgacaaaacctaacttgtgcaggaaacaagataagattggcatggctttatttgtttttttgttttgttttgtttttttggttttttttggcttgactcaggatttaaaaactggaacagtgaaggtgacagcagtcggttggagcgagcatcccccaaagttctacagtgtggccgaggactttgattgtacattgttcttttttttaatagtcattccaaatatcatgggatgcattgttacaggaagtcccttgccatcctaaaagccaccccacttctgtctaaggagaatggcccagtcgtctaccgagtccacacaggggaggtgatagcattgctttcgtgtaaattatggaatgcaaaatttttttaatcttcgccttaatactttcttattttttttattttgaatgatgagccttcgtgcccccccccccttttttgtcccccagcttgagatgtatgaaggcttttggtgtccctgggagtgggtgaaggcagccagggcttacctgtgcactgacttgagaccagttgaataaaagtgcacacacacacacataaaaagatctacattcca

SEQ ID NO: 1035 - DNA, 1820 bp, Homo sapiens; identical to SEQ ID NO: 1034

SEQ ID NO: 1036 - DNA, 1823 bp, Homo sapiens
accgccgagactgcatccgccttgcgagcacagagcctcgccttcgctgctccactgccagtccacacctgccaccagctcaccatggatgatgatatcaccgcgctcgtcatcgacaacggctccggcatgtacaaggccggcttcacgggcgacaatgccacccgggcagtcttcccctccatcgttgggcaccccaggcaccagggcgtgatggtgggcatgggtcagaaggattcctatgtgggcgacgaggcccagagcaagagaggcatcctcaccctgaagtaccccattgagcacggcattgtcaccaactgggacgacatggagaagatctggcaccacaccttctacaatgagctgcgcgtggctcccgaggagcaacccatgctgctgtttgaggcccccctgaaccccagggccaactgcaagaagatgacccagatcatatttgagaccttcaacaccccagccatgtacttggccatccagactatgctgtccctgtacgcctctggccgtaccactggcatcgtgttggactccagtgatggggtcacccacactgtgcccatctacgaggggtatgacctccccaacgccatcctgcgtctggacctggctggccgggacctgactacctcatgaagatcctcaccgagcgccgctacagcttcatcaccacgcggagcgggaaatcatgcgtaacatcaaggagaagctgtgctacctcgtcctggacttcgagcaggagatggctaccgcggcttccagctcctccctggagaagagctaccagctgcccaacagccaggtcatcaccattggcaacgagtggttctgctgccccgaggagctcttccagccttccttcctgggcatggagtcctgtggcatccacgaaactaccttcaactccatcatgaagtgtgacttggacatccgcaaagacctgtacaccagcacagtgctgtctggcggcaccactatgtaccctggcattgctgacaggatgcagaaggagattaccgccctggcgcccagcaggatgaagatcaagatcattgctcctcctgagcgcaagtactctgtgtggattggaggctccatcctggcctcgctgtccaccttccagcagatgtggatcagcaagcaggagtatgaggagtctggccctccatcgttcaccgcaaatgcttctaggtggactgtgacttagttgtgttacaccttttcttgacaaaacctaacttgtgcaggaaacaagataagattggcatggcttaatttgtttttttgttttgttttgtttttttggttttttttggcttgactcaggatttaaaaactggaacagtgaaggtgacagcagtcggttggagcgagcatcccccaaagttctacagtgtggccgaggactttgattgtacattgttcttttttttaatagtcattccaaatatcatgggatgcattgttacaggaagtcccttgccatcctaaaagccaccccacttctgtctaaggagaatggcccagtcgtctaccgagtccacacaggggaggtgatagcattgctttcgtgtaaattatggaatgcaaaatttttttaatcttcgccttaatactttcttattttttttattttgaatgatgagccttcgtgcccccccccccttttttgtcccccagcttgagatgtatgaaggcttttggtgtccctgggagtgggtgaaggcagccagggcttacctgtgcactgacttgagaccagttgaataaaagtgcacacacacacacataaaaagatctacattcca

SEQ ID NO: 1037 - DNA, 2558 bp, Homo sapiens
  misc_feature (1424)..(1424): n equals a,t,g, or c
agcgcgcccgactattctcgcagatcaccatggatgatgatatcgccgcgctcgtcgtcgacaacggctccggcatgtacaagagccggttcgcgggcgacgatcgtccccggaccgtattcccatccatcgtggggcgccccaggcaccagctagaggagctggctggttggtacatccccgggagcgggcgggaggcaagggcgctttctctgcacaggagccttccgggtttccgggggtgcggtgcgcccgtgctcagggcttcttgtcctttccttcccagggcgtgatggtgggcatgggtcagaaggattcctatgtgggcgacgaggcccagagcaagagaggcatcctcaccctgaagtaccccatcgagcacggcatcgtcaccaactgggacgacatggagaaaatctggcaccacaccttctacaatgagctgcgtgtggctcccgaggacaccccgtgctgctgaccgaggcccccctgaaccccaaggccaaccgcgagaagatgacccaggtgagtggcccgctacctcttctggtggccgcctccctccttcctggcctcccggagctgcgccctttctcactggttctctcttctgccgttttccgtaggactctcttctctgacctgagtctcctttggaactctgcaggttctatttgctttttcccagatgagctctttttctggtgtttgtctctctgactaggtgtctaagacagtgttgtgggtgtaggtactaacactggctcgtgtgacaaggccatgaggctggtgtaaagcggccttggagtgtgtattaagtaggcgcacagtaggtctgaacagactccccatcccaagaccccagcacacttagccgtgttctttgcactttctgcatgtcccccgtctggcctggctgtccccagtggcttccccagtgtgacatggtgcatctctgccttacagatcatgtttgagaccttcaacaccccagccatgtacgttgctatccaggctgtgctatccctgtacgcctctggccgtaccactggcatcgtgatggactccggtgacggggtcacccacactgtgcccatctacgaggggtatgccctcccccatgccatcctgcgtctggacctggctggccgggacctgactgactacctcatgaagatcctcaccgagcgcggctacagcttcaccaccacggccgagcgggaaatcgtgcgtgacattaaggagaagctgtgctacgtcgccctggacttcgagcaagagatggccacggctgcttccagctcctccctggagaagagctacgagctgcctgacggccaggtcatcaccattggcaatgagcggttccgctgccctgaggcactcttccagccttccttcctgggtgagtggagactgtctcntcgctctgcctgacatgagggttacccctcggggctgtgctgtggaagctaagtcctgccctcatttccctctcaggcatggagtcctgtggcatccacgaaactaccttcaactccatcatgaagtgtgacgtggacatccgcaaagacctgtacgccaacacagtgctgtctggcggcaccaccatgtaccctggcattgccgacaggatgcagaaggagatcactgccctggcacccagcacaatgaagatcaaggtgggtgtctttcctgcctgagctgacctgggcaggtcagctgtggggtcctgtggtgtgtggggagctgtcacatccagggtcctcactgcctgtccccttccctcctcagatcattgctcctcctgagcgcaagtactccgtgtggatcggcggctccatcctggcctcgctgtccaccttccagcagatgtggatcagcaagcaggagtatgacgagtccggcccctccatcgtccaccgcaaatgcttctaggcggactatgacttagttgcgttacaccctttcttgacaaaacctaacttgcgcagaaaacaagatgagattggcatggctttatttgttttttttgttttgttttggttttttttttttttttggcttgactcaggatttaaaaactggaacggtgaaggtgacagcagtcggttggagcgagcatcccccaaagttcacaatgtggccgaggactttgattgcacattgttgtttttttaatagtcattccaaatatgagatgcattgttacaggaagtcccttgccatcctaaaagccaccccacttctctctaaggagaatggcccagtcctctcccaagtccacacaggggaggtgatagcattgctttcgtgtaaattatgtaatgcaaaatttttttaatcttcgccttaatacttttttattttgttttattttgaatgatgagccttcgtgcccccccttcccccttttttgtcccccaacttgagatgtatgaaggcttttggtctccctgggagtgggtggaggcagccagggcttacctgtacactgacttgagaccagttgaataaaagtgcacaccttaaaaatgaggccaagtgtgactttgtgg

SEQ ID NO: 1038 - DNA, 216 bp, Homo sapiens
gggggccacggcgcgcgcccccagcccccgggcccagcaccccaaggcggccaacgccaaaactctccctcctcctcttcctcaatctcgctctcgctctttttttttttcgcaaaaggaggggagagggggtaaaaaaatgctgcactgtgcggcgaagccggtgagtgagcggcgcggggccaatcagcgtgcgccgttccgaaagttgccttt

SEQ ID NO: 1039 - DNA, 231 bp, Homo sapiens
ggtctctgttcctgcttattggggagttcctggcctggcccttctatgtctccccaggtaccccagtttttctgggttcacccagagtgcagatgcttgaggaggtgggaagggactatttgggggtgtctggctcaggtgccatgcctcactggggctggttggcacctgcatttcctgggagtggggctgtctcagggtagctgggcacggtgttcccttgagtggggg

SEQ ID NO: 1040 - DNA, 231 bp, Homo sapiens; identical to SEQ ID NO: 1039

SEQ ID NO: 1041 - DNA, 4481 bp, Homo sapiens
gcagatgcgaaccagaacaatgggacctcctctcaggacacagcggtgactgactccaagcgcacagcggacccgaagaatgcctggcaggatgcccacccagctgacccagggagccgcccccacttgatccgcctcttttcccgagatgccccggggagggaggacaacaccttcaaagacaggccctctgagtccgacgagctccagaccatccaagaagacagtgcagccacctccgagagcctggatgtgatggcgtcacagaagagaccctcccagaggcacggatccaagtacctggccacagcaagtaccatggaccatgccaggcatggcttcctcccaaggcacagagacacgggcatccttgactccatcgggcgcttctttggcggtgacaggggtgcgcccaagcggggctctggcaaggtgagctctgaggagtagaggagttttagtttaaatggaaaaagcaaaggagaaatcagtaggtgaactcagccattagaggaagaactggcacgtagcctcttgctgtctaaggtctcgttccgtgctggagaatgcatatgagcccaagagtgtgggcctgagtggctgcttaggacgttttcgtttaactcaccccctcttttcctcacaagggatggtggccggggtgtggctcaggaatgtaaggacatgctgaattctggatctctaagggtgcctggacatgggcgttgcagaaagagagccacattctcagggtctctggtggtgtgtgcttgcggacttgatgactgatgttgcctctgcagcccacacgctggggttcaacactgggttatgctcgttttttcctggagtcagtgctgctagcttcatgttgctctgcgacaatcataggattgaggtcgaggaagacttttgaacaaactcctcaatttaaatccgccttgagcaaacgttctctgtggtctgagaagtggaaggggggagggataaatgagtgtctatgaatcaaagctttattatcttgtgattccattaatttgcatacagagtcttagaagtttctttattcaaaagcaaatgtggataaaaatgtattacaaaaaaaaaaaactctgctatggggtccagagtctaggagtggtttctgcagttgattgtcagtggagaacctgtggctgctggttcatcaaagcgctggtccctgagtgccattcagattgcagatgcagtattttacgtgatgtttagagtgtttggtggttgtgtaattttggagagaaagaagtttttcccaaaaaagtccctagtttattgggtgttctcacacaacctgtaagatgaagctgtttttctgcctgtgtgcagggctgattctggaattccagaaggccttgtgggagcgtaaaaggcttttgaataaagtgtggaacagagcgcctcattctgataacatgcaatcataaaaaccatagggcaacttggagttaaggagtttctagaatttgctttagtctccaactgcaattctttattgatcatgaaattgttgaagagaaacacaaatgtcagttttacctttcctgtgggcgtgaaagcacatcgaagtttcaggcaactgttaacatctctaccatctgtctgagttgagatttcaggttgtgacacttgccgtgacttatttgtaaatgacattttgtgtgtcttagatactaatggaattcatattctggctagttctttcagtgcatttgtagacatgttcttttcctttgtagcagtcctccctcaccctgaaatgttggtgttctaaccgatttctaatgctaatttcaactggaagcactttttcaagcccagctatcaaaccacaccagacatgtatggattcgggttgcccaataaagcgttgctattatgtaagcatccctcacgcatacagcatcaccagttttgaaagcttgaactattctgcttacttcaaggtacagaaaaaaaaaatgtacttaaactgtgcagaaaagatgaaatcactggataatatgtattataaaataagcttcatgtgagtgacactggtttaagttgaaataaaatggtgaaagcattgatatcaatcattgtgactttatctcaaaacaatattgacacacatagatgtttttcttcctttatggtaagattacagcctttattgtcttaaatctcttatactcttcaatattttcaaagaaaacattctagtctcagaaatagtccatctctttgcaaaacagggctggccaattatcaaggacccataaaaatcaaaacactttcaaaaattttaaaaataaaaataattttcacatgattgctttaggaattttgaagtatccattcttttcactatggagtgttgaatatagaagattttttaatgaacaggcttgccctttgatgccaaaggcaaaaaataataataataacatttgcacgtgtgatcacagagcagctgtgaggcatcccgggggagcgcacgcagtggggatgtgattgctccactcaactattttatcacaaagtgttgtaaacatgggagatgaaagcttaactctctctacacccagctacagacccgcaatggccctaaaaatctggggtattcattgggtgggctgccatggaggaatttttggttttgtttttatttttatttgttgttctgtttacaaatcaggagagcccctgtttttatatgctaggaaggtccttgggataggccgaagaggtgtgcaaacgagcagtggaaggcccgggccctgtctctcaggaccacggcggcctgccccacacacagttctgcttctccctatctagaacgaggttttcctggcagattcctgccagactctgagtggagcccccccatgaccctataaaaggggctgtttgtcctcctcccaccctcctgtgctcttcctccctccccttgagggcacatggccgctggtaccacatgttggagcggccgcccccgagcccgggaatgccctaacaacacccatgcttgtgttgctgggagctgacattcaagaaaagtgcattaaaaattccttgagaaggcatattcttttgagagccgtaaatgaaaagtgcattcacggagaacatgctcctttgttgtgagaggaaagaaaggactgttgttgcctttaaggaacaggtttcccagttccccggaatgtcagggtcacatgaggaatgggtgagcacttagggccaagattgtcgtgtgcttggcccggcagcttctctctaagtgacctctccagcatcactctgtgccagtgctcatatctgaggccacttgagtgtcacgaggcagagcctggaaacattagctttggaaaccgttccttcctttttatgtggaggaagtaaggtttcacaagacacctaagctggacatggtgatgtgccacttggatagttcccaaagcagaaagcagccaggacatcccagtaccccacttctccgtgccgtgtacttttagggaggttttcgaaagctagcttcttaccgatgattttgtctatttttctgttttatgtgaaaaccttcatttataacctgctcttctcagtgttcttctattcagcattcagtatgacttctatgcctctaattgcgactgtatggagaagaactgtttgtcattcagtgccgtgggatataatcagtcctgtaaattcatcagaatgttctgttgcctgattttttttccattgcattttaatttcattaaacatattttagttctacagtaacctaattcctcattgttaccatgagatcctaattctgtagctgtgttctgtaatcccatggggcgtgtaccatttggagacacatgaaggatacagtagacagcacggaaggcagcagcaacacacaggggtgtcctccctccccagagcccagtgtgcacacagaaccaaattcaatctcattcatcgtgagcttgcatggtaactgatccagccactcagtacctccattggataagagatttggccacagattcttctagagaaaatccaaatgtggagggtgcatttgtttctgcacccaaacaaataccttttgagatttcttataggcattcctctcaaagtctcattactctgatcagttattgatcggaggctaccctggctcagtcaccagctgctcactgtgtccttctgtggtctcaggagctgcagttgttgctgttgtatgaatagacgatagttaattagactggatgtgtctgtactggcagtgattttgcaacttcctctgtataagcgatacatttgtaaatcatgggaatgtatttgatggtaattgcctgtggtggttgtatcatgatttaattttattatgagcttttggctttatatatttttctgcctttttatgcattcattaaacagtttaacagaccaaggacagtgta

SEQ ID NO: 1042 - DNA, 4481 bp, Homo sapiens
gcagatgcgaaccagaacaatgggacctcctctcaggacacagcggtgactgactccaagcgcacagcggacccgaagaatgcctggcaggatgcccacccagctgacccagggagccgcccccacttgatccgcctcttttcccgagatgccccggggagggaggacaacaccttcaaagacaggccctctgagtccgacgagctccagaccatccaagaagacagtgcagccacctccgagagcctggatgtgatggcgtcacagaagagaccctcccagaggcacggatccaagtacctggccacagcaagtaccatggaccatgccaggcatggcttcctcccaaggcacagagacacgggcatccttgactccatcgggcgcttctttggcggtgacaggggtgcgcccaagcggggctctggcaaggtgagctctgaggagtagaggagttttagtttaaatggaaaaagcaaaggagaaatcagtaggtgaactcagccattagaggaagaactggcacgtagcctcttgctgtctaaggtctcgttccgtgctggagaatgcatatgagcccaagagtgtgggcctgagtggctgcttaggacgttttcgtttaactcaccccctcttttcctcacaagggatggtggccggggtgtggctcaggaatgtaaggacatgctgaattctggatctctaagggtgcctggacatgggcgttgcagaaagagagccacattctcagggtctctggtggtgtgtgcttgcggacttgatgactgatgttgcctctgcagcccacacgctggggttcaacactgggttatgctcgttttttcctggagtcagtgctgctagcttcatgttgctctgcgacaatcataggattgaggtcgaggaagacttttgaacaaactcctcaatttaaatccgccttgagcaaacgttctctgtggtctgagaagtggaaggggggagggataaatgagtgtctatgaatcaaagctttattatcttgtgattccattaatttgcatacagagtcttagaagtttctttattcaaaagcaaatgtggataaaaatgtattacaaaaaaaaaaaactctgctatggggtccagagtctaggagtggtttctgcagttgattgtcagtggagaacctgtggctgctggttcatcaaagcgctggtccctgagtgccattcagattgcagatgcagtattttacgtgatgtttagagtgtttggtggttgtgtaattttggagagaaagaagtttttcccaaaaaagtccctagtttattgggtgttctcacacaacctgtaagatgaagctgtttttctgcctgtgtgcagggctgattctggaattccagaaggccttgtgggagcgtaaaaggcttttgaataaagtgtggaacagagcgcctcattctgataacatgcaatcataaaaaccatagggcaacttggagttaaggagtttctagaatttgctttagtctccaactgcaattctttattgatcatgaaattgttgaagagaaacacaaatgtcagttttacctttcctgtgggcgtgaaagcacatcgaagtttcaggcaactgttaacatctctaccatctgtctgagttgagatttcaggttgtgacacttgccgtgacttatttgtaaatgacattttgtgtgtcttagatactaatggaattcatattctggctagttctttcagtgcatttgtagacatgttcttttcctttgtagcagtcctccctcaccctgaaatgttggtgttctaaccgatttctaatgctaatttcaactggaagcactttttcaagcccagctatcaaaccacaccagacatgtatggattcgggttgcccaataaagcgttgctattatgtaagcatccctcacgcatacagcatcaccagttttgaaagcttgaactattctgcttacttcaaggtacagaaaaaaaaaatgtacttaaactgtgcagaaaagatgaaatcactggataatatgtattataaaataagcttcatgtgagtgacactggtttaagttgaaataaaatggtgaaagcattgatatcaatcattgtgactttatctcaaaacaatattgacacacatagatgtttttcttcctttatggtaagattacagcctttattgtcttaaatctcttatactcttcaatattttcaaagaaaacattctagtctcagaaatagtccatctctttgcaaaacagggctggccaattatcaaggacccataaaaatcaaaacactttcaaaaattttaaaaataaaaataattttcacatgattgctttaggaattttgaagtatccattcttttcactatggagtgttgaatatagaagattttttaatgaacaggcttgccctttgatgccaaaggcaaaaaataataataataacatttgcacgtgtgatcacagagcagctgtgaggcatcccgggggagcgcacgcagtggggatgtgattgctccactcaactattttatcacaaagtgttgtaaacatgggagatgaaagcttaactctctctacacccagctacagacccgcaatggccctaaaaatctggggtattcattgggtgggctgccatggaggaatttttggttttgtttttatttttatttgttgttctgtttacaaatcaggagagcccctgtttttatatgctaggaaggtccttgggataggccgaagaggtgtgcaaacgagcagtggaaggcccgggccctgtctctcaggaccacggcggcctgccccacacacagttctgcttctccctatctagaacgaggttttcctggcagattcctgccagactctgagtggagcccccccatgaccctataaaaggggctgtttgtcctcctcccaccctcctgtgctcttcctccctccccttgagggcacatggccgctggtaccacatgttggagcggccgcccccgagcccgggaatgccctaacaacacccatgcttgtgttgctgggagctgacattcaagaaaagtgcattaaaaattccttgagaaggcatattcttttgagagccgtaaatgaaaagtgcattcacggagaacatgctcctttgttgtgagaggaaagaaaggactgttgttgcctttaaggaacaggtttcccagttccccggaatgtcagggtcacatgaggaatgggtgagcacttagggccaagattgtcgtgtgcttggcccggcagcttctctctaagtgacctctccagcatcactctgtgccagtgctcatatctgaggccacttgagtgtcacgaggcagagcctggaaacattagctttggaaaccgttccttcctttttatgtggaggaagtaaggtttcacaagacacctaagctggacatggtgatgtgccacttggatagttcccaaagcagaaagcagccaggacatcccagtaccccacttctccgtgccgtgtacttttagggaggttttcgaaagctagcttcttaccgatgattttgtctatttttctgttttatgtgaaaaccttcatttataacctgctcttctcagtgttcttctattcagcattcagtatgacttctatgcctctaattgcgactgtatggagaagaactgtttgtcattcagtgccgtgggatataatcagtcctgtaaattcatcagaatgttctgttgcctgattttttttccattgcattttaatttcattaaacatattttagttctacagtaacctaattcctcattgttaccatgagatcctaattctgtagctgtgttctgtaatcccatggggcatgtaccatttggagacacatgaaggatacagtagacagcacggaaggcagcagcaacacacaggggtgtcctccctccccagagcccagtgtgcacacagaaccaaattcaatctcattcatcgtgagcttgcatggtaactgatccagccactcagtacctccattggataagagatttggccacagattcttctagagaaaatccaaatgtggagggtgcatttgtttctgcacccaaacaaataccttttgagatttcttataggcattcctctcgaagtctcattactctgatcagttattgatcggaggctaccctggctcagtcaccagctgctcactgtgtccttctgtggtctcaggagctgcagttgttgctgttgtatgaatagacgatagttaattagactggatgtgtctgtactggcagtgattttgcaacttcctctgtataagcgatacatttgtaaatcatgggaatgtatttgatggtaattgcctgtggtggttgtatcatgatttaattttattatgagcttttggctttatatatttttctgcctttttatgcattcattaaacagtttaacagaccaaggacagtgta

SEQ ID NO: 1043 - DNA, 4481 bp, Homo sapiens; identical to SEQ ID NO: 1042

SEQ ID NO: 1044 - DNA, 363 bp, Homo sapiens
gtcccatcaaggtgcctgcacatctgggctctccgggagcagccatggcagcacccgggaagaaacgctgatgtggctgctctgcatgctcagatgacttcatcgggaagcctgggtgcattttacgctgggtgccaaatctcgagtaactgaggaattcccagagccttctgaaacacagagctgcaataaggctgctccatccaggttagctccatcctaggccaagggctttatgaggactgcacatattctgtgggttttataggagacagctaggtcaagacccctcagagaaagctgctttgtccggtgctcagctttgcacaggcccgtattcatatctcattgttgtttgcagga

SEQ ID NO: 1045 - DNA, 363 bp, Homo sapiens; identical to SEQ ID NO: 1044

SEQ ID NO: 1046 - DNA, 363 bp, Homo sapiens; identical to SEQ ID NO: 1044

SEQ ID NO: 1047 - DNA, 9507 bp, Homo sapiens
ggcggtcccaggcaggcccagaagctgggcagcctctgccgggttccgggaaaaggagctcctgctgccactgctcttccggagcctgcagcatggggcccctgccgcgcaccgtggagctcttctatgacgtgctgtccccctactcctggctgggcttcgaggtgacgctgggaggggtcgcctcggcagtgtctggggagtgagggcggagggaagagtgagcgcagggctccgggacagaggtctcgtgtaactcctggcgccgcccaaggggttaaggcaagcagggagagctccggggctgaaggtcactttgtgcttttaaacggaatagagtcgctggctccaacccgagcctttatatcccgactgcagtttcccacggtggtggaaagaggggcggctccaaacattcagggagaaatgcagaacacggccacctcttagcccaacgatggcagttttggggaaaactggccacaggagcgaagatcctggaatagatttctagtagtgaggagagttttgccaatttcaaaccaaacaatgtagggtgtccgcataacccctgctctgcacttagcgcctcccttccctttccctcggctctttcacttttccatcttgcacactggcaatcgttcttgacctctgcccgcagatcctgtgccggtatcagaatatctggaacatcaacctgcagttgcggcccagcctcataacagggatcatgaaagacagtggtaggaagggagggtcggggcaggggtgatctcagtggcccaagagagccgaccccagcgggtccttatattggcactggcagccagaaagctgccctctgccccgtctctactaaaaatacaaaattagccgggcgtggtagtgcatgcctgtataccacagctactcgggaggctgaggcgggagaatcgcttgaacccaggaggcggaggttgcggtgagctgagatcgcaccattgcactccagcctgggcaacaagagcgaaacaacaagagaaaaaaaaggaagctgccctctgcccaaaacccacgtcgaggtccccaaacctgggacccttaggtcttttctcacttagcgtgcccaaccttctcctggcaggaaacaagcctccaggtctgcttccccgcaaaggactatacatggcaaatgacttaaagctcctgagacaccatctccagattcccatccacttccccaaggatttcttgtctgtgatgcttgaaaaaggtgaagagagtgggatgtagacagggtatccagtgaaaaacacagaagtcggagattgagggattgataggatggaggggctgcgggagactaaagcaagtgaagcctgccttgggaaacctcaggatcagccttgagcgagctgaaggttgccgggcatgaaagggaagaagagcaggcaaataggtcatgggaaccttgggtgagaggctgagggcggaggagctctgggggatgtcagaagcaaggaagagctagtcctccaccaggaaagcagcaagaggagccctgcctctgggtgcctctgccccacaggaagtttgtctgccatgcgtttcctcaccgccgtgaacttggagcatccagagatgctggagaaagcgtcccgggagctgtggatgcgcgtctggtcaagggtgagtgtggggctctgggaatcctctgggaggaccttggatgactttctgaccttccccaggcacgttttcagggtcatgatcctgcccccgcccgggacttctactgtcctcccagtcacacccctctccccgcaccgccttcctgctgtcttctcttcttcccagaatgaagacatcaccgagccgcagagcatcctggcggtgagtgtcctggctccaccccaactgcactcatagagaatctgagaacagttggcgtttgggggtaaagaagacaataggtctcttattgcatggaaaaggttataattactggggaagaaaggatgtctgtgattcagggcacaaactactgaaaagttggaactaaggatcctcaaaaggatatctcaaggttgaaaggggaagtgcaaaagggacaatatatgggaagaatttatttgctgaaagatgtcagtgagagaaagatgctcagtgttggaacccctggatggggagggatatagtattcacaagtctccacaaactccaacacaaacctcaccaacacatccagagtggaaggcaggagacttgttccaagaggctttaaaaagacgaaaagagataactaatgccagggttatataggagcctgagtgagaacaaatggaaatagctcaaaacattgaccagtgagccatggatgggggtataaaagtaagtttgtcttcaggattaaattaggaaattcaaaacagtattattcctctggtttacaaaaaaaaatagttgagacctattcaaatttaatatataaagtggcaaatcacacaaaagttaaacgtataaggaatggcaaatatatcttctacagtctatactcctgcaaagtacatgtgtaatttttagcttgcttttttacttcatatttaatcattttccatgctttttttttttttttttttttttttgagacacggtctggctctgtcgcccaggctggagtgcagtggtgtgacctcgacccactgtaccctttgcctcctggactcaagcaatcttcccacctcagtctcctgagtagctgggactacaggcacacactaccatgtctggctaacttttttattttttgtagagaaggggtttcactgtgttgcccaggctggtctcaaactcctgtgctcaagagatctgtctgcctccacctcccaaagtgctgtgtttacaggaatgagccactgtgcccagcctccatggaattcttaactctgaaagtatagttctttgtttctatagaggttccactgagtggacttatttttgttttgcttaaccatttttctgtggttaaacattttgtgtaggacataattctctaatttaaccaagtcaaagatagtgtctcattaggacaggctacatgaattcctgggtcccacttctgatctaggaagtcaagttgcagtggttgtcaatcttggctgtgaattaaaatcacctggagcaccttggcgctaaccctttcccctggaattgtgatgtaattgttcttgttcttttttttccttccttcctttttttttttttttttttttttttgagacagtgtcttgctttgtcacccaggctggggtgcagtggcatgatcatggctcactgcagactcaacctcttgggctcaagtgatctcgcatctcagccttacgagtagctgggacttcaagcatgtgccaccatgcctaattttttaaaaattttttgtagagatgggggtttcactttgctgcccaggctggtctcgaactcctgggctgaagcaatctcctgcctcagtctcccaaagtgctagaattacaggcatgagccacagtgcttggatctagttctaagggatgacctcacgtggagattttttaaagctcctcaggagtttcagatgggcagccaaagttaagaaccatctatcccaaactataccaacaaaccacaaactgaagcctttatctttgtcttgaagccaggtaggtggctgcagccatgtgccttgttacaaagttctcaggaagttccactggaattacagcctagctcttgattcaaaaaaagcatgagatacttaggaactgtgagaggtaggaaggaaagagccctggacttgaattctagagacctggattctagtgttggctctgctaccaacatgctctgtaactctgagcaagtaatgtatcacctctggattcaggctcttcatttgtgaaataaagaggtctatctagctgctctctaagatgtccgctggtgttaatttctgtgattgactctgtgccatctaccttttctccttttccacccatctcaagatttgggataaaggaaatagttcctcttggcaaggacagatctccacttgtgggtgggtaagggcattgccagcaaaacttgggggcagaaaataaaaagaccagagttttcctctgagatccccatccaatatcatgcagacacagttgtattccctactatattcccttaggctgcagagaaggctggtatgtctgcagaacaagcccagggacttctggaaaagatcgcaacgccaaaggtgaagaaccagctcaaggagaccactgaggcagcctgcagatacggagtgagcagctctttatgtgtgttcccagcacccatcctgaagatggagacttgagaatctctaagtttgagtccttatgctcctgtacaaaagccccctttccaagtgttctcctcagtgctcttaaacaaccctcatcttcttccttcttttccttgggctcagggaaaggaagggaaggagatgcacagtgagagaaaagagagcatcttagaaacaggaaggcacctggggccacagagcctcttagacctctttgcttctgtgaactcagaaaagtactgactcaaaggtttcaacccctgcctaatacctgctcctttgccttcctccttgcattgtaactgctttctccaggcctttgggctgcccatcaccgtggcccatgtggatggccaaacccacatgttatttggctctgaccggatggagctgctggcgcacctgctgggtaagtaagttaaagaatcaaccctgagccaggtgcagtggctcacgcctgtaatcccagcactttggtaggctgaggcgagcagagcacgagttcaggagattaagaccatcctggccaacatggtgaaaccccgtctctactaaaaatataaaaattagctgggactacagctgcctcagtgggaggctgaggcaggagaatcacttgaacctgggaggcggaggttgcagtgagccgagatcgcgccactgcactccagcctgggtgacaaagcaagactccgtctcaaaaaataaaaagattcaaccctgagctgcctttgaccccagctccacacccactatatcagttgaccagaaggaggggctcagagcaaaaaaatattcttggcacttccagtaacaaagcgttatgcagtcagtgctgttcaaggttgagtgggcaggggctgtcttcaaccccataaaagaaaaggaagccttctataccttgaagccaagcaaaagtctttctagaaaacccctgggaccttgtgggaccaactcctgctgccagaacacctgagaacagtgtgcagagtctgttgttttcttcatccaggagagaagtggatgggccctatacctccagccgtgaatgccagactttaagattgcccggaggaagcaaactcttcgtataaaaaaagcaggccatctgcttaacccttggctccaccataaggcactgggactcggatttctctatctgatagaggtattttctgtggccctgggagctgtctgtctttcccctacccccaaggatgccaggaagacgtccaccattagccatgtggcaacctttacttctatgcctcacaagtgcctttcagagagccccaattctgctttcccacaaaataaacctaatgccatcaggcaaaacatttctgtgtctgtatctgccctggtatattctcattcctggggtcacatcctgcctactctaggggtaggtgaaggagagctgtttcagtatttccagccagaccagccatgcagcccaccttgagcagcttgtgcggtggaagaagtgagaatagtcccccgttctctcacacagaaactcccctggtctctctatcagcaacagaaaaccaagccagatggactttgcaactaatcaagtttgggatttactgtcttctgaccaaccacagtgactgagatggggctgggaccagaagcccagtgggagtgaacagccgagggaaccagagtctggctgagcttgtggccagatatttaaactgggtccagccacacctgcaaaaccagggcaaggcagtaccgggaaactggctggagttgctgcggtttggggaagttgcacaccctttcatagatacctcccttaaccctcagtgcagattctgagaaaactccaaggcttctctgcctaacctagtataacccctgttccctactacatacatataacttttccattcccccagtaattgacccaaagtccctgcctctagctgtgcccattgtgcaatgatcagaatcccttgtttcaatagtattttgacttctttaagaatactctgtatttggaagctgaaacctcacttggatccattgttgggaaccaagtacggagccttacatagcccggaggagtttcaggagcaatgccactttcccttccatccctccctctgggtctggctcttcccatagtccattttccccttttatctcccattaatttctgtcttcctctctcaccttttccatgtctctagcatcctccaggatttaaaatcatctttacccaacttatctgtgaagtaatggcaaaagaacatctccaaattaagtactccttttcttcaaaggagtttcatgggatgtacagctagtataaaataaaaatatgggaagatgtccaatcttaaaaaccataagggcaaattaagacaaaactaagctgcccagagcagggtgagtggaaccagttttatgaataaagatgcttgtctcagcactatatgtggatatcaaaaattgtgaacaacttgaacacctatcaggaggagaatactttaatcaattatggcacattcaggagataatgttttacagtcatcaaaaattgtatatgagggccagcacggtggctcacacctgtaatcccagcactttgggaggccaaggcaggcggatcacctgaggtcaggagttcgagaccagactggctaacatggtaaaaccctgtttctactaaaaatacaaaaaagtaaccgggtgtggtggcacgtgcctgtaatcccagctactcgggaggctgaggcaggagaatcgcttgaacccgggaggcagaggttgtggtgagctgagattgcactattgcactccagcttgggcaacaagagcgaaactctgtctcaaaaaaaaattgtatttctgaagaattgttaagaacattggaaattcttgagatataatattgattggaaaaagatgaaactatatggtatgatctcaatatgtcctgatgaataaaaacataatacagaggacattattctgagataaaatacatcaaaatctttccattttatttgtatacttttacaatttttgattttttaaaatgtattctgatacacaaaataataaaaatgaaaaataaaaaatttggccgggcgcagtggctcatgcctgtaatcccagcactttgggagactgaggcaggtggatcacttgaggtcagcagtttgagaccagcctgaccatcatggtgaaaccccatctctactaaaaatacaaaaattaagctgtgtgtgatggtgcacacctgcaatcccaggtactcaggaggcttatgcgggagaatcgcttgaacctgggaggcggaggttgcagtgagccgagatcgggtcactgcactccagcctgggcgacagagtgagattccatctcaaaaaaaaaaaattgtagattcacattgcagtacaactgtgcatcttgcccattgatttctaaatgtattaactacttaaattaatcctgaatcttttcccaggcttaagtgggataatgttttattgtagatgcatatttcctggctctacccagtctttctttgaagactttatcatcctattttctgaatccagtggctgactttaatcttctctggaggaactagataatttctagactaatgcttacactcatgatccagattgtaatttctgaactccttcttccaaatagaatcaaaacaagaaaggggaaagcctctcaaagcaactgtgcgttaataatgaaacactctttttttctaatccaaggagggtttcatactttttcttagtttcttgccctcttcccttctgatcaataattgtaataggaaatttgcaattgtgccaatactcagattcaatactgaactactttcttgcattgtaattcaaattccaaggttaacaactagctgtatgtttccaaaacaatcttattgtatatgtattttcttaggtgaagtttccagaaatgattttttttttttgcagagccaaacacacatggtaatttaaaaaaataatgcacgtatgtggtaaaaacagtaaaagcaaggtatcaagtaaaaagtgaagagtcctccctttctcattcccattcctactctctaattttttatatatccattttgtaagctataatacagagattccatatactcttcacatactttccccagtggtaacctcttgcataactataggacaataacacactataggacaaaaatcaagaaattgacattgatacaatccatcaaccttattcagagttcaccagtttaacacatgcttattgtgtgtctgtatttagttctatataattttatcacatgtatgctgatgaccaccaccacagccaagatacaaaacattttcagtgtaaagatttctcatgctacccttttatagccacagctacctccctccctccctgtacttccctaacccttggcagtcactaatctgatctttatgtcttgtcatttcaaaaatgctacataaatggaatcagatttgattgttttcattcagcacaatccctttgagatctatccaaggttttgacatgtatcgagagtttattcctttttattgctgaatagtattaatattctatagtatggatgtaacatagtgtgtttaaacattcgcctgttgaaggacacttgggttgtttccagtttcaggttcttacaaataaagctactctgtgtgttcatgtacaggtttttattttcatttctctgggtaaatgcttaggaacacaaccactgggtcccatggtaagtccatgcttagttttagaagaaactgtcaaggctgggtgcatgatggctcccatctgtaatcccagcactttgggagaacaaggcagaaggatgacttgagcccaggaattcaagaccagccagggcaacatggcgaaaccccatctccaaaaaaagaaaaaagaaaaagccagacatggtgatgtgtgcctgcagtcccagctaattgggaggctacagtgggaggatcccttgagcctgtgaggcggaggttgaagtcagctatgatcacgccactgcactccagcttgggcaacagagccagaccctgtctcaaaaaaacaaaaacaaacaaaaaaaaggaaagaagaaggaaggaagggaaaggaaa

SEQ ID NO: 1048 - DNA, 434 bp, Homo sapiens
gaaactgccatactgttttccagagtagctggtttcacttttccaccagcaacgcatgagtgatccagtttgtccacagcctcaccagcatttagtgttactactgtttcttactttaatcattctgataggtgggtagtgatagctcactgtgatttttaatttgcatctccccaatgactaatgaacatcttttcatgtgctacttgccatctgtacatggtcgtcagtaaaatgtctgttcatgtcttttgcctactttctaactagactcctttgaaaatttctcatattgtttttaacaatagattttaaaagaatttacagagtaagaatacatttttgagacaatggggaaaatgatacggagtgaaaggtgatattaaagaattaatgttaatttcattatgtgataatagctgagtggctgtgca

SEQ ID NO: 1049 - DNA, 15932 bp, Homo sapiens
tccaggcctcctgaacagagtgatctaaagcttgtgtgcagtgactttgagaggtctgagctgagcagtgacatcaatgtaagaagctggtgtatacaggaaagcactagggaggtttgtaaagcagatgccgaaattgcaagcagtttacctgctgcccagagagaggcaggtatgtaatgatactgagctacaaatggtgcttctgtgggaatttttgtttcctcaatgaagtatctaataagagaaatgacacctcagtgattttatctctacaggcaacttagctaataactaaagccccagtggaaagctttcagggtgagaccagaaaactaagatttggttgagtctcagtaggcctctagtgctgccccccagccccccagtctggccagtcgcaactatcctcaggcatattgctgaaggaatgatgcttgcttgctgcagataggtcccctttggtgaaaggggggagtagccaagtgagatagtgctacccccgtgcctgagtccagcagttctgcagagccatgctgctgccccacccaaggcctgctgggcagtgtccctgggagtggtaggcagagggacacccagtgctgagtccagggtctggtaccggatagtgggggctagggcagtacatgtggggtatggggtggtgggggttgcaaccctcccaaccaacacccactttctccagacgcatgccccatgtcccgacacaggccagcacacttagctggtttctatctccaccctctctttttcattcccttgacacgtgtgtgttgcttttggtcttactgaagagtcttcccattcatgtatcaatattttgaaactcttagtggatatcttattaaaagagagggggaaaatcacctatgaatctctggtgcaatagagtagcctcagtcttcttgatataagttatttgttaattctagaatcattattagatcatgcttatgtagttggtgttggccctcttagcccctaattgctcctgccataggcagagtagacggcccatcccctattatttctcaaagtgcaaccattagtttccatgaactcctcctttcttgctagatgagcagaggtagctgaaggtgaacctggccctactcctcctgtcacctctctctttctgttagaaatgcatgaggttgacagttgtttcagggaaacatgactcctttcacttcctccagaaggttactaccagaagcctgagaagaaatgtgtggacaagttctgctccgattccagctctgactgtgggagctcctctggcagcgtgcgtgccagccggggcagctgggggagctggagcagcaccagcagctccgacggggataagaagcccatggtggacgcccagcacttcctgccggccggtgagtcctgagcagagccccaggcactctcggtggcccttccctctgccctcccacgtacccagtccacacagtctcgatctgccttcaggagtgcagaggacagatgggacagtggccttgacctttgctttggacttactcactttctttttctttcctccctcccccttcccctccatccttgtcataatcatcatcattgtttgttagtgtctgtcttggaaatagttcagagagcttctgtatttagtttgtcatttgtacattcttaatgacaccgcatttgccattgtgatgtttcttaggtgtggacttctatggcactaagtgcatcacattgtgcagccatcacaactgtccatctccagtattttttatcttgcaaaactgaaactgtacccatgaaacaataactctgcattgctccctccctgtaacccctgctcacccctcttctactttctgtgtctataaatctgcctactctggctatcttatgtaagtggaatcacacagtatggttttctttttgtgactggatcatttcagttagcataatgtcttcaatgttcaaaaacattgtagcatgtgtcagcatttccttcccttttattgccgggtaatactccattgtatgtgcagacacttggatgataactttcaccttttggtttgttctaataatgctgctgtgaacattggctgtcccttatttttgagaaagtttgagaaagttaaagatgtcggagaggtcacagaagcatctgtgtttcagttacccagaactaacaactcttaattttgccatatttgcttttttttttttaaatcatctgttcacttctcccttcccaagagaatcactgtttactgtcatgaatttggtctgggtacttttagtccattttaaattttacattcatatatccatcaacaaaatattgactgttagtctttaacttacataaatgaaatcatacttcagtgtagccttctgcatcttgctcttttcactcagtttttttttttttttaattatttattttttttttgagagagagttgctctgttgccccggctggagtgcagtggtgggatctcggctcactgcaacctccgcctctcggttttaagcgattcttgtgcctcagcctcccaagtagctggggttacaggcatgtgccaccatgcccgtctaatttttgtattgttagtagagacggggtttcatcatgttgcccaggctggtctctaactcctggcctcaagtgatctgcccgccttggcctcccaaagtgccgggattacaggcgtgggccactgcgcccggcctactcagcattgttatttttacctttacatctatatgaagatgtagttccattccttttaactgttgttttcaacatagtaaacttttaactttagtaaaaagaaagggtggtgagattgtgcagttcctgtttgtatggcaccttgcatttgtcaagcatgctcatgggtgcccacacgccccgtgagaagggcagggcaggtgtccctgttctcactgtcatctgaagactcagcctcagagaggatgcccgaatcctttgacaccatgcagtcagtagctgagtcttgaaccccgggcttcttcccccagatcccagtgcacttcccacctcatctcctattctcctcatgggctgttctacatgatgaacacaagccatagagaatttccttcagcagcctgcaagctgtactatttcttctctctcccaccagcagtgagaccttaaaagaaagtcttgtctgagagactagtgcagtagcagccatgaaaacctagaggaagtgcccacgtgtacgcgattccactcagcagttctccgcgttttcagttttccctgtcttgtctcgctcagcctttttagacattgttgtcttaatggccccgcataaaatgttcacagcactgataacgttctgtgcatgtgcatctaccacagaagactgaaggtttgcctgatgattccagtgtgggattttaaaaatggaggccgggcgcagtggctcacacctgcaatcccagcactttgggaggccgaagcagacagatcacttgaggtcaggagttcaagaccagctggccaacgtagcaaaaccccatctctactaaaaattcaaaaaccagctgggcgtggtgacgagcgcctgcagttacagccactgggaggctgaggcaggaggcggaggttgcagtgagccgagatcgccactgcactccagcctgggtgacaaagcgagactctgtctcgacaaaaaaaaagggggtacattagttaagaaaaactacaagtgtgtcttttgcttgagggaaaggctaacattagtagaatgatgaaaattattaatggtgttgctgtacagtagcatagtatgcagtcttcaagttgcatttgaaggttatataatagtagggaaatgtccccagtgtaataaatggtgtaaaaaaacaaaagacaatgtatatgtgaaatatgattccaattttatacatatacacacacataaaggagactgtaaagaactttgggaggccgaggcaggtggatcacctgaggtcaggagttcaagatcaccctggccaacatggcaaaaccccatctctactaaaaatacaaaaattagctgggcatggtggtgcacacctgtaatcccacctacttgggaggctgaggcaggagaattggttgaacccgggaggtggaagttgcagtgtgccgagatcacaccattgcactccatcctgggcaacagagtgagactctgtctcaaaaaaaacaaaacaacaacaacaaaaagagattgtaaagaaatatacctaaatgttcataattgtagtataattgcacgattcatgtttaatgtttaattaaaaaatgtgagaatatcagtttaaagtgaaaaatcagtcatgcattaatgatattaataacctatgcattttaataccgaatatacagttgaagtgtactttttgaaacttgtgataatgtgtttcttttaatgcaggagacagtgtttcacaaaatgattttccttctgaagctcccatctccttgaatctttctcataacatctgcaatcccatgtaagttttttattttccagcttttacagtatgttttgtgtactgctttttctaccaattattgtgtttcttctttgtacttggttctgcaggttaaaatatgaaaactttttaaagatgcaggaaagtaaaatctgattttattaattcaggagtggcgcaagtaaacatggttcatgtgggagaggctcaggtatcgctattttttttcagacaggtagccacgttggaaaatacctaagttttgaggccagccgtggtggttcacacttgtaatcctagcactttgggaggccagggtgggaggatctcttgagtccaggagttcaggaccagtctgggtaacataatgaaactccatctctaaaaagaatttcgttttttctttttaaattaggcgtagcggcgcatgcctgtatttccagctactcgctgaggctaaggtgggaggatcccttgatcccaggagatcgaggctgcaatgagctatgatcacaccactacactctagcctgggtaacagagcgagatcctgtctcagaaaagaacaccttatttctgaatatagaaggaggaagcagtagttattataaagatgggaatcatttaccctttgctaggccttgaaataaaactgagcattgataattgaggaaattttgcaagaacctagtagatacatgtttccagttctgccctatgatgatttctgcagcactggacaaaataaacaagtacaatttattgagtgagagacgaggagcgtgggtaagaaggaggagagttcagtgtgagaaatgaacttggtttcttaggtacctccctcttggtaagaggacaaaggatgcagttaagagggtgagtttgtgaggaaggaaacttgactagtgcacaggaaagctcttcatgggtttattgggggtaggttgtcagcaaaggagtaagagttgctgctaactgctagcctaggcacactccccagtcagcctccttcccttgggccacgcatctcccttctgtacttttctgtcatctctgactagggaaggtgaactacctggaaatacagacaggtggctacctgtctgaaaatctacctgacgggtagatttaaaaccacaggttacctcatagttatgttagttaattttttttgttgttggttatgacaagactttgctagatttgggaatttaatattcctcaattcttttctggctgtgtaactttacatcctttatatctgtatgtttcttccccaagaaactcttccccaagacttcaattgagtgaaaactcaatcagacgtggttatacaatatcagtatttcctcgtgcagaaaaaatgagtcgttcctcctttgccctcttccccacaggaccgtgaatagtctcccacaatacgcagagccttcctgtcccagccttcctgccgggcccacaggtgttgaagaagataaaggtgagatgcattcgtcttgctgcagacatcagccaagggttctgtgctgtctgtattcctggctgatgagtttgagaagacagagcaggcggggtgggacagggccatttccccaccagccccttctgcaagccacacgttcatacatcaggaaggcacctactctgtggacgggcatcattggggccccagctgaccttgtgcatcaatagtgagccccctccctacagctgaggcacagatgccctatgtcctggaataatcccaggcccctcacagcagactcctgattcatttagttcaccttccctagtcagagatgacagaaaagtacagaaggtagatgcgtggcccaagggaaggaggctgattggggagtgtgcctaggctgagggtgcagcacctcacctgcttaccactttccctggcctgcttcccttcctccccaactcactttgtgtagaagcctactaattcagcctcagcagccttggggacccgccttgctcaggcatcagtgctgagaccttctgcctgcggggaaggcagttgcctaggtgcatggaagtaggaatgggtgggaaggaaacctctcctgcctgggggctctgatgggaggtgaattccagtcctccctcatttttcttctcttttcctcctcttctgcctctctttgtcttttgttttctgtttgattctagggcttctttcttgcctaacgtgggtcaggaattgtggcaggataaacctgatttttattctctgtgtctttaatacacatacttgcttttggtcatagaatttaacactggatttaaaagctgctctgcacattggagaattttaacccttgaaggtgaaatactttatgtcgttccttggatgaattttggacttgtccagttatcaacagaaatagcgaacctagtgactagtccagtaaaataagtgttttcaattaaaaaaatctaaaattaaataatccatagtttgcaaaggcaagatgtgggggcggtttagatggtactacctttttttctgtgagagaaaggtaggattttaatggtgtggaaaaataaaaactgtcagagcatctacccttcagcatgtgccgttctgctttgctatcagttggagatatacgtgcggtttggtgttctaacccaggtttgtgtgtgtacttcaagtgcctttaccttggccccactgacagagtacatcttgtctgcagtctgttgcctgcaaagctgtgggcccatcacctttgtactccctcacctccctcacagccgtgttttccttcttgcccagctgaaatggcctgatccattgttacagtcatttcctcgactcctctccctttattgcaaagccccagccatggttttgcctagtgccccacctgctcctgtgcaggcaagtgaagctggagagcagcattccccatgccagctgcccctgtggattccccaccacccacttcacatagtgcctgtgtcctcccgccctgcccctctgtcaccacagttccaaagcctcgtgcctcgtttacttgatcttgcttcttgctttactagaagagagagaagtggttacaggccttcagcaagctcccactgccctctccaccagcccaccatgtcatgccattctctgcctctctcctgttgtagcctgaagaattgtcagtgcagcccttctctccaagggtattactgcagatttcccttctgcatcatcagtttttctctaatgggtcattctcatcagcacacaaatctactataatacttcccgtcattaaaaattcaacaatagccaaagctctctcttgactgccttcttcagtggctgctctgtttctctgcccctgtcattaggagactccttagaagaattatgtgagttgcccattcaaattcctctcctccctggaaacccctgtaatctggcttttgccaccattgctcttttgaaaccgtgctgtcggggtccctggtgatttgcacattgctgagtgcttggttaagtcttttcagtccccatattggcctgtgacagacactggacgttctattctggctggtagaccttaggttcctgacccagcttctccccatctccccacctcatgaccctggagccctccagagagcaggccttggtgctgtgcttttctctgtctgtgcacactttcttggtgatctcatccactttcaaaggtctgagtctttctttgacccagacaactaccaaatgtatatgcaggagacattcactctattgtgttgtacttgaagcaaacttgtgcctggccccaaagggagacactcttccttctgagactttgcataacaaatgccctgggaaagataggtcagaataaaggagccagtgttgcttctcataagaagcacagaaacctgaaagacccagggagaattgtctcacaacatacacaccccttatttctatgtagccctggcttctggtagattttcacatgcgtacatcattccataagcaattcttaatcagacctagggaaggtggaaccaatctgctttgtctgtctcatacatttattaacagcggctgtccacaggagcctacgcagcaggatgaggccactttgcagtattgacctcagccatgccctagagtctcagacccaaccagctgaacaaatcccacagaccaccagggtctaccttagagagccagatggctttctctttaagtttctgtgttgatctctccacttggccagaggcattactccaggtacagcaggatgtgttagtgattgcatagactgcaccttggcctgcaaggagaacatctggagccattctgtcatctgtaacaaccacggccagtgagttgaggctgatccaaatgccttccagggaccaggtgctgtcttcagtcacttcagctagtatcagcaaattccataccagccatttctaactggatagctccttcctagtgattactgcccataggatgtgcgtgaaccagttatccttccaggaagcctactgtgtgcccgttgtgtgatgctggaagtgttgccatgtctggggcaatgatgcacccaggcaacaacaatggcagcctgggtgatgcagacctgatcagtatcttgattccagctggccgcagtggagaacatacccttaccaaggacctctatcttgactggctgtaaggtttaatcagaagccaagatccattttcacatttcagagccctggagaacagtgtcttcaatctgcccatctgttgcttcccaagtggcagaccaagcacctaaaccattggcaatagcctgagagttgtttacacctagcagggtttcttcagggcagaattagccagagctgtgagaaccactttgggttctgcccactgatcaaaatggttgtggtccttttcagttctgcatggtgggcattgaggtgggacagctgcagcctcccagtagatgctgtctgatttcagcctgatccagccatcagtgagccaggcccaggcatttaagggagcccttgggaattgagggcccactgagccaacaacttcacttcaggtgcagagtgggggataaagtttccctagaggggtacctgccatttttccacataaagctgaaatataggtggggcaagcccactgcatgagcaccagcctctttgcatgagttcccctgagccccatggggatatttaatcacagaatatctaatatctaatataggggtgactcagacagccctagatggatgccacacacagtgggttgtgctacaggagaagaaccctgagctttgggaccccaaagcttttataataggcaacaagcatgcctgccctttgctccagaaagagacactatatgttccgaggcttttgcttagcaaacatctatgaaaagatagtccaggagaaaggttgccagtgcctctggcagaaatgggagagatccctagagacttgtgtccaagaagtcaactctgctcaaaaccttccagtagcttcaaagtaaatgcctaaattcttcaaggggcccacaggctctgtcttctctgctcccaatccgctctctatagcctcatcccctactcttccactttcccctctccttcctggctacactgatatccttgctgtttgaactccccaggcacaccttgcttcagggcttttgtggtactgtttctgctgcctggaatgtgcttccctgtacccactggactcacttcctcacgtcaatcacgtctttgaggagctgttttctcagtgaggcctttgaccatcctatcttaaatcattgtatttggccaggcgtggtggctcacgcctgtaatcccaacactttgggaggccgaggcagtggatcagttgaggccaggagtttgagagcagcctggtcaacatggtgaaaccctgtctctactaaaaatataaaaattagctgggcatggtggtgtgtgcctatagtcccagttacgcaggaggctgaggcatgagaatcacttgaacctgggaggtagaggttgcagtgaaccaagatgccaccactgcactccagcctgggcaacagagtgagaccatccctccccccacccaaaaaaaaatgctgtatttgccatcatggcacgcacattatctggcatgctacactttgtttgttgtttgtctttgctcacttgaatgtagcttgttcactgctgtatcctcagtatctttaatggggccttgcagaaagtagttcctcaaatatttgttatgtgagtctcatcttgtcatccaggtcaagagacaatcggacactgtctgaagaaacggtcaaaacaatatgctgtatttcagaattatatcctgaaattatattccgaaaggagttagtcagcatgtgtgggtgacattagggagtgttttctggagggaagggcaggtgcaggaagggtaggatgagggccaggtgaggatagggtggactcaggccttgttctcttccgtaggtctttactcacctggagacctgtggcccactccgccagtgtgtgtgacaagcagcttaaactgcaccctggagaacggcgtgccttgtgtgattcaggagtcggccccggttcataataggtacagcttcacttctctgattggtgccttgcttagtctaagggcttgcagttggaatttgagttcagtttcttagggtttccttacaaaaatgaaggctaggcttcttccttggtgtactttagctgtgcgtttccttctgccttttagagttgcactgggactaaaccaggcattgagagaaacatgaaataaaagaaagaaagctggtgacagtgtcgttattttttaaaaacgtctttaaaaaagacgattttttcatatattagaggcagatttgaaaaaaaaacactcataattcctaactgctagcagagcaaagctgttcatttttctgtggcattattcttgaacacgtttaacgttgtatttattcgtttgtttatttattttttagagacagagtcttgctctgtcgcccaggctggagcgcagtggtgcaattatagctcactgcagccttgaactcctgggttcaagcggttctcctgcctcagcctctcaagtaactgggactacaggtgtgtgccaccatgctggtctaatttttaatttttttttttttttttttgtagagacaggatcttgctttgttgcctaggctgctcttgaactcttggtctcaagctatcctcctgccttgacctcccgaagtgttggtattataggcatgagccaatacacctggcccaaatttaaagttttaaaagatcaaataatttgaatattgaaaaatagttacacaatggcagtttctcaaatttgctatttgacattaatatgtcattctattagggagtcttaagaaaatgttagatatttaatcacagaatccatttgatggttttcttggttcagcttattacaacagtatttcctatctcatttctataataagaatctaggttgcaatagggatcaaagtataatgaagtatagtctttatagttatgcttgtctaagatgaatgctggtcttgctctgagtggacgtttttaatggaacatgtttaagtccttcagatgtgcacaaagacacttaaaggtattccagctgttctttcacagtgctgataaagccacggctctctattctgtctctagttagacttaacaagcatagttaaaaacaagtgtgctcctagtccagccgtccatcctgcagatggcatgtcactagtgatcagcatttagtaagcctttgattctgtgacttgagaaagtacatcttttattttccaaaattggggaattcacagtgattaggatgctaggcagtaaaatcattttccattttctttacttgatgtcttgacatcctgtttctgattagaccacttgttttttgtggcagtttcattgattggagtgcaacatgcgaaggccagttttccagcgcatactgtccattggaattgaacgattacaatgcctttccagaaggtaagggctcttcagacaatcccaacgccattattttattcttagaaggtcaaagcaggaagtgtgtggactaagaagaatccttttaacagcgagcagactttgagaatgagcttgcagtagactgccgaatggcttcatgtggatccagttgtgcactgatgccatatataattttatatgaccctcaaaaagccctcaattttgggtgtctgggggcttcaaaaataaccctaatccatttagtccttccagttaggtagaactaggtcatttggatccatgtagatgtaacattgttgggtatccattgggaagccggggctttagctgctcgctcttctttttaggcagtcaagtcccatgtgaaatagaaacattggcctgcttcctattatgtccttaacttctctgcccttgggtggtgctgcagaaggaaggaaagaagcttggaggggaaattgtggaaaattgcagatgcttgggctcaagcatctgtaataataaaaaaatgagagctatgggatatccctggtcaactggaaaatgctctattgtgcactactgttggatcatggtttcttatactagagctgccctttcagggaagggatgtatcattcttatctagattttgatacatgcattgctccatgctaaccacaagggggtgctttgggaatgttatgattgtgagggtctgtgttcattatgttcttaatggtatctaaggagtccttggttttggattgctgtatcagcccagatgatatatgtgtaggtcgctgaggttggcatgacaggtaataaaaacattttaaagactggcaagaaccttgacactatttagatatctagtagtattttaatgtattttgtgtaatagaaagattcccatcaagtgatcaaatagagaaaaacaagccaggaggaagaccttccacattgagggcttcccaggttgtgtgtctgataaaaagttttaatcttgagaatgatgttgcaacgactctcctggtccacacggaccaagtatttatgtctgtaacttgtcagtatagtgagaccttgaaagcttttttgcctgagagtgagaattcagttctcaatgaaaatgtttacctatgatgatattctcccattctttgtagaaaacatgaactatgccaatggcttcccctgtcctgcagatgttcagacagactttattgatcacaactctcagtctacctggaacaccccacccaacatgcctgctgcctggggacatgccagtttcatcagctctccggtcagtgttgcccatcctgtgccgtgaacccctgggcagctctgaattgtttccactgcttccttaatcctggtctcagctagctttagcgttgggtttggaccagccaaagcctggcttgcttcttttagatcacagaagccagggctggccaccctctgaaggaaactgacatgtaataattagatgggtggggtcttgcagacattgacattctggccaccccaaatgaaaaacatccccaaacacaccaagcaatggtcctttgtagataaaattgaacatgggccagccctctgtgtgacacagctgtctttatgtggactcactgatctttacttcaccgatacgagatgaaagtcccaggaaggtcagtgggtggtcagggtcccagagctccctgcctgtgagcacaccctccctgctcagaagcccgatggcttctcctttcacatccgcttgacacttgtttttgtttttttccagataaagggtatttggcctgtgggttcttccccgggttgcaaataagttcatcccattagatgaggatttcacaatcctccctttgagaaaaaatggagttaaagcaacccagatttaaattgagagtagtctaataacttccaagtaacttgatagcattgtagtattcgctgatgtgtattcacctttctaaggcttttttttttcttttaacttatttttccttcctcatttatacttcagccctacctcacaagcacccgaagcttgtctccaatgtctggactttttggttccatctgggccccgcaaagcgatgtgtatgaaaattgctgccccatcaaccccaccacggaacattcgacccacatggaaaaccaagcggtcgtgtgcaaggaatactacccggggttcaacccgtttcgcgcctatatgaacctggacatatggactaccacagcgaataggaatgcaaatttcccactgtctagagactcgagttactgtgggaatgtgtgaaaataattggatttttaaacaatgtgaataaagaggcttgtgttttgattactagtgtaaactggttattgagatagattatgacattggtggatattttggcacttttatatgaaaataaattttttaatgaaatctgggtgctctgttttttttaactcttcataaatcagtggtaaaaacaaagcatccatatgtcagaactttcaaaagtcaagaagtgtgtcaggcatgccgaatgttttaaatctgaacacgggagacgtcttttttttttttttttttttttttttgagacagagtctcgctctgtcgcccaggctagagtgcagtggtgcgatcttggctcactgcaacctctgcctcctgggttcaagcaattctcctgcctcagcctcctgagtagctgggattacaggcgcacgtgtgccaccacgtccagttaatagagattttcagtagagacgaggtttcaccctgttggtcaggctggtctcgaactcctgaacaagggagacttctaagaaggtaggagttgagcaagaaatggctgctatggttttcctcctcctgagcatcacaaccatctggggagctttcaaaaaatgaagttgctcagccgttgagaactgctggaaagcccagcttaacaagttgtttgcttgggtggactctgcttgggggtgcagcggggggttctttccagtcctggtgtgttgctgggatgaagcagagagccctagaactgttctctccatcccacttacggcaagggctgttcctctgtcaggccagtccttgggggcaatgacagcagcaggaacattctggtaagtgtgtggtttccctcccagtgagcaggctaaccctgagtataggaacttaggggaggttaggtggctgatgcatgttttccagaccggtttgtatctgcttgtcattgatcttagaagttcatattatggtggaattatctatttgcatgtgtaaactttgaatatgtttttaacttttaataaaaagttatttttaca

SEQ ID NO: 1050 - DNA, 9303 bp, Homo sapiens
atttgagccttttcttggtgtttctactcctctatgttctgctgcctaaagaataagtgtgtagattcagaagtagtaatgaccaaacctcttgataacagccatagggctcatttattaagcacctgctgcataccaggctccgtgcttgccttcatcctccctcaccttaccagggtgggttttttatccacttttggccctttgctagctggggtcccctcagaccctggtcctataagggactcacacgaggaccccctcaaggcaataaagggaggattaaagagctgagaggtacagagggagcagccagcatcaggctcccaagaagccctcaataaatggcaactggttacagcctctcagccctctagggatgcccaatgctgctggtgtcttgatgacttgacttcttcaagtgacacccttcttactgtgcccataaaatgtttgcatgtggtagggagcaagttaatatttacaaatgcaagtatgcctaatatgtgtttcctgatgactgctataggaggtgcagggtaataattagcaatttggagacacgtttaggactcatctacagggagaaactaccctcatttttctgattctccagtttgtgtgctttcaggacccaggatagatttctgcctgttggggtggcctagatctttgtctcttgtaatgaattaacgatgaagaaatcacccacctttggctttcttagtactcagtgatcattgtttttggacccaacctggcccaactgaagacctagattccaagaaaccttccctcttttcaaatttgggacttggcacagattagacctgctaactaaaaaaaataatgattgataggaaggccaaaggaaatagcatttatctgggaaataaagagttgcaatttgggaaccctgagtcatggtagtcctgaacagtgtcccatagggcaatgcaggaaaagttttgtactggggactttcacaaaatgttgtttttgaaaacagttcattgcctggcagaaatgctaaactgcaaactcgtatgaattggttacttaattaggacactccaggatgagagaaatcaaaatcccatgtaccttgacttcagtccattgttatccaggtctacagcaacatcctgtggcttgacctttagcaggtgtgagtgcaatgctcttacaaacgcttgactccatgttaaagctttagccttaactacttcattttctttcaaaaactgtactggaatatttgtgaaaagaatgaaaaatatggaataaattcataaatacacaaagagagagagctctaggtatatgtcaagtctggattaaagacagatctgtgtttatttttatgaagcatcttctgactttgatccaaagcaaaacttcttccatggccccatttaatccttgttgcacccctgggaagggaaaatgctgctgtcccactttgcagatgaggggctgcatgttccaggccacccctctcatgggctgagcagcctggttgcaggtctcatggtggcgccactttgccattgttccctactttggcttctgtaaacaccctctctgaggttggtgagctctcctggggaaacaggctagcaccagttaatacacagagggagaacaatcagtaactttgttcctgtgcccagattggtggaagtcaccctatgtggagaggaggactttgaactcagacctggacttccctctgggacctttccctacactgtctgacctggggctggtcgtcacctcttccaacctttgcatcctgctctgtaaaatgagaataagaacaccatcctctccacattattagaaggattaaaattaatgtatctgaaggttcttaacagtgtcacacactcatcgttagtgattgtcatctcagtcatgtctcctgtttatcgatgccccttttgtagccaaaccctctgcccccgtggtattgggccctgcggcgaggaccacacctgagcatacagtgagtttcacctgtgagtcccatggcttctctcccagagacatcaccctgaaatggttcaaaaatgggaatgagctctcagacttccagaccaacgtggaccccacaggacagagtgtggcctacagcatccgcagcacagccagggtggtactggacccctgggacgttcgctctcaggtcatctgcgaggtggcccatgtcaccttgcagggggaccctcttcgtgggactgccaacttgtctgaggccatccgaggtagaggaccctcacacccagcccaagcccacacctggctgtcaagcccactcccctctccccaggctgttgctccagaggttgaatggcctgtaatctaatccctgactatactgcccgcccgccatgcacctaggtgtgctggtcacttactatcattttattggcagcggtcaggggaccagcaatcacgtgccaagctctgcgctagagagtttcatttatctcaccaagaacaactactattagtgagtacctactatgagccaagtccctatgtgctcggcgatttcactgattttgctacagttcttacattccaactgcatgccaggggttgtgcttgtagatttcactcattcttagcctagtaggagctaccagtccttgagcacctactgtgcaccaggcactgtgcttggtaatttcattcatatgcaaagagcgccctcaatgtcttagcatctgctgcctgcctagcactgtcctggtgatgccctcaccgtggtagtgggagttaagttatggagccctccctgtgatctgtctgtgccagaagatcagagcttctaccctgtgctgtttcagttccacccaccttggaggttactcaacagcccatgagggtggggaaccaggtaaacgtcacctgccaggtgaggaagttctacccccagagcctacagctgacctggtcggagaatggaaacgtgtgccagagagaaacagcctcgacccttacagagaacaaggatggtacctacaactggacaagctggttcctggtgaacatatctgaccaaagggatgatgtggtcctcacctgccaggtgaagcatgatgggcagctggcggtcagcaaacgccttgccctagaggtcacagtccaccagaaggaccagagctcagatgctacccctggtgaggttactcaaaatttttaaattttgtctttttctctcattttaaaagtaatatccacacttgctgtaaaataagctagaagtctataaatacaaagtaaaattttaatgtcagctccatccccccaaatcccacatgcgaagagtcatgactagtaagaatttgatgcacaagttaatagaacttttgacataaatatatgtttaattttttttttttttgagacggagtctggctctgtcgcccagactggagtgcagtggcgcgatctctgctcaccgcaagctccgcctcccgggttcacgccattctcctgtctcagcctcccgagtagctgggactacaggcgcccgccaccacgcccgactaattttttgtatttttagtagagatggggtttcaccgtgttagccaggatggtctcgatctcctgacctcgtgatccgcccgcctcagcctcccaaagtgctgggattacaggcgtgagccaccgcgcctggcgtacataaatatatatttaaggagcaaagaggcaggcagggggaaccatcttctcatagagtcctttgccttcccttattccttgagagttgttgtgcccgtttctcatcagcccacccttgtgctccctactttttctaacctctgctttgtttctgtttcatccaaacttttccatcctcatttatgacctcatcccagtacaccctgacatctgctgtgtatgtttcagaaagacaaatgtagtttaaaactgtaccaggcctggcggctcacgcctgtaatcccagcactttgggaggccgaggcgggcggatcacgaggtcaggagatcgagaccatcctggttaacacggtgaaaccccatctctactaaaaatacaaaaaaatgagccgggcgtggtggcgggcgcctgtagtcccagctactcgggaggctgaggcaggagaatggtgtgaacccaggaggcggagcttgcagtgagccgagatcatgccactgcactccagcctgggcgacagagcgagactctgtcaaaaaaaaaaaaaaaaactgtaccaggcctgcaggtgaccatgaatggtcacagaacggacctcttctgtgtcctgattgtgatatttgagcaacaataatcacaaacccctctgcaaatttactaagtgcaaatttccattcatccatgatctctgtttttgcttcaaccacccagtaagtctggagttttaaagaaggggaaactaggacttgggaagtcatgggggatgttgttgaagacctcttgcctttagatcgggttattggttcaaactaattaaagtaaatctgggtccctgaggacaaggtcagtatcagcctaaaatgcaaatttgtgctagttagagaaacagtcctcttctgctgggcattgtcccatggacctgaagttggcctgtgttccactccgtatgaccaaaatatgtcttacttccctcttgtgtaataccaggaggagtctcaactccaggagacttttcaaaggcccaggttcctcccacataccttatggtggttagtcttatctgctgggtcagtgctaggtcacggatttttccatgtccctgtctgctggaagagtaaatataggaaatggagggcaaaaaatatcttctataatcagagatgtatggaaggcgtgtgatcatgtccacagctaactcagtcatgcatgtacacgcagttccaaatggaatccatagttgggtgatcttatgactaaagacagcataacaaaaccagtatcattattacagttaatacaatttcaaatttttaatcactaaatttcataaaattattaaaacaattcccttatatcatctaaaatggagtatacattcaaattttcctcaaatttcttttatgactatctttctgtgcactaaatttggttttaattcatatttaaatgctttgcagtatttttctttgaaacacttgggcctcaagaatttttgggggtgttttaaaagtataaattcaatttcctcagtagtttagggttactcatattattcatttcatattgggtgagttccggtaactcgtgccttttgaagaattttgtgtccattttatctaagttgtcatatttttgtgtgtagagttgttcataatatctccttattatctttttggtgtctgaagggttatggcgatatcccctgtttcaacctcatatctaaaatatgccatttctgttttcttcttcatcagccttgctatagtttttttccattttattggtcttttcaaaggaccactttgtttccgtgagtttttaaattgtttttgtgtttccagtttattcattttttgcactcttctttttattaattcctgtctcctgcttgctttgagtttattttgctctactttttctagtttcttgaagtggtgatttaattgacttgaggcttttgctcttttctatgtcattcctttgcctccgtttatggctggggctggtgttgggggatgggtcccaggtgcctggctgcagggctgtccctcagtcctgaggcccctagtcagtctcccttcttcctctcccaccttggaatttctcctattcctgatccttgtgatgtttctagggttcatagttttacttctcagggaggtaaaactgcaccatcaagactggattgcatttgcttttcagttattcatccacccactggcttggaccaggaccagggctggcatttttgggtgctttcggtttgccagatgtagcatctttgctcaggtactaaggctggaaatgcattttaagttgtctaggctggcaggtaaaatgcaagatgccttgtggttacataagtgctgcaccagtggcgtgggagccgggtaagagactgtgcactagggttaggtgagtgttctgttttgactcacggtcattttgcagtttggctttctctcttcaagtaatactgagagccagggttgtgcagaacttactttgttttcattttttatttgatttggggaggatattttatacagataagtagctatgctgctgcaattgtacccagcaactcttaagtcaaccgaagatctttgagtgctttgacccaaatgtccactcccacatctcagggtcccacaacttccccatcagggccctaccccagcatagcaaccgttgaagctgagattcatcctcctctgtgattctgctactcttttaatgatgtccagggcccaaccctctattctttctgccctctagccacaagagataagaaagtgcagtgctgccaagaagtcctcttgctttcacgctgaaccttaactcataatcaatcactcgtagcttctcagcatatttccccaaaaaaaatatgcccagtgatagccatggaacaagttagtccttataactaccatttcccaatttgtttcaaaagcctgatgccaaggaatttcctgcctgtggttacgccatcccagcttactgccagtgaaagttttatcaattgcatcccagccatggtgcccagccccactcactgccagccctgaggtcctcattgcgagctgatgagtattcaggcttcaaatttatattttagagtaagctttacagacaacttaccaaggtcagtttctctgtaaggcagactagagatggatacaggaatgcaggaagcatcctgaagagctgtagggtcagcatgcctcaggaaatggggaggcaggactgtaggaggagcgaggtgctgagctacagtgcaggtagaacaaagacccagctgctcctgcggaggatcccaagggctgagagcgtcatgtagtgttttttaattgaggagagaagcgtggccttcctattttcaattcagccaatctttcttgtgggctgtcccctagaaggaggagtgaacttggaattgggcagtgcagctttcctcaagggagaagaagtcccagagagccacccagctgagaactgccggcctccaacaccccagcagccacagatgctgagttctccatttcttccttaaggacccaccagcaccattttatttatttaaaatatactgtaatatctttaatggcccaaactgctcgcgttaaaaatgttgattttaaaagcctgaactgctcatgttaaaaatgcagcgtccaaacatgtgcttccccgtaactgagtgtgcccaactaacagaaagatttcagatgacacctgcactggggtggaggtggcctaggtgacatctgaggccctcccaagcatgagacccatttccgtgactcaccaggatgttttctagccggaaggtttcattatgtccagtgttccatggctcctccaagttctgagaacacggagtcctccccttacttctggggctaagcagggaacctgcaactctcattgtgaagccatcctcaagccacctgcctacccttttatagtcattaaaatgtccctaggaatttggacttgttttgttccaaaggacatggtctcagggatcaacctaaggaacactagtgatgagcttctttaggtttgaatgcaagtaaccttgtgaccctccctaaaatccatgggcctcagtttccctagcagaatggaatgacaatccctgctcccataggcttgtgagggtcaagtgaggaaccccgttgccacatgtatgaatacctgagtacacaccccctccacctcttccctccaggagaataagctggcaacctgggacaggatgagtgagaatggggagcctctttctgtggcttctgccttgtgctggagtgaagatagcctgggcaggatgcaggttcaaaggtggggcatagatgggcccaggcagcctcagatggggtaagtggaggcccctacaatggcctcccaagtggtctctctcatagcccctcgtcttccctgatttccaggcccggcatcatcccttactgcgctgctcctcatagctgtcctcctgggccccatctacgtcccctggaagcagaagacctgactgtaagtacaaggaagggaggacagaccaagggctgtctcagaagggcaaggccaacaggaaggcccagcccacatgccatgcagcaccagggtccgtggagttaagctccctccgcaccctcggaagtcttggggaaccctttaaaaggctcccaacccacagaaattatgtgggtggtgtacaatgtgggatgcttgaaatgtgttcaaagatgtccacagtgccctaggagtttcatggaggcagtgatgagtgggtggtcccttgcaggctatctgtagattatttgaatgctgggactccatggggtcagagaaatccacattgtaaactaatgttgagaaacccaaatgggaagccctgaaggctgtttgtgctctgaccctctgtgtgtctgagtggaaggaatattggaaagggcatcaggacttggcaggatggctgagcaggcagagttctatcaggactgcctgtccaccagtgacaggtatcccaggagaccagccccgagaacataacagactctcaggaaacatgtcttgaaagatgagcagatgactaagtgtggatgtgttttcctacagctccttccttcctcccctgccacgtgggaccctcatctctgctgcctccttcctttcctgagaggctcagcttgagagaatgagccagtgagaagcttctctagacttggctccaaacatctcccctcccaagacatctgcctgcccacaggctcctgttgctccttcacacagacctggatgccccagagcaaggtcttcattcatggtcctgagcaggtgccatgggattgggctctgggcactgacttaacggcacctccctagaaggcgagaaacatgccaaatctaaacacaccaggactcccatccatcgccttgagactgaccgtaaaccacagacgctctccaggttctcaagagttatcctgccttccagattcctgcctatcccaactccccagccttgttgaggttctctattgcctcttgaatacaaatgcactcccaaagtggttttaagaaaataaaaagattatccttcc

SEQ ID NO: 1051 - DNA, 391 bp, Homo sapiens
ctgcatggctcccttcatccctccttcaagcctctgctcaatgtcactttattaaaggcacctttggcaaaccaccctgtacataatatcaattctcctgtctaccctggcattctaatttctcttatcttgattaatttttatttagcatttattaccataagcattataacgaatacaggcagccctcgcttttcacagcagtgcaagattgcaagaatgactgtgcagccggaaacccaggaaagcaatctccacatccaatcagaaaaacaatgatcatattgtgacctttacaattttttgtcaaaatataggaaactctcatagtgtcagttacaaatgtagaaggcaataaaaaataataaatgaatatttattagtaccctgt

SEQ ID NO: 1052 - DNA, 1093 bp, Homo sapiens
ctacgcaaataaactagaaaatctagaagaaatggataaattcctgtacacatacaccctcccaagactaaaccaaaaagaaatcgagcccctgaatagaccaataacaagttctgaaattgaggcagtaattaatagcctaccaaccaaaaaaagcccaggaccagatggattcacagccaaattctaccagaggtacaacgaggagctggaaccattccttctgaaactattccaaatactagaaaaagtgggacacctccctgactcattttatgaagccagcatcatcctgatgccaaagcctggcagagacagaacaaaaaaagaaaacatcaggccagtatccctgataaacatcaaagtgaaaatcctcaataaaatactggcaaactgaatcccgcagcacatcaaaaagtttatccaccacaatcaaattggcttcatccctggcatgcaaggcttgttcaacatacgcaaatcaagaaatgtaatccatcacataaacagaaccaatgacaaaagccacatgattatctcaatagatgcagaaaaggccttcaatacaattcaacaccgcttcatgctaaaaattctcaataaattaggtattaacggaacatatctcaaaataaaaagaactatttatgacaaccccacagccagtatcataatgaatgtgcaaaagctggaaacattccccttgaaaaccagcacaagacaaggacgccctctctaaccatttctattcaacatagtattagaagttctgtccagagcaatcaggcaagagaaggaaataaggggtattcaaataagaagagaggaagtcaaattgtctttgtttgcagatgacatgattctatatttagaaagccccatcatctcagctcaaaaactccttaagctgataagaaacttcagcaaagtctcaggatagaaaatcaatgtgcaaaaatcacaagcattcctatacaccaacaatagacaagcagagagccaaatcatgaatgaactcccattcacaattggtacaaagagaataaaatgcctaggaatacaacttacaagggatttgaaggacctcttcaag

SEQ ID NO: 1053 - DNA, 1938 bp, Homo sapiens
gcggccgcacaatccaacatggcagcgggggcgggcgagaccacaggacggagggcgcgggggagcgcgccggaaacgcgcggctgcggcccgggagaaacccccccactcggcggcgggcctcgcggcgcgggcccgaagccacgcccccttccggccgaggcgcggaccgcgcggagctaagtggaatcccggttggcttggggcgcaggcttccaacttcgtactctggcctctggcgtctcggctcgtcggttgggtacccgaacccagctactgctgcttgaagagaagatggatggggactcctcgccgtcgctgcgccgccggccttccctgggcggacgtacacctttgcgaagcgtcagtgaggacccagggcccctccttggaatagctcttatttctcaagcgctgcagcgtgaagctcgctctgcgggtccgagaggcctgcgatctgaagactgaaaactgggaagagacgctctaccctgtgctcctcgccggcttcgataggagccgcaggtgcctgggattttctcaaactttgtcccaaacttcagctgtgggagtggaggaacaaacaggcctctcccagaattgtgaaagagatcgccctggtggatgaaacaaaaacaaatgcacttgacttccaccgcctgcctggcgtgtcacgcgggtttaatgtatgtgtcacatttaaattcaaagtattttcttctaagggcctggacacatttcttttctccctgtatcgtgaattggaaaataccttaggatattaaaagttatctaagataaccccctttcttctgtaagttaaatactaaacggcttaagacgaaattttggaatatagagatgatgatgcagactgcagtgaattatcaaatatgcatctcactgttctccacattaaacatatttttgttgcgtaaattcatgttaagacgtctataacaattacactttggtaaaattgttggatgttaacatctctgatagctcccaatagaaatctctgatgtactaaccagactggtaaaccattatcatgcactttgaaaatataataaaatattataattaaagctgccattaatgaaataggctgagcaacaataaatttacaaaggaaaataaaagtggatagccttgggagttctcacataaaatatggagatttcaaagttaaacttgattaattatgttagggtaaaaagtgaattaaagcaacaggactatttataaaataattagatttagaaagcagtcgtagaaatataagcctggagttgcctctgaattacatatttaacaaacctagaagctaaatcagtttgtcttttatcaaaactgcaactcctctaagttgaaagcacagtgacaagagaaagcattacaaattcttgagaaataatagaaattaaagctcttttcaaacctgtgaacaagtatagtaccagaagtataagattcagataggcccaagttgtagttcttgttatgagtcttacaaccctatggactttggacaaattacttctctgcgtctgtttcctcatctgtaaaatgaaaataatttctgtttcatacaggtatagtctaaatagggataattacacctacttcaaagttgtaaaatacacaattacaactagataggaggtataagttctagtgttctgtagcactgtaggatgactatagttaacaatattgtatagtttcaaatagctagaagaaggatattgcatgttcccaaaacaaagacataagtttttgagatgatagatatgctaattaccctaatcactatatgttatatgtattgcaacatcactatgtacccccataaatatgtacagttattgtgtattaaaatttttttaaactaaaattataagacattaaaaaaaggtatcacatgtaaagtac

SEQ ID NO: 1054 - DNA, 2368 bp, Homo sapiens
cacacatttcttgccgaggaaagtgaagagggactcgttctcctgcggggtgagcaacagggaccccacgttggtgaccctccgcggcggcggcggctgctgctggacggagctcatggtttcgccggcggggttgggagtccagggccgtctcctccggcgagtgggcgagagctcgttccccctctcggtgacaggggcggggagaagtggagtcagaggcgccacatctcgcagctcctccggagcggggaggaggacgaggtcgagggaagcaggcgctgacggcgagccaccttcgcgccgcgctgagaaagggaagctcccggcacccgcccggccaggctagggccggatggtcgttgtcctcgcactccggcgactgcgctaaactcccaactcctcccccaaccctcccgcagcggcggcggcggccgcacaatccaacatggcagcgggggcgggcgagaccacaggacggagggcgcgggggagcgcgccggaaacgcgcggctgcggcccgggagaaacccccccactcggcggcgggcctcgcggcgcgggcccgaagccacgcccccttccggccgaggcgcggaccgcgcggagctaagtggaatcccggttggcttggggcgcaggcttccaacttcgtactctggcctctggcgtctcggctcgtcggttgggtacccgaacccagctactgctgcttgaagagaagatggatggggactcctcgccgtcgctgcgccgccggccttccctgggcggacgtacacctttgcgaagcgtcagtgaggacccagggcccctccttggaatagctcttatttctcaagcgctgcagcgtgaagctcgctctgcgggtccgagaggcctgcgatctgaagactgaaaactgggaagagacgctctaccctgtgctcctcgccggcttcgataggagccgcaggtgcctgggattttctcaaactttgtcccaaacttcagctgtgggagtggaggaacaaacaggcctctcccagaattgtgaaagagatcgccctggtggatgaaacaaaaacaaatgcacttgacttccaccgcctgcctggcgtgtcacgcgggtttaatgtatgtgtcacatttaaattcaaagtattttcttctaagggcctggacacatttcttttctccctgtatcgtgaattggaaaataccttaggatattaaaagttatctaagataaccccctttcttctgtaagttaaatactaaacggcttaagacgaaattttggaatatagagatgatgatgcagactgcagtgaattatcaaatatgcatctcactgttctccacattaaacatatttttgttgcgtaaattcatgttaagacgtctataacaattacactttggtaaaattgttggatgttaacatctctgatagctcccaatagaaatctctgatgtactaaccagactggtaaaccattatcatgcactttgaaaatataataaaatattataattaaagctgccattaatgaaataggctgagcaacaataaatttacaaaggaaaataaaagtggatagccttgggagttctcacataaaatatggagatttcaaagttaaacttgattaattatgttagggtaaaaagtgaattaaagcaacaggactatttataaaataattagatttagaaagcagtcgtagaaatataagcctggagttgcctctgaattacatatttaacaaacctagaagctaaatcagtttgtcttttatcaaaactgcaactcctctaagttgaaagcacagtgacaagagaaagcattacaaattcttgagaaataatagaaattaaagctcttttcaaacctgtgaacaagtatagtaccagaagtataagattcagataggcccaagttgtagttcttgttatgagtcttacaaccctatggactttggacaaattacttctctgcgtctgtttcctcatctgtaaaatgaaaataatttctgtttcatacaggtatagtctaaatagggataattacacctacttcaaagttgtaaaatacacaattacaactagataggaggtataagttctagtgttctgtagcactgtaggatgactatagttaacaatattgtatagtttcaaatagctagaagaaggatattgcatgttcccaaaacaaagacataagtttttgagatgatagatatgctaattaccctaatcactatatgttatatgtattgcaacatcactatgtacccccataaatatgtacagttattgtgtattaaaatttttttaaactaaaattataagacattaaaaaaaggtatcacatgtaaagtac

SEQ ID NO: 1055 - DNA, 430 bp, Homo sapiens
cacacatttcttgccgaggaaagtgaagagggactcgttctcctgcggggtgagcaacagggaccccacgttggtgaccctccgcggcggcggcggctgctgctggacggagctcatggtttcgccggcggggttgggagtccagggccgtctcctccggcgagtgggcgagagctcgttccccctctcggtgacaggggcggggagaagtggagtcagaggcgccacatctcgcagctcctccggagcggggaggaggacgaggtcgagggaagcaggcgctgacggcgagccaccttcgcgccgcgctgagaaagggaagctcccggcacccgcccggccaggctagggccggatggtcgttgtcctcgcactccggcgactgcgctaaactcccaactcctcccccaaccctcccgcagcggcggcg

SEQ ID NO: 1056 - DNA, 20501 bp, Homo sapiens
ctttcccatggtttggcatggacattgggggaactctagtaaagctctcgtactttgaacctattgatatcacagcagaggaagagcaagaagaagttgagagtttaaaaagtattcggaaatatttgacttctaacgtggcatatggatccaccggcattcgggatgtacaccttgaactgaaagatttaacactttttggccgaagagggaacttgcactttatcaggtttccaacccaggacctgcctacttttatccaaatgggaagagataaaaacttctcaacattgcagacggtgctatgtgctacaggaggtggtgcttacaagtttgaaaaagattttcgcacagtaggtatcttttactcaaaactgaaaattgatacctgtttttaaatatgagagtaggtttccatctagcatgttccttaattctccctgcacatgcagtgggaaatatgtatccatggttgcctttcacttggggcgttttaaacacgtttatgagatgagtaaaaattgcccggatttggtcatgttgttgcacataatatttggtaaaacttgtttagggctgtactacaaagctacaataaaaaggggatttggggactttaatgaatttggcagtgtacaaagccagatataaatgaagcttgaattattttcactattgtcctacatttacatggtttttggaatattacttattcaaataatattaatcttccagggccatctccttcccaaaccctaagtctggaaaccaatgtcttttggttagtataatggacacctgaatgaaaatctgttacccttttttttctgtttttatgctgttaatcctgccatgttcctgtgtcaaatggggtgatttgaatggatctggcaggagaactatgagtattggtttgagttatgtgctgttagcagtttgccatcttctagtcttttccattagaatgagagttcaaagagtggtttgccaagcttctagtcttttctattagaataaagaatggctctgtttaggaccactgaaatttgtttttcttgaaaatgtaaatgtgaataatttaatttctgaaaatcataagaaaatactgttaatggaatataaaggctgacgtgggaggatcacttgaggctaggagttggagaccagcctgggcaatatagtgggaccccgtctctacaaaaaataaaaaaattagctcagcatagtggcctgtgcttgtagtcccagccactcaagaggctgatgaagtgggaggattgcttgagctcttgagattgaggctgcagtgagctgtgattgagccattgcactccagcatgggtgacagtgagaccctgtctcagaaggaatataaataacttaaatggctcatagaagcgagacccatataatttgaggtaaagatctgtagtactgtatgaaaagaggtgccttgggaacacagaggagtaacaacagctagagagttgaagaggttcccagaggaagtgatatctaagctgcaatgttttataaacggtgtcttataatacgctttttactaacctgaaatgatgaatgtaatcatttcaaactagtactcaaactataatataaagacaggagattaaggtatcagttattaatcagaaattaatctatccgtgggtagattaacaaacagtatgatcattccagaggacatcatgaagtagttatatgcttgcacctatgcatagattgatcatgaataccaaagctacacatgccagattgatatggtatgttctgttggaaaataagataccataaatggcattgctgttggtgacatgaccctccaacatgctaaacaaacacttggtaaaattccaaacagtaagaagtacaattttcccttgctttatgtggtggttcaattcctagcaaatttagtatatatttaaaactacgtgggttgggcacagtggctcacgcctgtaattccagcactttgggaagccaaggtgggcggatcacttgaggttaggagctggagaccagcctgaccaatgatggtgaaacctcatctctactaaaaatacaaaaattagccaggcgtggtggcgggcgcctgcaatcccagctacttgagaggctgaggcggagaatcgcttgaacccacgaggtggaggttgcagtgagccgagatcatgccactgtactccagcctgagtgacagagctagactctgtctcaaaaatgaatgaatgaatgaatgaatggagtgactgaatccataggacgaatacttttgtatttgtatacacagacagataggtaaaataactttgttattctctagcctcagataattataaataattttcctactgccactataaaaatgactggcagaacactcaaagataatgcatagatgggataattttttggtctgcagaaatgtcacacccattaaagatgtctggcatcacaagtccctgcccactaaatgtcagtttggtccttccttcctccccatcatttagaaaactagcagtgaggtgataccaccctcactgaggaccagtggactagatgaaatcccgaaagagattctgacatgaaacaaaatgaaaatgtgggggtcatagaccatttttaatttttgtaaagtaatacaggaaaatcatatagttgagtgtttttgaatgtcatccttttttgtttttgtttgtttgttttaacagattggaaacctccacctgcacaaactggatgaacttgactgccttgtaaagggcttgctgtatatagactctgtcagtttcaatggacaagccgagtgctattattttgctaatgcctcagaacctgagcgatgccaaaagatgccttttaacctggatgatccctatccactgcttgtagtgaacattggctcaggagtcagtattttagcagtccattccaaagacaactataaacgagtgactgggacaaggtagtgacctttttggttgtattgctgcattcacattgttttatacacagaagttatgaaatcagtataataatgtcattttcaccagtaaaagagcatgtatttgcacaacagcaaaaaaaaaaaatatatatatatatatattttttttttttaagtgaaagagggtgccatgttgcccaggctgctcttgaacttctgagctcaagcaatctgcctgtctcggcctcccaaagtactgggattacaggcatgagccactgctcccagccaacagataatgtatttttataagatgtgtatgtcaagactcaaactgaaattattaaatgtttattagtcagcatcagttgggatcaaaatttccataatggtaaagtgaatttttatctagaatgagtctggtaacgttttttctagaatttaactggagcatttacttggaagcaacagtgttctattgattttaaactttattatgtttatattttgttcttttttccaaagcatttttcttctttacctattttttgactttttaatggatattaatatatgtaaacccttaaactgcagtactggggaacattgtaatttattcttataggatgaattaatgtgatttctttttgtgataacattaatgttcccaaatagcccacatacttttctgtaatacctgaaatacgaatgagaaataagatataaaactcatgattcttttatgtattttatcaacttttacagagaggtgaagattccagtttaaggaagaaagattttcaaatactttagattaatttgtgaaaaaaactcattttaattttaaagtagtaattctgtttaaattatacttaattagtactttatttttatggtggttaaaagttcacctctgttgtaattctctatgccaaagaattgtacactgctattgccttcttcggttaactctaaaagaagttcagtctgttaactaaatccaacagtgattcaggggtagaacttgctagaaatttagatgagactagggagcaaaggtttacagtttaggaattagatatgatttcattctgtgagcatatccagaagaataatagaagcaaataaatttctgtaattgacatgttggccagctggacataaatttactcattgtatttatgtgtaggtcatgtgaaatattagtgtatcatattgaattgatttcatccatgtcaggccaagtaaagaagcctttcccaaaatcatttcttggaaacgatttaaaattacaaagatgggcatggtagttcatgcctgtaattctaacactttgggaggccaaagtggaggattgcttgagaccaggagttaagaccagcctgggaaacatagtgagacccccatctctacaaaaatatatacatatatattagtccagtgtggtagtgtgcattgtagtctagctgctgcggaggctggaacaggaagattgcttgagcccaggagttcaaggatacattaggctatgatcatggtcactgcactccagcctgagggacagagtgagaccttgtctcaaaagaaaaattacagattttctctttgtaattaatatggtactgatttttaacatttattcctttttaatgcacacacaacaatttatctttggtaactacagagtgtaaggtattaggtgaagactttgggagagatttaataggtctttcctttcctcatgtttccaccaagtgatttttttctttggtttattctttgatctaacaagtttggttttactaaacaatttttgttgccttcgttatgttatttcagcactcagcattagtcataggttttttttctgtgtgttcattgaatacatgaatgatccacccttttactttagagaaagaatataatgtataaatgcaacttagcaagtttctttattttctttagccttggagggggtacctttctgggtttatgcagtttattgactggctgtgaaagttttgaagaggctcttgaaatggcatccaaaggtgatagcacacaagctgacaagctggtccgtgatatttatggaggagattatgaaagatttggtttgccaggttgggctgtagcatctaggtaagtttaacatttgtgttatttaagttacagaagttaagtaattcaagttgcttatgtttttggaaagcaatgtaacagaaagttgtaagggtgctttctcttatccagtttaggttccaagttttgaacattgatgtcatttaaaaattaagtatacattaagaagtttaccctgagtgcaccttgtaagaaacttttttttttttaatttttgagtgtctttccagtgtttatgcaaatacaaatacatatttttacttttctccccatatacaaaaggtaatctaccattatatggcatactatatatactctaaagtatccatatagaaatctttacatgttgttgaccttattttatacaggtgtaggataaattcccaaaagttggattgcaaatgcatttttgagatattgttaattatgcaaaagagcggtactgtttttcactctcaccagcggtaaatgaaagtgcctgtttcaccagtagagtgctaacttttgcatttttgctaatcagatggagaagtggtatcttaatgtaattttaatttacatttctcctaccaacactggggttaagagccttgcatattttattttctgtgagttattgttcatgttctacttttctgttggattgttatacagttgaatttatcagtcttttcttttatggcttctggatattgattcatagtaagtaagtcttctacattccaaatatataaaggaataaacccttattttcttctgatatgttaatggtggtatttttatacttaaatctttgatttacttatagtttatcttagggtattttgtgagttacagatcatgctttcatttttcaggttttttgtttttttttccagaaggccctaatgtctaataatccatctttatttcactgatttgagatggcttttttacatatgctggcttttcattctgttgatgtaccagcattatactttcagctttatagaggcataaaaagtatgttttaatctctagaagggctagtttcactcctttgcttgattttctgtatgaacttggcaaacattttctctattacaaaaatgtttttggaatctcagtaagtttacatattaacttagggacaaatgatatctttatagtaagtcttgctgttgaagaacttagcttgtctgtttgtttaaggctacttttgtgcctttcacacatttaaaaaggcctctccaaatatgtccatacatggctttttaaattgattcctaaatattttaaatttactgttctgttgtttatcagtcttgtctcccattatgcttcctaaccattgttgcttgtgcaccccaagttctttgtcagggaatccagtgccctttgatagtggactttgtctcactcttcagtaatatctcctgcctctcccttgcatagacgcttcactccgaccaaacatcttgtgatttcatagatgttttcatttctcatttctgtgtgcctttaacctttagttgcctctgcctaagatttttcttctcattttttctggctttttctggtccttttgctctgaaagccctgcctcataccttcttaacttttttctcttaccactgtaataaaagatatttttttgtttgtatttccaaggttagcctttgtttggggttagcctttgtttggattttttccctgttactgttagcgcttctcttgctgtcttttgtatgtaggcctgcattgtccattacagtagcctctagccacgtaaggcacttggcttatgagtgccacatgttgaattgatgatatttggatatattggcttaaatgaaatgtacaattaaaattaatttcacttgtttatttttacctttttaatgtggctaatagaacatatatgaaattatatattactcgtattttatttctattggacagtgctgcactagactaattcactgtttgagggactatctgtctccagcacaaagcttggtatgtcataaatgtttcttgtgactgaatgaaaaagaatttgaagttaaagctgagatacttttggaaacattttgtaattttggctaatttgttttgaatcaggtttaagtgaagatattttggtaatctttgctttcttataataactaactatgctttttttgagatgtcattttaaccttaattctttgaaaggtattactttactcttgcatagattttttttgttagtttgttttgatcttatccctatgtgtttctactttttggtcctaattttataaaaatatccaggttgtagatatatctgttaatacgtaaaatgttgctttttatcagcagatttgactttatttttcatttttctgcagttttgggaatatgatttataaggagaagcgagaatctgttagtaaagaagatctggcaagagctactttagttactatcaccaataacattggttctgtggcacgaatgtgtgctgttaatgaggtaaaaaaacaaaaaacacaaaacttgaattatcaaaaatgtgaattggagtcctatatacacctagcagggcttcttcactttccctaaggaggcctctgggattgagatgtaacccattaaatgccaagactcattaggtatatatgttacgtatccagttgctatattacttttaaagaaagtagcagataattcaaattgaaataggagaaatttattcagaattttttttcagaaaaacacaacctaaatcccttgaggatgtaaaagaaagttctaagcataagacattttgagatactttgtgaaagcattttttttagtcttaattttgcatttggaaggcagctatgctcaccactataccaccagtgcttaatgttgcatttgattagtgaaattcttggaagttttcttactgccctcggcttctttacagtgctgccttgttgcatatggatcaagcagcattgtacagggctatgaaggcattgagacctgttcttcatgatatttgagtggtgtttattgttacaagaaaagtgtgaaaaggatatactgttagattgaccatatagttgggattctttgtttggaagagaatatatatatttaattctagcttccttatataataatagatatatttgcccgtttaatttttataaatatcaaatactttaaatggattgggaagtacgcttttcgaaggaacccttcatttgttcattcattcatttattcattgagtaaatatttactgattaccagatgccagacatcgttctgggtatttggaacatattaatgaagaaaacaaagatctggctttgtggagcttgcattcattctagtgacatattaagtaaattgtgtagtgtgtattaggtgataagtgctatttttttaaaaagagaccatcaaacaggataaagaggattgggaatagggcagagagtggtagaggacaaattgctaagtaattgagtggttaaaggaaagctttattgaaaatgtgattcttaggcagaggtttgaaggaggtgagggggaaactgtgcatgtagacattttggggagaaagcttccagcagagagaacaaatatgcaaatcctctgaattattctgtatttaaatccagaacttggtctcatcagttttttaataacttagaaacttaagtgttagttggttgatggagttactagtagaccatgttgggagctgacaacaatttgagacctttattcttagccctttatgtctaaatttccactgaccaattgagttaacaataatttaggccatggtttacagtatcccaacttatgtacaaagatttctactcaaaagtcagtatagtgtgagagtcgaaataagttttctggtgattcaaacaccagttcccctttgtaagatttcctaatcatagagataatctaagaaaccaaattagtgtggaatctttgcagagagagaatgatttgatgaatcaggcaggggacggagaaagaatgctagaatcctaggggaatgcacatgccagtaccccagtcagtattactctccaattctgtagaatccacagttgcatgtcattgttcaacatgcattgcaatgtgtgggccaagtttgctacttatcaactaaatgcattttatagtacttaccatgttttgatttttttttttaatcacatcagtaatgtgtctccaaatgactttgtaagggggctatttattggccattttcaaaaacaaatctcacctgaaatcatctgctagagtctttctggaacctttttttaaaagtagactttattttttagatcagtttcaggttcacgtaaaattaagtggaaagctcagtgagttcccatataccaccttccatacacacacagcccacttccatcctcagcatcccatagtagagtgatcatgtgttacagtccataaccctgtgcacacatcatcatcacccaaagtccataatttagggttctctcttggtgttacacattttgtggattttggatgatgtgtgcagaactaatttttaaatattcaggattatacagctatatgccaggaatgtagtaggtgttatactaataaagcgtagttgtgtttttttgcattttaaaataaattttaaataaatatttagaaaccttttatattgtaaaatctattatttttacaagttttttctttgttcttttcttttagaaaataaacagagttgtctttgttggaaactttttacgtgtcaataccctctcaatgaaacttttggcatatgcactggattactggtcaaaaggtcaactaaaagcattgtttctagaacatgaggtatggtaggaaaatgttttttgtgaattttaatagcatgttttttaagagacagggtcttgctctgtcactcaggcttgagtttagtggcacaatgatggcttactgcagcctcttcctcctgggctcatcaatcctcccacctcagcctcccaagtagctgggaccacaggtatgcaccactgtgcccagaaaatttatttttattaatattttttgtggagacaggatcactctttgttgcccaggctagtctggaactcctggcctcaagcaatcctttataggtgtgagccaccatgcccagccttaagtagtagaatattggttccttcgcttcagtttcagttgtggggaagagaattacaataacctgttaggcacccccagatttttttgtattcatttactacatgcagttaagttctgatctgagcaattatcagtccacataatgttttggattaacttaacttgaatcattttgtgatcaaagtcaaatggctgtatcattacaaattagtaacagagattcaaattattctgctcttaaaagcttccatgtcttggccgggtgcggtggctcatgcctgtaatcccagcactttgggaggccaaggcggacggatcacgaggtcaggagatcaagaccatcctggctaacaacggtgaaaccccgtctctactaaaaatacaaaaaaaaattagccgggcgaggtggcgggcgcctgtaatcccagcgactcgggaggctgaggcaggagaatggtgtgaaccccagggggcggagcctgcagtgagtcgagatggcgccactgcactccagccactccagcctgggtgatagcgagactgtctaaaaaaaaaaaaaaaaaaaagcttccatgtctcattgtcactgctcacacaatacaaatcagaatggtgtgcccttgtgcaattccacatggcatgcagtgagagtgtcaggcacagccacaggaagttagtttgttttattaagtaaaggggagagggtgcagaattgctgttacagtcctggaagctttagtgtctaaaggccacacttttagaatacgtatttcagtgtgagcctatagtcccagctattcaagaggctgagatgggaggaccatgtgagcccaggaattcaaggccagcctgggcaaaatagtgagaccatgtctctaaaaataataataataaataaaaatacatatttcaaaggtgtgtagacatcaagaatacagattcagaaaattttttataatagctaacaacgcagaaattggtaggtttccaaatattattaaacaaatagattgtgcatagttgtgtgttctcaagtggttaatattatatgctaacttaaaagctgtactacataacagttatttttaaattacacagggttactttggagcagttggtgcacttcttgggctgccaaatttcagctaaagcatcaggtctctctctctgctaataaatgtcatccaagaggaactaaaaccagaggcattattactgcattgtttgtcactgggaaccaaaggataaaagagtagcataagctgctgaatgttgccatattaaaggagagaacttggtaacgtgaagtatttctcattgaaatgctttcccttttgtatatagccagtgttaaatccttaaatgcaatacagcctctgattattgagcttcctcttaaaaagatttttttattttatgtagccaacattgcagtactgtatgctcaaacacaaatcttaaagtatcggaactgtttagcttatgaaaataatcgactctgaatatttgttacaagtctgttttatgtgttttgattactagtgagcagaaaataacataccctgtattcaaaattactgaaatggcaatcaaagatgatcatttttatgtgattttagaaatgttaaggcaatactactaattattgtaggtttttttaacgtatcacccaaagcatgtatgtgatctttccccattagtatctttttctcaaatgccataattaactgaaatactattattaaattttcatgagaattctaaaatgaatcctgggaaatgcacgtttggtgatgttgcactttctgtattttacaggaattagtcaatacatgttgaaatgtttaacattttaagattggaggcttaattactgggagtctgtctaatgaagtcctgggactattgtaatggaatatgatttgagttcactgtgctctttttgtttgtttgttttggtcatatatacattcagaacttttattttaaaacaaccacaataacattaataatagaaaattcatctgtaaatattcacagtctagtcactgaaaaatgggaaaacctctaccatgccttattattaccctttgctgtttgaggagccagaaatagaggtgcagttagaggacggtcactttttccaacaaaacccactccatagccatgtggatttttatccaaaggctcaacaaccagagggaatggtgagacctgataactaaaatactgttattggcaagggtttgaaatgtgtaagaacctaggagggaaaggaagattgagcaacataggaaaaggggaagagaggctgagtgtcaccaaggtccaaactccatttataaaaatactgcaaaaccaggagttgatggtagaaatgcatatgatccatggcaggagtaaatctctccacctcctctaactctctgaaaactctagagttggagcaagtcttccatttgcttcttatccccttaaaagaatgccttccacttcccaacagcccccatcaagggaccccaagaggccaccatgctcttatctcgcactttctttcctattccccttgcctgaatctggagtggggttgagccctctgccttcaaccttaagatttaggaagttctttccccaactgtctaacttggaaaggtagatgagtctgaattttgaagtaacgaatgcaaattccactcagcagaggcaatgttatttatgtacatagggatagtggaatgagttttaatagattctgtccaaaggggtttgttcctcttatttcctctatgtaggaagttgtgtcttaggcaactttatcagtatcatggaaaatgataggcactacaatgaaatggcaggatgccaatatgagatatttcaggaataataagaaatacgtttgtttgtataaaataaactatctcaagaaagttttcaacgacagtgatagtgttcatttgtaagagagagttctagaacttcgatgtccagtgcagtagccactacccatatgtagctgttgagcatttgaaatatggttagtccaaattgagatgtgctctaaaggacaataaaaggttaaatatctcctaattttttgtattgattacatgttgaaatgttaacattggaaatattgggttaaagaaaaatacacaattaaaatgaatcttggccaggcgcagtggctcacgcctctaatcccagcactttgagaggccagggtgggcaggtcacctgaggtcaggagttcgagaccagcctggccagtgtggcaaaaccctgcctactaaaaatacaaaaattagccaggcatggtggtgcgcacctgtagtcccagctacttgggaggctgaggcaggagaattgcttgaacccaggaggaggaggctgcagtgagctgagattgtgccactgcactccagcctgggcgacagagtgagactctgtctcaaaaaaaagaatcatctgtttccaattatttttaaatgtgcttactagaaaagataaaatcacacatggtttacattttatttctattaagacagcaccgttaagaacatagagctttgaggaattgtggtattagaaccaaatctatttaccacagtgagcttacagggagttactcgagatcttaataaaaaattataatctttggcagccttcattatgattttgtgttcttattattccagtacctctagattacatatgggaaaagctaaagagccacagtggtgagatggttgctcactctagcaggtaatttcagtttgaaaggataaaatatatgaatcatagttcacattaaccaaagtacagtgatgaaataacttagactctgaccattccattttttcttaaagattgccctaaatctatagatgctaatacagtatttgccacaggtataaaacttgtagttactgtcattcaattaagattcttatctgtacagatatacaaatcagaaacttttaaaataaattgaactaatggaattttggctccaatatttagtcactacaatggaaatattaaagcaaggaacatgaagtcattgtagggttttaaaatggctactgactgacatgaattcagagtttcaaacagtctaaattctaaaaacttaactttacacgcttttcctcctaaataaccactctaataattcatacattcatatcttcaggtaaagaaaactgaattttaaacaattgaggctgggtgcagtggctcatgcctgtaatcgaatataaggacttgagtataaaatttgaaaactacatggggaaatgtctttatcatgcatctcttgatagtctactgaaaactattaagtaaacctgcggtctgtaaacaaaaaaacccatagtgatacttaccttgtgtaatgtaaacaattttttaagctctttaaagtacatctagatttactggtaatgtatagaagtcaattttatccccaagcatttctacttcctaaaccattagcaagagtctcaaaacaacttcactaaactattggacctccagtgttaacttgccaacataaaaatctgaaaaactttgtaatcactatcaaaaatacaaaagagagaataaattcccaggtaaaaggctttacaaattttggaactattatgcttttgtttactaaacactgatccttttagtaattctgcagtattgcctcagactcccacaaagtttcaaaatagctcatctattagattcctgtaacatttatttgggataaacgtggttttgttgccgttgttcataatagaataaaatatttagctttgatggttcagatgtaatacaaagaaataactaagtttgggcctgagataaatgtggtaaagcaagaatgcagagatgctgtaatgatgagtgagttttatagcattactgaggacctgaaaacttgctgccaaggacactttgaaggttttgttggctggaagaagtgtctctggaatcccactcctagctcttcttgaatatttgaaaagaattagataagggccatggggacccaggtcaccccacctcttcttttcagtttggctacaacattggagtcatcagtgctcctgagacagtcatacaggactttctcagttacactttgaaagagaggtcagaagactctccctctgaggttttgctcatgtccccctggcccttgtctgtggccatcttccccaatggtgatatgattggctcctttctgttgcactctttgtcaaccactttggcaggtgcagttcaatgcttatcataatttgttggctattactggttgccttatgggattctgcagacaagctgagttggttgaaatgctgatcctgggccactagattactggcttgtaatgcggactctgcacaagttttgtgcccatgtacattggagagatctcgcctactcccctttggggtacctttagtgctctcaaccagctggacgtcgttggtattctggagatccagatctttggtctggagttcatcttggggtctgaagagctatgcccagtgatactgggctttaccatccttccagctgtcctataaagtgtagcccttccattttgccctggaagtcgtaagtttttgctcattaacagaaaggaagagtactaatgagatccttcagcaattgtaggggactcaggatgtgtcccaggacatctaggagataagagtgctaggatgatacaagaaaagcaagtcactacactggcgctctttagagtacccagctaccaacaacccactgtcatttccatcatgctccagctctctcagtagctctctggaatcaatgttgtcttctattactcaatgagaatcttcaaggatgcaggtgttgagaagccaatctatagattagtgcaggagtggttaatattatcttcttgactgtagtctctctgtttgtggttgaaagggcaggaaggactttacatatgataggtcttgaggcatggcgttttgttctgtcctcatgattgtttctttgttattaaaggatgagtatggtgggatgagctttgtctgtagtggggctatcttggtctttgtggccttctctgaagttggaccagactccgttccctggaatactgtggccacactcttcagtttgcaatagcagtggctggttgctccaactggacctccaactttctagttggattgctcttcctgaacaattattatctagtttaagtgtgttgttgctttagggtcatggcatgcttatgtatttctgttaccatctgaccatggtactatgccaagttctcttaggggacctgaatctttccagtagaccacatttgagagagtatgagtcaactgggcatagttcccaacaacccaaaatacatacgtacttcactgaagcagatctcatgattccattgacttcatttctaaaattggactttgagcagccaatttctaaggattaaaaagaaactttaatgcattgtagacctctgtacacagaaaaatctttgtaacttttgggcttaattttcattcttaaaaaatctggtaactttttcaaatgcaaccactgtcagtttgctgtgaggctaggcaaacaacacaaggtatagaatttcccatcaccaccaccctgaccccgcgagaagattgccttttaattagagacttgtagaactagtgccttttaagttctacactcatcttttccaaagactattagtaaacttgccatgtaatttgacatggcagttccttgctcagctactctaaataaagttggaaattaggtggtctcttagtttgggtaaagtcagtactattgccagtaatatacatggtaattgaaagcccttaaagtggttcagattatttgccaaatattagactctataaaaatttctgaggttttttttcttttacctttgagtgtacatgtgattgctataatgtaaataccagtcccttaaagactgtttctataagcagaatgatgcagcacaaagtggaaaggttttcctcttattccagcagtattcttgccttcaaagagtagtccatcttgccttgatttttaaggttgttttcttggatggaaagcttaactggatagtaatttccatatgttctttataaccactctgtatattataagcaaagttttttcatattgtatctttttctgttgagcactttatgcattttagtctattgcatttgagaatgtagtttagaaattcactgtttaaagccatgtgaaaactgatagaggataatgaaaatgagtgtacattattttgaatttaacttaactgttttgtggtgggtgtgaacaaaacattagaaatatattatctttttgtgataatactctctgacctcacttaaagtgatctgccatgaggtatccatgatcaagtttatgtttattctaatacctaaggaattcagccaactttgtttctatcatcagataatctcagaaaatagtgtgttttatctatattactgcctcttttcaatatttaagagaataattgtcttctggtttctactgagcctagtaataatcactaaagacctaaaaaaggaattccttctgttaagagtatttggatagcccattcacgataatggtggtgtgaaaatcaatcatcccagcttttctgacatatctaaattttgaataattaatttccacttccaaaaaattcaaatgttttctcaaagcagtcactacttatttgcattattcctgcatattcagtgaatgtgaggtcatatttggtattgtattagaagtagtgttggtcactggtcttgcctctttgaacattatttttatttgtaaaatgagggagttggtttgttatgatgggaaatgagtcagttttcagggtcctgagaaaattgcttcattcatggctgtgtttgagataactaaagtaaattttttttcaggtatttggtgtcatgttttggagttaatatttagtgcttatataattttaagttattacataatttttattggtatatatttgataggtactaggtattggattctcaccaaaccagtagaatggtattctctcttaatatgtgattgcctgtaatggccaggtagatataccttaaagtaatatgaaaggttttatatgtatattaaaatgtttgtacttttaaatctgtaaaggttatctggaatttttactgtgttaacttcagaattatatgggcattatgactttttcattgtacaaaaaattattcataaatgttagaatacagatgttccttgacttacatagggttatgttccagtagacccattgtaaattgaaaataccgtaagttgaaaatacatttaatacgcctaacctactgaacatcccagcttagcctagcctatcttaaatgtgttctgaacacttaacgttggcctttagctgggcaaaatcatctaatacaaaacctattttataatgaagtgtttaatatctcaaataagagtattgtaccacatatcgttatcccaggataatatcagagtacaaaatttgaagtacagtttttaactgaatgtgtattgcttttgccccattataaagttgaaaaaccataagtcaaaccattgttaagtcggactgtttgtgttacatatatttgggattttttagtggccctttttaaaaagctgtttcttatttctgatcattgtgagtggggatagatgtgggaagaaccatgtctctactaaaaatacaaaaaatagccaggcttgttggcacacacctatagtcccagctactcgggagaccgaggcaggagaatcacttgaaccgggaggcagagggcagatcatgccactgtattccagcctgggcaacagagtaagactctgtctcaaaaatgaatgaatgaatgaatgaacgaatgaatgtactatgagctgatactgggatttcaggtaccgcagtttgtgctgaatgatatgtttggggtaaatcagtttttttcttatagaatttcggcgtttttgctgcaactgccactaattttgcatttaaaagaacaaaagaggaatgtatttttcaaaggagtgaatgaggttaaaatcaagattttgaatggtataaatatgcaactaattcagttgtaggatattattaaattttttattgctaaatatgtttctttcatacgttgcagtgcttacagttccaacagctttccaagaaaacatttccatatttgtgttatttgtaaagtatacataaataatgtaaaataatttgggattatttcaactttacattgtatgtctgaatttcatcgatgttgtacctggctcagtcaatagttgtcacaggtattaagccattttggaatttgccacttttttctgggtaacctgttttagtttagtttacagcatttagaaacagaaggtaactttatagaagtaacaccaatatcctagtctgcttgccccgaatataactaatagtattaggatgtaagcaatattaagatggtttttattattttttatacactgtgtgcttttactttttatttaaactacagcaaaaaactgattttttaactaaaattgaatggcgtttatcttaatgaccagttattgaccaaagtgtactcagaagatgttattatgtcccaatctaaggaatcctttaatttggggattaattttacttacacatgccatttcagtttcagttgcctcattctattacatcattcttgtcaagtctaagctttatcatgtctgaattcttttaacactgaatctgtgatgtaaaaatgtatgatgtgccataaattttattcataataaactaagttatagcctattgtaatctgtaaaacatttcttgtaaattacctaatttattttttcatttatgtacagtatcttatgtaaatttgaaaaatgtttgccatggcgcattctgtaaacattcccgtattcttttccttaatgcttatttgcatgaaggtaacttgggttttgcttgtttgtattggataaccattaagccaacttcagtttctctgcctttttttctgtagtttaaccatttctaattttgttcatattctaaatagatgttagaatcatactttttattttctactttctaaataaattatctaagttgtttactatg

SEQ ID NO: 1057 - DNA, 15574 bp, Homo sapiens
agccttggagggggtacctttctgggtttatgcagtttattgactggctgtgaaagttttgaagaggctcttgaaatggcatccaaaggtgatagcacacaagctgacaagctggtccgtgatatttatggaggagattatgaaagatttggtttgccaggttgggctgtagcatctaggtaagtttaacatttgtgttatttaagttacagaagttaagtaattcaagttgcttatgtttttggaaagcaatgtaacagaaagttgtaagggtgctttctcttatccagtttaggttccaagttttgaacattgatgtcatttaaaaattaagtatacattaagaagtttacccctgagtgcaccttgtaagaaacttttttttttttaatttttgagtgtctttccagtgtttatgcaaatacaaatacatatttttacttttctccccatatacaaaaggtaatctaccattatatggcatactatatatactctaaagtatccatatagaaatctttacatgttgttgaccttattttatacaggtgtaggataaattcccaaaagttggattgcaaatgcatttttgagatattgttaattatgcaaaagagcggtactgtttttcactctcaccagcggtaaatgaaagtgcctgtttcaccagtagagtgctaacttttgcatttttgctaatcagatggagaagtggtatcttaatgtaattttaatttacatttctcctaccaacactggggttaagagccttgcatattttattttctgtgagttattgttcatgttctacttttctgttggattgttatacagttgaatttatcagtcttttcttttatggcttctggatattgattcatagtaagtaagtcttctacattccaaatatataaaggaataaacccttattttcttctgatatgttaatggtggtatttttatacttaaatctttgatttacttatagtttatcttagggtattttgtgagttacagatcatgctttcatttttcaggttttttgtttttttttccagaaggccctaatgtctaataatccatctttatttcactgatttgagatggcttttttacatatgctggcttttcattctgttgatgtaccagcattatactttcagctttatagaggcataaaaagtatgttttaatctctagaagggctagtttcactcctttgcttgattttctgtatgaacttggcaaacattttctctattacaaaaatgtttttggaatctcagtaagtttacatattaacttagggacaaatgatatctttatagtaagtcttgctgttgaagaacttagcttgtctgtttgtttaaggctacttttgtgcctttcacacatttaaaaaggcctctccaaatatgtccatacatggctttttaaattgattcctaaatattttaaatttactgttctgttgtttatcagtcttgtctcccattatgcttcctaaccattgttgcttgtgcaccccaagttctttgtcagggaatccagtgccctttgatagtggactttgtctcactcttcagtaatatctcctgcctctcccttgcatagacgcttcactccgaccaaacatcttgtgatttcatagatgttttcatttctcatttctgtgtgcctttaacctttagttgcctctgcctaagatttttcttctcattttttctggctttttctggtccttttgctctgaaagccctgcctcataccttcttaacttttttctcttaccactgtaataaaagatatttttttgtttgtatttccaaggttagcctttgtttggggttagcctttgtttggattttttccctgttactgttagcgcttctcttgctgtcttttgtatgtaggcctgcattgtccattacagtagcctctagccacgtaaggcacttggcttatgagtgccacatgttgaattgatgatatttggatatattggcttaaatgaaatgtacaattaaaattaatttcacttgtttatttttacctttttaatgtggctaatagaacatatatgaaattatatattactcgtattttatttctattggacagtgctgcactagactaattcactgtttgagggactatctgtctccagcacaaagcttggtatgtcataaatgtttcttgtgactgaatgaaaaagaatttgaagttaaagctgagatacttttggaaacattttgtaattttggctaatttgttttgaatcaggtttaagtgaagatattttggtaatctttgctttcttataataactaactatgctttttttgagatgtcattttaaccttaattctttgaaaggtattactttactcttgcatagattttttttgttagtttgttttgatcttatccctatgtgtttctactttttggtcctaattttataaaaatatccaggttgtagatatatctgttaatacgtaaaatgttgctttttatcagcagatttgactttatttttcatttttctgcagttttgggaatatgatttataaggagaagcgagaatctgttagtaaagaagatctggcaagagctactttagttactatcaccaataacattggttctgtggcacgaatgtgtgctgttaatgaggtaaaaaaacaaaaaacacaaaacttgaattatcaaaaatgtgaattggagtcctatatacacctagcagggcttcttcactttccctaaggaggcctctgggattgagatgtaacccattaaatgccaagactcattaggtatatatgttacgtatccagttgctatattacttttaaagaaagtagcagataattcaaattgaaataggagaaatttattcagaattttttttcagaaaaacacaacctaaatcccttgaggatgtaaaagaaagttctaagcataagacattttgagatactttgtgaaagcattttttttagtcttaattttgcatttggaaggcagctatgctcaccactataccaccagtgcttaatgttgcatttgattagtgaaattcttggaagttttcttactgccctcggcttctttacagtgctgccttgttgcatatggatcaagcagcattgtacagggctatgaaggcattgagacctgttcttcatgatatttgagtggtgtttattgttacaagaaaagtgtgaaaaggatatactgttagattgaccatatagttgggattctttgtttggaagagaatatatatatttaattctagcttccttatataataatagatatatttgcccgtttaatttttataaatatcaaatactttaaatggattgggaagtacgcttttcgaaggaacccttcatttgttcattcattcatttattcattgagtaaatatttactgattaccagatgccagacatcgttctgggtatttggaacatattaatgaagaaaacaaagatctggctttgtggagcttgcattcattctagtgacatattaagtaaattgtgtagtgtgtattaggtgataagtgctatttttttaaaaagagaccatcaaacaggataaagaggattgggaatagggcagagagtggtagaggacaaattgctaagtaattgagtggttaaaggaaagctttattgaaaatgtgattcttaggcagaggtttgaaggaggtgagggggaaactgtgcatgtagacattttggggagaaagcttccagcagagagaacaaatatgcaaatcctctgaattattctgtatttaaatccagaacttggtctcatcagttttttaataacttagaaacttaagtgttagttggttgatggagttactagtagaccatgttgggagctgacaacaatttgagacctttattcttagccctttatgtctaaatttccactgaccaattgagttaacaataatttaggccatggtttacagtatcccaacttatgtacaaagatttctactcaaaagtcagtatagtgtgagagtcgaaataagttttctggtgattcaaacaccagttcccctttgtaagatttcctaatcatagagataatctaagaaaccaaattagtgtggaatctttgcagagagagaatgatttgatgaatcaggcaggggacggagaaagaatgctagaatcctaggggaatgcacatgccagtaccccagtcagtattactctccaattctgtagaatccacagttgcatgtcattgttcaacatgcattgcaatgtgtgggccaagtttgctacttatcaactaaatgcattttatagtacttaccatgttttgatttttttttttaatcacatcagtaatgtgtctccaaatgactttgtaagggggctatttattggccattttcaaaaacaaatctcacctgaaatcatctgctagagtctttctggaacctttttttaaaagtagactttattttttagatcagtttcaggttcacgtaaaattaagtggaaagctcagtgagttcccatataccaccttccatacacacacagcccacttccatcctcagcatcccatagtagagtgatcatgtgttacagtccataaccctgtgcacacatcatcatcacccaaagtccataatttagggttctctcttggtgttacacattttgtggattttggatgatgtgtgcagaactaatttttaaatattcaggattatacagctatatgccaggaatgtagtaggtgttatactaataaagcgtagttgtgtttttttgcattttaaaataaattttaaataaatatttagaaaccttttatattgtaaaatctattatttttacaagttttttctttgttcttttcttttagaaaataaacagagttgtctttgttggaaactttttacgtgtcaataccctctcaatgaaacttttggcatatgcactggattactggtcaaaaggtcaactaaaagcattgtttctagaacatgaggtatggtaggaaaatgttttttgtgaattttaatagcatgttttttaagagacagggtcttgctctgtcactcaggcttgagtttagtggcacaatgatggcttactgcagcctcttcctcctgggctcatcaatcctcccacctcagcctcccaagtagctgggaccacaggtatgcaccactgtgcccagaaaatttatttttattaatattttttgtggagacaggatcactctttgttgcccaggctagtctggaactcctggcctcaagcaatcctttataggtgtgagccaccatgcccagccttaagtagtagaatattggttccttcgcttcagtttcagttgtggggaagagaattacaataacctgttaggcacccccagatttttttgtattcatttactacatgcagttaagttctgatctgagcaattatcagtccacataatgttttggattaacttaacttgaatcattttgtgatcaaagtcaaatggctgtatcattacaaattagtaacagagattcaaattattctgctcttaaaagcttccatgtcttggccgggtgcggtggctcatgcctgtaatcccagcactttgggaggccaaggcggacggatcacgaggtcaggagatcaagaccatcctggctaacaacggtgaaaccccgtctctactaaaaatacaaaaaaaaattagccgggcgaggtggcgggcgcctgtaatcccagcgactcgggaggctgaggcaggagaatggtgtgaaccccagggggcggagcctgcagtgagtcgagatggcgccactgcactccagccactccagcctgggtgatagcgagactgtctaaaaaaaaaaaaaaaaaaaagcttccatgtctcattgtcactgctcacacaatacaaatcagaatggtgtgcccttgtgcaattccacatggcatgcagtgagagtgtcaggcacagccacaggaagttagtttgttttattaagtaaaggggagagggtgcagaattgctgttacagtcctggaagctttagtgtctaaaggccacacttttagaatacgtatttcagtgtgagcctatagtcccagctattcaagaggctgagatgggaggaccatgtgagcccaggaattcaaggccagcctgggcaaaatagtgagaccatgtctctaaaaataataataataaataaaaatacatatttcaaaggtgtgtagacatcaagaatacagattcagaaaattttttataatagctaacaacgcagaaattggtaggtttccaaatattattaaacaaatagattgtgcatagttgtgtgttctcaagtggttaatattatatgctaacttaaaagctgtactacataacagttatttttaaattacacagggttactttggagcagttggtgcacttcttgggctgccaaatttcagctaaagcatcaggtctctctctctgctaataaatgtcatccaagaggaactaaaaccagaggcattattactgcattgtttgtcactgggaaccaaaggataaaagagtagcataagctgctgaatgttgccatattaaaggagagaacttggtaacgtgaagtatttctcattgaaatgctttcccttttgtatatagccagtgttaaatccttaaatgcaatacagcctctgattattgagcttcctcttaaaaagatttttttattttatgtagccaacattgcagtactgtatgctcaaacacaaatcttaaagtatcggaactgtttagcttatgaaaataatcgactctgaatatttgttacaagtctgttttatgtgttttgattactagtgagcagaaaataacataccctgtattcaaaattactgaaatggcaatcaaagatgatcatttttatgtgattttagaaatgttaaggcaatactactaattattgtaggtttttttaacgtatcacccaaagcatgtatgtgatctttccccattagtatctttttctcaaatgccataattaactgaaatactattattaaattttcatgagaattctaaaatgaatcctgggaaatgcacgtttggtgatgttgcactttctgtattttacaggaattagtcaatacatgttgaaatgtttaacattttaagattggaggcttaattactgggagtctgtctaatgaagtcctgggactattgtaatggaatatgatttgagttcactgtgctctttttgtttgtttgttttggtcatatatacattcagaacttttattttaaaacaaccacaataacattaataatagaaaattcatctgtaaatattcacagtctagtcactgaaaaatgggaaaacctctaccatgccttattattaccctttgctgtttgaggagccagaaatagaggtgcagttagaggacggtcactttttccaacaaaacccactccatagccatgtggatttttatccaaaggctcaacaaccagagggaatggtgagacctgataactaaaatactgttattggcaagggtttgaaatgtgtaagaacctaggagggaaaggaagattgagcaacataggaaaaggggaagagaggctgagtgtcaccaaggtccaaactccatttataaaaatactgcaaaaccaggagttgatggtagaaatgcatatgatccatggcaggagtaaatctctccacctcctctaactctctgaaaactctagagttggagcaagtcttccatttgcttcttatccccttaaaagaatgccttccacttcccaacagcccccatcaagggaccccaagaggccaccatgctcttatctcgcactttctttcctattccccttgcctgaatctggagtggggttgagccctctgccttcaaccttaagatttaggaagttctttccccaactgtctaacttggaaaggtagatgagtctgaattttgaagtaacgaatgcaaattccactcagcagaggcaatgttatttatgtacatagggatagtggaatgagttttaatagattctgtccaaaaggggtttgttcctcttatttcctctatgtaggaagttgtgtcttaggcaactttatcagtatcaatggaaaaatgataggcactacaatgaaatggcaggatgccaatatgagatatttcaggaataataagaaatacagtttgtttgtataaaataaactatctcaagaaagttttcaacgacagtgatagtgttcatttgtaagagagagttctagaacttcgatgtccagtgcagtagccactacccatatgtagctgttgagcatttgaaatatggttagtccaaattgagatgtgctctaaaggacaataaaaggttaaatatctcctaattttttgtattgattacatgttgaaatgttaacattggaaatattgggttaaagaaaaatacacaattaaaatgaatcttggccaggcgcagtggctcacgcctctaatcccagcactttgagaggccagggtgggcaggtcacctgaggtcaggagttcgagaccagcctggccagtgtggcaaaaccctgcctactaaaaatacaaaaattagccaggcatggtggtgcgcacctgtagtcccagctacttgggaggctgaggcaggagaattgcttgaacccaggaggaggaggctgcagtgagctgagattgtgccactgcactccagcctgggcgacagagtgagactctgtctcaaaaaaaagaatcatctgtttccaattatttttaaatgtgcttactagaaaagataaaatcacacatggtttacattttatttctattaagacagcaccgttaagaacatagagctttgaggaattgtggtattagaaccaaatctatttaccacagtgagcttacagggagttactcgagatcttaataaaaaattataatctttggcagccttcattatgattttgtgttcttattattccagtacctctagattacatatgggaaaagctaaagagccacagtggtgagatggttgctcactctagcaggtaatttcagtttgaaaggataaaatatatgaatcatagttcacattaaccaaagtacagtgatgaaataacttagactctgaccattccattttttcttaaagattgccctaaatctatagatgctaatacagtatttgccacaggtataaaacttgtagttactgtcattcaattaagattcttatctgtacagatatacaaatcagaaacttttaaaataaattgaactaatggaattttggctccaatatttagtcactacaatggaaatattaaagcaaggaacatgaagtcattgtagggttttaaaatggctactgactgacatgaattcagagtttcaaacagtctaaattctaaaaacttaactttacacgcttttcctcctaaataaccactctaataattcatacattcatatcttcaggtaaagaaaactgaattttaaacaattgaggctgggtgcagtggctcatgcctgtaatcgaatataaggacttgagtataaaatttgaaaactacatggggaaatgtctttatcatgcatctcttgatagtctactgaaaactattaagtaaacctgcggtctgtaaacaaaaaaacccatagtgatacttaccttgtgtaatgtaaacaattttttaagctctttaaagtacatctagatttactggtaatgtatagaagtcaattttatccccaagcatttctacttcctaaaccattagcaagagtctcaaaacaacttcactaaactattggacctccagtgttaacttgccaacataaaaatctgaaaaactttgtaatcactatcaaaaatacaaaagagagaataaattcccaggtaaaaggctttacaaattttggaactattatgcttttgtttactaaacactgatccttttagtaattctgcagtattgcctcagactcccacaaagtttcaaaatagctcatctattagattcctgtaacatttatttgggataaacgtggttttgttgccgttgttcataatagaataaaatatttagctttgatggttcagatgtaatacaaagaaataactaagtttgggcctgagataaatgtggtaaagcaagaatgcagagatgctgtaatgatgagtgagttttatagcattactgaggacctgaaaacttgctgccaaggacactttgaaggttttgttggctggaagaagtgtctctggaatcccactcctagctcttcttgaatatttgaaaagaattagataagggccatggggacccaggtcaccccacctcttcttttcagtttggctacaacattggagtcatcagtgctcctgagacagtcatacaggactttctcagttacactttgaaagagaggtcagaagactctccctctgaggttttgctcatgtccccctggcccttgtctgtggccatcttccccaatggtgatatgattggctcctttctgttgcactctttgtcaaccactttggcaggtgcagttcaatgcttatcataatttgttggctattactggttgccttatgggattctgcagacaagctgagttggttgaaatgctgatcctgggccactagattactggcttgtaatgcggactctgcacaagttttgtgcccatgtacattggagagatctcgcctactcccctttggggtacctttagtgctctcaaccagctggacgtcgttggtattctggagatccagatctttggtctggagttcatcttggggtctgaagagctatgcccagtgatactgggctttaccatccttccagctgtcctataaagtgtagcccttccattttgcccctggaagtcgtaagtttttgctcattaacagaaaggaagagtactaatgagatccttcagcaattgtaggggactcaggatgtgtcccaggacatctaggagataagagtgctaggatgatacaagaaaagcaagtcactacactggcgctctttagagtacccagctaccaacaacccactgtcatttccatcatgctccagctctctcagtagctctctggaatcaatgttgtcttctattactcaatgagaatcttcaaggatgcaggtgttgagaagccaatctatagattagtgcaggagtggttaatattatcttcttgactgtagtctctctgtttgtggttgaaagggcaggaaggactttacatatgataggtcttgaggcatggcgttttgttctgtcctcatgattgtttctttgttattaaaggatgagtatggtgggatgagctttgtctgtagtggggctatcttggtctttgtggccttctctgaagttggaccagactccgttccctggaatactgtggccacactcttcagtttgcaatagcagtggctggttgctccaactggacctccaactttctagttggattgctcttcctgaacaattattatctagtttaagtgtgttgttgctttagggtcatggcatgcttatgtatttctgttaccatctgaccatggtactatgccaagttctcttaggggacctgaatctttccagtagaccacatttgagagagtatgagtcaactgggcatagttcccaacaacccaaaatacatacgtacttcactgaagcagatctcatgattccattgacttcatttctaaaattggactttgagcagccaatttctaaggattaaaaagaaactttaatgcattgtagacctctgtacacagaaaaatctttgtaacttttgggcttaattttcattcttaaaaaatctggtaactttttcaaatgcaaccactgtcagtttgctgtgaggctaggcaaacaagcacaaggtatagaatttcccatcaccaccaccctgaccccgcgagaagattgccttttaattagagacttgtagaactagtgccttttaagttctacactcatcttttccaaagactattagtaaacttgccatgtaatttgacatggcagttccttgctcagctactctaaataaagttggaaattaggtggtctcttagtttgggtaaagtcagtactattgccagtaatatacatggtaattgaaagcccttaaagtggttcagattatttgccaaatattagactctataaaaatttctgaggttttttttcttttacctttgagtgtacatgtgattgctataatgtaaataccagtcccttaaagactgtttctataagcagaatgatgcagcacaaagtggaaaggttttcctcttattccagcagtattcttgccttcaaagagtagtccatcttgccttgatttttaaggttgttttcttggatggaaagcttaactggatagtaatttccatatgttctttataaccactctgtatattataagcaaagttttttcatattgtatctttttctgttgagcactttatgcattttagtctattgcatttgagaatgtagtttagaaattcactgtttaaagccatgtgaaaactgatagaggataatgaaaatgagtgtacattattttgaatttaacttaactgttttgtggtgggtgtgaacaaaacattagaaatatattatctttttgtgataatactctctgacctcacttaaagtgatctgccatgaggtatccatgatcaagtttatgtttattctaatacctaaggaattcagccaactttgtttctatcatcagataatctcagaaaatagtgtgttttatctatattactgcctcttttcaatatttaagagaataattgtcttctggtttctactgagcctagtaataatcactaaagacctaaaaaaggaattccttctgttaagagtatttggatagcccattcacgataatggtggtgtgaaaatcaatcatcccagcttttctgacatatctaaattttgaataattaatttccacttccaaaaaattcaaatgttttctcaaagcagtcactacttatttgcattattcctgcatattcagtgaatgtgaggtcatatttggtattgtattagaagtagtgttggtcactggtcttgcctctttgaacattatttttatttgtaaaatgagggagttggtttgttatgatgggaaatgagtcagttttcagggtcctgagaaaattgcttcattcatggctgtgtttgagataactaaagtaaattttttttcaggtatttggtgtcatgttttggagttaatatttagtgcttatataattttaagttattacataatttttattggtatatatttgataggtactaggtattggattctcaccaaaccagtagaatggtattctctcttaatatgtgattgcctgtaatggccaggtagatataccttaaagtaatatgaaaggttttatatgtatattaaaatgtttgtacttttaaatctgtaaaggttatctggaatttttactgtgttaacttcagaattatatgggcattatgactttttcattgtacaaaaaattattcataaatgttagaatacagatgttccttgacttacaatagggttatgttccagtagacccattgtaaattgaaaataccgtaagttgaaaatacatttaatacgcctaacctactgaacatcccagcttagcctagcctatcttaaatgtgttctgaacacttaacgttggcctttagctgggcaaaatcatctaatacaaaacctattttataatgaagtgtttaatatctcaaataagagtattgtaccacatatcgttatcccaggataatatcagagtacaaaatttgaagtacagtttttaactgaatgtgtattgcttttgccccattataaagttgaaaaaccataagtcaaaccattgttaagtcggactgtttgtgttacatatatttgggattttttagtggccctttttaaaaagctgtttcttatttctgatcattgtgagtggggatagatgtgggaagaaccatgtctctactaaaaatacaaaaaatagccaggcttgttggcacacacctatagtcccagctactcgggagaccgaggcaggagaatcacttgaaccgggaggcagagggcagatcatgccactgtattccagcctgggcaacagagtaagactctgtctcaaaaatgaatgaatgaatgaatgaacgaatgaatgtactatgagctgatactgggatttcaggtaccgcagtttgtgctgaatgatatgtttggggtaaatcagtttttttcttatagaatttcggcgtttttgctgcaactgccactaattttgcatttaaaagaacaaaagaggaatgtatttttcaaaggagtgaatgaggttaaaatcaagattttgaatggtataaatatgcaactaattcagttgtaggatattattaaattttttattgctaaatatgtttctttcatacgttgcagtgcttacagttccaacagctttccaagaaaacatttccatatttgtgttatttgtaaagtatacataaataatgtaaaataatttgggattatttcaactttacattgtatgtctgaatttcatcgatgttgtacctggctcagtcaatagttgtcacaggtattaagccattttggaatttgccacttttttctgggtaacctgttttagtttagtttacagcatttagaaacagaaggtaactttatagaagtaacaccaatatcctagtctgcttgccccgaatataactaatagtattaggatgtaagcaatattaagatggtttttattattttttatacactgtgtgcttttactttttatttaaactacagcaaaaaactgattttttaactaaaattgaatggcgtttatcttaatgaccagttattgaccaaagtgtactcagaagatgttattatgtcccaatctaaggaatcctttaatttggggattaattttacttacacatgccatttcagtttcagttgcctcattctattacatcattcttgtcaagtctaagctttatcatgtctgaattcttttaacactgaatctgtgatgtaaaaatgtatgatgtgccataaattttattcataataaactaagttatagcctattgtaatctgtaaaacatttcttgtaaattacctaatttattttttcatttatgtacagtatcttatgtaaatttgaaaaatgtttgccatggcgcattctgtaaacattcccgtattcttttccttaatgcttatttgcatgaaggtaacttgggttttgcttgtttgtattggataaccattaagccaacttcagtttctctggctttttttctggtatttaaccatttctaattttgttcatattctaaatcgatttttgaatcatactttttatttttctaactttcctaaattaattttcttagttgtt

SEQ ID NO: 1058 - DNA, 20507 bp, Homo sapiens
ctttcccatggtttggcatggacattgggggaactctagtaaagctctcgtactttgaacctattgatatcacagcagaggaagagcaagaagaagttgagagtttaaaaagtattcggaaatatttgacttctaacgtggcatatggatccaccggcattcgggatgtacaccttgaactgaaagatttaacactttttggccgaagagggaacttgcactttatcaggtttccaacccaggacctgcctacttttatccaaatgggaagagataaaaacttctcaacattgcagacggtgctatgtgctacaggaggtggtgcttacaagtttgaaaaagattttcgcacagtaggtatcttttactcaaaactgaaaattgatacctgtttttaaatatgagagtaggtttccatctagcatgttccttaattctccctgcacatgcagtgggaaatatgtatccatggttgcctttcacttggggcgttttaaacacgtttatgagatgagtaaaaattgcccggatttggtcatgttgttgcacataatatttggtaaaacttgtttagggctgtactacaaagctacaataaaaaggggatttggggactttaatgaatttggcagtgtacaaagccagatataaatgaagcttgaattattttcactattgtcctacatttacatggtttttggaatattacttattcaaataatattaatcttccagggccatctccttcccaaaccctaagtctggaaaccaatgtcttttggttagtataatggacacctgaatgaaaatctgttacccttttttttctgtttttatgctgttaatcctgccatgttcctgtgtcaaatggggtgatttgaatggatctggcaggagaactatgagtattggtttgagttatgtgctgttagcagtttgccatcttctagtcttttccattagaatgagagttcaaagagtggtttgccaagcttctagtcttttctattagaataaagaatggctctgtttaggaccactgaaatttgtttttcttgaaaatgtaaatgtgaataatttaatttctgaaaatcataagaaaatactgttaatggaatataaaggctgacgtgggaggatcacttgaggctaggagttggagaccagcctgggcaatatagtgggaccccgtctctacaaaaaataaaaaaattagctcagcatagtggcctgtgcttgtagtcccagccactcaagaggctgatgaagtgggaggattgcttgagctcttgagattgaggctgcagtgagctgtgattgagccattgcactccagcatgggtgacagtgagaccctgtctcagaaggaatataaataacttaaatggctcatagaagcgagacccatataatttgaggtaaagatctgtagtactgtatgaaaagaggtgccttgggaacacagaggagtaacaacagctagagagttgaagaggttcccagaggaagtgatatctaagctgcaatgttttataaacggtgtcttataatacgctttttactaacctgaaatgatgaatgtaatcatttcaaactagtactcaaactataatataaagacaggagattaaggtatcagttattaatcagaaattaatctatccgtgggtagattaacaaacagtatgatcattccagaggacatcatgaagtagttatatgcttgcacctatgcatagattgatcatgaataccaaagctacacatgccagattgatatggtatgttctgttggaaaataagataccataaatggcattgctgttggtgacatgaccctccaacatgctaaacaaacacttggtaaaattccaaacagtaagaagtacaattttcccttgctttatgtggtggttcaattcctagcaaatttagtatatatttaaaactacgtgggttgggcacagtggctcacgcctgtaattccagcactttgggaagccaaggtgggcggatcacttgaggttaggagctggagaccagcctgaccaatgatggtgaaacctcatctctactaaaaatacaaaaattagccaggcgtggtggcgggcgcctgcaatcccagctacttgagaggctgaggcggagaatcgcttgaacccacgaggtggaggttgcagtgagccgagatcatgccactgtactccagcctgagtgacagagctagactctgtctcaaaaatgaatgaatgaatgaatgaatggagtgactgaatccataggacgaatacttttgtatttgtatacacagacagataggtaaaataactttgttattctctagcctcagataattataaataattttcctactgccactataaaaatgactggcagaacactcaaagataatgcatagatgggataattttttggtctgcagaaatgtcacacccattaaagatgtctggcatcacaagtccctgcccactaaatgtcagtttggtccttccttcctccccatcatttagaaaactagcagtgaggtgataccaccctcactgaggaccagtggactagatgaaatcccgaaagagattctgacatgaaacaaaatgaaaatgtgggggtcatagaccatttttaatttttgtaaagtaatacaggaaaatcatatagttgagtgtttttgaatgtcatccttttttgtttttgtttgtttgttttaacagattggaaacctccacctgcacaaactggatgaacttgactgccttgtaaagggcttgctgtatatagactctgtcagtttcaatggacaagccgagtgctattattttgctaatgcctcagaacctgagcgatgccaaaagatgccttttaacctggatgatccctatccactgcttgtagtgaacattggctcaggagtcagtattttagcagtccattccaaagacaactataaacgagtgactgggacaaggtagtgacctttttggttgtattgctgcattcacattgttttatacacagaagttatgaaatcagtataataatgtcattttcaccagtaaaagagcatgtatttgcacaacagcaaaaaaaaaaaatatatatatatatatattttttttttttttaagtgaaagagggtgccatgttgcccaggctgctcttgaacttctgagctcaagcaatctgcctgtctcggcctcccaaagtactgggattacaggcatgagccactgctcccagccaacagataatgtatttttataagatgtgtatgtcaagactcaaactgaaattattaaatgtttattagtcagcatcagttgggatcaaaatttccataatggtaaagtgaatttttatctagaatgagtctggtaacgttttttctagaatttaactggagcatttacttggaagcaacagtgttctattgattttaaactttattatgtttatattttgttcttttttccaaagcatttttcttctttacctattttttgactttttaatggatattaatatatgtaaacccttaaactgcagtactggggaacattgtaatttattcttataggatgaattaatgtgatttctttttgtgataacattaatgttcccaaatagcccacatacttttctgtaatacctgaaatacgaatgagaaataagatataaaactcatgattcttttatgtattttatcaacttttacagagaggtgaagattccagtttaaggaagaaagattttcaaatactttagattaatttgtgaaaaaaactcattttaattttaaagtagtaattctgtttaaattatacttaattagtactttatttttatggtggttaaaagttcacctctgttgtaattctctatgccaaagaattgtacactgctattgccttcttcggttaactctaaaagaagttcagtctgttaactaaatccaacagtgattcaggggtagaacttgctagaaatttagatgagactagggagcaaaggtttacagtttaggaattagatacgatttcattctgtgagcatatccagaagaataatagaagcaaataaatttctgtaattgacatgttggccagctggacataaatttactcattgtatttatgtgtaggtcatgtgaaatattagtgtatcatattgaattgatttcatccatgtcaggccaagtaaagaagcctttcccaaaatcatttcttggaaacgatttaaaattacaaagatgggcatggtagttcatgcctgtaattctaacactttgggaggccaaagtggaggattgcttgagaccaggagttaagaccagcctgggaaacatagtgagacccccatctctacaaaaatatatacatatatattagtccagtgtggtagtgtgcattgtagtctagctgctgcggaggctggaacaggaagattgcttgagcccaggagttcaaggatacattaggctatgatcatggtcactgcactccagcctgagggacagagtgagaccttgtctcaaaagaaaaattacagattttctctttgtaattaatatggtactgatttttaacatttattcctttttaatgcacacacaacaatttatctttggtaactacagagtgtaaggtattaggtgaagactttgggagagatttaataggtctttcctttcctcatgtttccaccaagtgatttttttctttggtttattctttgatctaacaagtttggttttactaaacaatttttgttgccttcgttatgttatttcagcactcagcattagtcataggttttttttctgtgtgttcattgaatacatgaatgatccacccttttactttagagaaagaatataatgtataaatgcaacttagcaagtttctttattttctttagccttggagggggtacctttctgggtttatgcagtttattgactggctgtgaaagttttgaagaggctcttgaaatggcatccaaaggtgatagcacacaagctgacaagctggtccgtgatatttatggaggagattatgaaagatttggtttgccaggttgggctgtagcatctaggtaagtttaacatttgtgttatttaagttacagaagttaagtaattcaagttgcttatgtttttggaaagcaatgtaacagaaagttgtaagggtgctttctcttatccagtttaggttccaagttttgaacattgatgtcatttaaaaattaagtatacattaagaagtttaccctgagtgcaccttgtaagaaactttttttttttaatttttgagtgtctttccagtgtttatgcaaatacaaatacatatttttacttttctccccatatacaaaaggtaatctaccattatatggcatactatatatactctaaagtatccatatagaaatctttacatgttgttgaccttattttatacaggtgtaggataaattcccaaaagttggattgcaaatgcatttttgagatattgttaattatgcaaaagagcggtactgtttttcactctcaccagcggtaaatgaaagtgcctgtttcaccagtagagtgctaacttttgcatttttgctaatcagatggagaagtggtatcttaatgtaattttaatttacatttctcctaccaacactggggttaagagccttgcatattttattttctgtgagttattgttcatgttctacttttctgttggattgttatacagttgaatttatcagtcttttcttttatggcttctggatattgattcatagtaagtaagtcttctacattccaaatatataaaggaataaacccttattttcttctgatatgttaatggtggtatttttatacttaaatctttgatttacttatagtttatcttagggtattttgtgagttacagatcatgctttcatttttcaggttttttgtttttttttccagaaggccctaatgtctaataatccatctttatttcactgatttgagatggcttttttacatatgctggcttttcattctgttgatgtaccagcattatactttcagctttatagaggcataaaaagtatgttttaatctctagaagggctagtttcactcctttgcttgattttctgtatgaacttggcaaacattttctctattacaaaaatgtttttggaatctcagtaagtttacatattaacttagggacaaatgatatctttatagtaagtcttgctgttgaagaacttagcttgtctgtttgtttaaggctacttttgtgcctttcacacatttaaaaaggcctctccaaatatgtccatacatggctttttaaattgattcctaaatattttaaatttactgttctgttgtttatcagtcttgtctcccattatgcttcctaaccattgttgcttgtgcaccccaagttctttgtcagggaatccagtgccctttgatagtggactttgtctcactcttcagtaatatctcctgcctctcccttgcatagacgcttcactccgaccaaacatcttgtgatttcatagatgttttcatttctcatttctgtgtgcctttaacctttagttgcctctgcctaagatttttcttctcattttttctggctttttctggtccttttgctctgaaagccctgcctcataccttcttaacttttttctcttaccactgtaataaaagatatttttttgtttgtatttccaaggttagcctttgtttggggttagcctttgtttggattttttccctgttactgttagcgcttctcttgctgtcttttgtatgtaggcctgcattgtccattacagtagcctctagccacgtaaggcacttggcttatgagtgccacatgttgaattgatgatatttggatatattggcttaaatgaaatgtacaattaaaattaatttcacttgtttatttttacctttttaatgtggctaatagaacatatatgaaattatatattactcgtattttatttctattggacagtgctgcactagactaattcactgtttgagggactatctgtctccagcacaaagcttggtatgtcataaatgtttcttgtgactgaatgaaaaagaatttgaagttaaagctgagatacttttggaaacattttgtaattttggctaatttgttttgaatcaggtttaagtgaagatattttggtaatctttgctttcttataataactaactatgctttttttgagatgtcattttaaccttaattctttgaaaggtattactttactcttgcatagattttttttgttagtttgttttgatcttatccctatgtgtttctactttttggtcctaattttataaaaatatccaggttgtagatatatctgttaatacgtaaaatgttgctttttatcagcagatttgactttatttttcatttttctgcagttttgggaatatgatttataaggagaagcgagaatctgttagtaaagaagatctggcaagagctactttagttactatcaccaataacattggttctgtggcacgaatgtgtgctgttaatgaggtaaaaaaacaaaaaacacaaaacttgaattatcaaaaatgtgaattggagtcctatatacacctagcagggcttcttcactttccctaaggaggcctctgggattgagatgtaacccattaaatgccaagactcattaggtatatatgttacgtatccagttgctatattacttttaaagaaagtagcagataattcaaattgaaataggagaaatttattcagaattttttttcagaaaaacacaacctaaatcccttgaggatgtaaaagaaagttctaagcataagacattttgagatactttgtgaaagcattttttttagtcttaattttgcatttggaaggcagctatgctcaccactataccaccagtgcttaatgttgcatttgattagtgaaattcttggaagttttcttactgccctcggcttctttacagtgctgccttgttgcatatggatcaagcagcattgtacagggctatgaaggcattgagacctgttcttcatgatatttgagtggtgtttattgttacaagaaaagtgtgaaaaggatatactgttagattgaccatatagttgggattctttgtttggaagagaatatatatatttaattctagcttccttatataataatagatatatttgcccgtttaatttttataaatatcaaatactttaaatggattgggaagtacgcttttcgaaggaacccttcatttgttcattcattcatttattcattgagtaaatatttactgattaccagatgccagacatcgttctgggtatttggaacatattaatgaagaaaacaaagatctggctttgtggagcttgcattcattctagtgacatattaagtaaattgtgtagtgtgtattaggtgataagtgctatttttttaaaaagagaccatcaaacaggataaagaggattgggaatagggcagagagtggtagaggacaaattgctaagtaattgagtggttaaaggaaagctttattgaaaatgtgattcttaggcagaggtttgaaggaggtgagggggaaactgtgcatgtagacattttggggagaaagcttccagcagagagaacaaatatgcaaatcctctgaattattctgtatttaaatccagaacttggtctcatcagttttttaataacttagaaacttaagtgttagttggttgatggagttactagtagaccatgttgggagctgacaacaatttgagacctttattcttagccctttatgtctaaatttccactgaccaattgagttaacaataatttaggccatggtttacagtatcccaacttatgtacaaagatttctactcaaaagtcagtatagtgtgagagtcgaaataagttttctggtgattcaaacaccagttcccctttgtaagatttcctaatcatagagataatctaagaaaccaaattagtgtggaatctttgcagagagagaatgatttgatgaatcaggcaggggacggagaaagaatgctagaatcctaggggaatgcacatgccagtaccccagtcagtattactctccaattctgtagaatccacagttgcatgtcattgttcaacatgcattgcaatgtgtgggccaagtttgctacttatcaactaaatgcattttatagtacttaccatgttttgatttttttttttaatcacatcagtaatgtgtctccaaatgactttgtaagggggctatttattggccattttcaaaaacaaatctcacctgaaatcatctgctagagtctttctggaacctttttttaaaagtagactttattttttagatcagtttcaggttcacgtaaaattaagtggaaagctcagtgagttcccatataccaccttccatacacacacagcccacttccatcctcagcatcccatagtagagtgatcatgtgttacagtccataaccctgtgcacacatcatcatcacccaaagtccataatttagggttctctcttggtgttacacattttgtggattttggatgatgtgtgcagaactaatttttaaatattcaggattatacagctatatgccaggaatgtagtaggtgttatactaataaagggtagttgtgtttttttgcattttaaaataaattttaaataaatatttagaaaccttttatattgtaaaatctattatttttacaagttttttctttgttcttttcttttagaaaataaacagagttgtctttgttggaaactttttacgtgtcaataccctctcaatgaaacttttggcatatgcactggattactggtcaaaaggtcaactaaaagcattgtttctagaacatgaggtatggtaggaaaatgttttttgtgaattttaatagcatgttttttaagagacagggtcttgctctgtcactcaggcttgagtttagtggcacaatgatggcttactgcagcctcttcctcctgggctcatcaatcctcccacctcagcctcccaagtagctgggaccacaggtatgcaccactgtgcccagaaaatttatttttattaatattttttgtggagacaggatcactctttgttgcccaggctagtctggaactcctggcctcaagcaatcctttataggtgtgagccaccatgcccagccttaagtagtagaatattggttccttcgcttcagtttcagttgtggggaagagaattacaataacctgttaggcacccccagatttttttgtattcatttactacatgcagttaaattctgatctgagcaattatcagtccacataatgttttggattaacttaacttgaatcattttgtgatcaaagtcaaatggctgtatcattacaaattagtaacagagattcaaattattctgctcttaaaagcttccatgtcttggccgggtgcggtggctcatgcctgtaatcccagcactttgggaggccaaggcggacggatcacgaggtcaggagatcaagaccatcctggctaacaacggtgaaaccccgtctctactaaaaatacaaaaaaaaattagccgggcgaggtggcgggcgcctgtaatcccagcgactcgggaggctgaggcaggagaatggtgtgaaccccagggggcggagcctgcagtgagtcgagatggcgccactgcactccagccactccagcctgggtgatagcgagactgtctaaaaaaaaaaaaaaaaaaaagcttccatgtctcattgtcactgctcacacaatacaaatcagaatggtgtgcccttgtgcaattccacatggcatgcagtgagagtgtcaggcacagccacaggaagttagtttgttttattaagtaaaggggagagggtgcagaattgctgttacagtcctggaagctttagtgtctaaaggccacacttttagaatacgtatttcagtgtgagcctatagtcccagctattcaagaggctgagatgggaggaccatgtgagcccaggaattcaaggccagcctgggcaaaatagtgagaccatgtctctaaaaataataataataaataaaaatacatatttcaaaggtgtgtagacatcaagaatacagattcagaaaattttttataatagctaacaacgcagaaattggtaggtttccaaatattattaaacaaatagattgtgcatagttgtgtgttctcaagtggttaatattatatgctaacttaaaagctgtactacataacagttatttttaaattacacagggttactttggagcagttggtgcacttcttgggctgccaaatttcagctaaagcatcaggtctctctctctgctaataaatgtcatccaagaggaactaaaaccagaggcattattactgcattgtttgtcactgggaaccaaaggataaaagagtagcataagctgctgaatgttgccatattaaaggagagaacttggtaacgtgaagtatttctcattgaaatgctttcccttttgtatatagccagtgttaaatccttaaatgcaatacagcctctgattattgagcttcctcttaaaaagatttttttattttatgtagccaacattgcagtactgtatgctcaaacacaaatcttaaagtatcggaactgtttagcttatgaaaataatcgactctgaatatttgttacaagtctgttttatgtgttttgattactagtgagcagaaaataacataccctgtattcaaaattactgaaatggcaatcaaagatgatcatttttatgtgattttagaaatgttaaggcaatactactaattattgtaggtttttttaacgtatcacccaaagcatgtatgtgatctttccccattagtatctttttctcaaatgccataattaactgaaatactattattaaattttcatgagaattctaaaatgaatcctgggaaatgcacgtttggtgatgttgcactttctgtattttacaggaattagtcaatacatgttgaaatgtttaacattttaagattggaggcttaattactgggagtctgtctaatgaagtcctgggactattgtaatggaatatgatttgagttcactgtgctctttttgtttgtttgttttggtcatatatacattcagaacttttattttaaaacaaccacaataacattaataatagaaaattcatctgtaaatattcacagtctagtcactgaaaaatgggaaaacctctaccatgccttattattaccctttgctgtttgaggagccagaaatagaggtgcagttagaggacggtcactttttccaacaaaacccactccatagccatgtggatttttatccaaaggctcaacaaccagagggaatggtgagacctgataactaaaatactgttattggcaagggtttgaaatgtgtaagaacctaggagggaaaggaagattgagcaacataggaaaaggggaagagaggctgagtgtcaccaaggtccaaactccatttataaaaatactgcaaaaccaggagttgatggtagaagtgcatatgatccatggcaggagtaaatctctccacctcctctaactctctgaaaactctagagttggagcaagtcttccatttgcttcttatccccttaaaagaatgccttccacttcccaacagcccccatcaagggaccccaagaggccaccatgctcttatctcgcactttctttcctattccccttgcctgaatctggagtggggttgagccctctgccttcaaccttaagatttaggaagttctttccccaactgtctaacttggaaaggtagatgagtctgaattttgaagtaacaaatgcaaattccactcagcagaggcaatgttatttatgtacatagggatagtggaatgagttttaatagattctgtccaaaaggggtttgttcctcttatttcctctatgtaggaagttgtgtcttaggcaactttatcagtatcaatggaaaaatgataggcactacaatgaaatggcaggatgccaatatgagatatttcaggaataataagaaatacagtttgtttgtataaaataaactatctcaagaaagttttcaacgacagtgatagtgttcatttgtaagagagagttctagaacttcgatgtccagtgcagtagccactacccatatgtagctgttgagcatttgaaatatggttagtccaaattgagatgtgctctaaaggacaataaaaggttaaatatctcctaattttttgtattgattacatgttgaaatgttaacattggaaatattgggttaaagaaaaatacacaattaaaatgaatcttggccaggcgcagtggctcacgcctctaatcccagcactttgagaggccagggtgggcaggtcacctgaggtcaggagttcgagaccagcctggccagtgtggcaaaaccctgcctactaaaaatacaaaaattagccaggcatggtggtgcgcacctgtagtcccagctacttgggaggctgaggcaggagaattgcttgaacccaggaggaggaggctgcagtgagctgagattgtgccactgcactccagcctgggcgacagagtgagactctgtctcaaaaaaaagaatcatctgtttccaattatttttaaatgtgcttactagaaaagataaaatcacacatggtttacattttatttctattaagacagcaccgttaagaacatagagctttgaggaattgtggtattagaaccaaatctatttaccacagtgagcttacagggagttactcgagatcttaataaaaaattataatctttggcagccttcattatgattttgtgttcttattattccagtacctctagattacatatgggaaaagctaaagagccacagtggtgagatggttgctcactctagcaggtaatttcagtttgaaaggataaaatatatgaatcatagttcacattaaccaaagtacagtgatgaaataacttagactctgaccattccattttttcttaaagattgccctaaatctatagatgctaatacagtatttgccacaggtataaaacttgtagttactgtcattcaattaagattcttatctgtacagatatacaaatcagaaacttttaaaataaattgaactaatggaattttggctccaatatttagtcactacaatggaaatattaaagcaaggaacatgaagtcattgtagggttttaaaatggctactgactgacatgaattcagagtttcaaacagtctaaattctaaaaacttaactttacacgcttttcctcctaaataaccactctaataattcatacattcatatcttcaggtaaagaaaactgaattttaaacaattgaggctgggtgcagtggctcatgcctgtaatcgaatataaggacttgagtataaaatttgaaaactacatggggaaatgtctttatcatgcatctcttgatagtctactgaaaactattaagtaaacctgcggtctgtaaacaaaaaaacccatagtgatacttaccttgtgtaatgtaaacaattttttaagctctttaaagtacatctagatttactggtaatgtatagaagtcaattttatccccaagcatttctacttcctaaaccattagcaagagtctcaaaacaacttcactaaactattggacctccagtgttaacttgccaacataaaaatctgaaaaactttgtaatcactatcaaaaatacaaaagagagaataaattcccaggtaaaaggctttacaaattttggaactattatgcttttgtttactaaacactgatccttttagtaattctgcagtattgcctcagactcccacaaagtttcaaaatagctcatctattagattcctgtaacatttatttgggataaacgtggttttgttgccgttgttcataatagaataaaatatttagctttgatggttcagatgtaatacaaagaaataactaagtttgggcctgagataaatgtggtaaagcaagaatgcagagatgctgtaatgatgagtgagttttatagcattactgaggacctgaaaacttgctgccaaggacactttgaaggttttgttggctggaagaagtgtctctggaatcccactcctagctcttcttgaatatttgaaaagaattagataagggccatggggacccaggtcaccccacctcttcttttcagtttggctacaacattggagtcatcagtgctcctgagacagtcatacaggactttctcagttacactttgaaagagaggtcagaagactctccctctgaggttttgctcatgtccccctggccctcgtctgtggccatcttccccaatggtgatatgattggctcctttctgttgcactctttgtcaaccactttggcaggtgcagttcaatgcttatcataatttgttggctattactggttgccttatgggattctgcagacaagctgagttggttgaaatgctgatcctgggccactagattactggcttgtaatgcggactctgcacaagttttgtgcccatgtacattggagagatctcgcctactcccctttggggtacctttagtgctctcaaccagctggacgtcgttggtattctggagatccagatctttggtctggagttcatcttggggtctgaagagctatgcccagtgatactgggctttaccatccttccagctgtcctataaagtgtagcccttccattttgccctggaagtcgtaagtttttgctcattaacagaaaggaagagtactaatgagatccttcagcaattgtaggggactcaggatgtgtcccaggacatctaggagataagagtgctaggatgatacaagaaaagcaagtcactacactggcgctctttagagtacccagctaccaacaacccactgtcatttccatcatgctccagctctctcagtagctctctggaatcaatgttgtcttctattactcaatgagaatcttcaaggatgcaggtgttgagaagccaatctatagattagtgcaggagtggttaatattatcttcttgactgtagtctctctgtttgtggttgaaagggcaggaaggactttacatatgataggtcttgaggcatggcgttttgttctgtcctcatgattgtttctttgttattaaaggatgagtatggtgggatgagctttgtctgtagtggggctatcttggtctttgtggccttctctgaagttggaccagactccgttccctggaatactgtggccacactcttcagtttgcaatagcagtggctggttgctccaactggacctccaactttctagttggattgctcttcctgaacaattattatctagtttaagtgtgttgttgctttagggtcatggcatgcttatgtatttctgttaccatctgaccatggtactatgccaagttctcttaggggacctgaatctttccagtagaccacatttgagagagtatgagtcaactgggcatagttcccaacaacccaaaatacatacgtacttcactgaagcagatctcatgattccattgacttcatttctaaaattggactttgagcagccaatttctaaggattaaaaagaaactttaatgcattgtagacctctgtacacagaaaaatctttgtaacttttgggcttaattttcattcttaaaaaatctggtaactttttcaaatgcaaccactgtcagtttgctgtgaggctaggcaaacaacacaaggtatagaatttcccatcaccaccaccctgaccccgcgagaagattgccttttaattagagacttgtagaactagtgccttttaagttctacactcatcttttccaaagactattagtaaacttgccatgtaatttgacatggcagttccttgctcagctactctaaataaagttggaaattaggtggtctcttagtttgggtaaagtcagtactattgccagtaatatacatggtaattgaaagcccttaaagtggttcagattatttgccaaatattagactctataaaaatttctgaggttttttttcttttacctttgagtgtacatgtgattgctataatgtaaataccagtcccttaaagactgtttctataagcagaatgatgcagcacaaagtggaaaggttttcctcttattccagcagtattcttgccttcaaagagtagtccatcttgccttgatttttaaggttgttttcttggatggaaagcttaactggatagtaatttccatatgttctttataaccactctgtatattataagcaaagttttttcatattgtatctttttctgttgagcactttatgcattttagtctattgcatttgagaatgtagtttagaaattcactgtttaaagccatgtgaaaactgatagaggataatgaaaatgagtgtacattattttgaatttaacttaactgttttgtggtgggtgtgaacaaaacattagaaatatattatctttttgtgataatactctctgacctcacttaaagtgatctgccatgaggtatccatgatcaagtttatgtttattctaatacctaaggaattcagccaactttgtttctatcatcagataatctcagaaaatagtgtgttttatctatattactgcctcttttcaatatttaagagaataattgtcttctggtttctactgagcctagtaataatcactaaagacctaaaaaaggaattccttctgttaagagtatttggatagcccattcacgataatggtggtgtgaaaatcaatcatcccagcttttctgacatatctaaattttgaataattaatttccacttccaaaaaattcaaatgttttctcaaagcagtcactacttatttgcattattcctgcatattcagtgaatgtgaggtcatatttggtattgtattagaagtagtgttggtcactggtcttgcctctttgaacattatttttatttgtaaaatgagggagttggtttgttatgatgggaaatgagtcagttttcagggtcctgagaaaattgcttcattcatggctgtgtttgagataactaaagtaaattttttttcaggtatttggtgtcatgttttggagttaatatttagtgcttatataattttaagttattacataatttttattggtatatatttgataggtactaggtattggattctcaccaaaccagtagaatggtattctctcttaatatgtgattgcctgtaatggccaggtagatataccttaaagtaatatgaaaggttttatatgtatattaaaatgtttgtacttttaaatctgtaaaggttatctggaatttttactgtgttaacttcagaattatatgggcattatgactttttcattgtacaaaaaattattcataaatgttagaatacagatgttccttgacttacaatagggttatgttccagtagacccattgtaaattgaaaataccgtaagttgaaaatacatttaatacgcctaacctactgaacatcccagcttagcctagcctatcttaaatgtgttctgaacacttaacgttggcctttagctgggcaaaatcatctaatacaaaacctattttataatgaagtgtttaatatctcaaataagagtattgtaccacatatcgttatcccaggataatatcagagtacaaaatttgaagtacagtttttaactgaatgtgtattgcttttgccccattataaagttgaaaaaccataagtcaaaccattgttaagtcggactgtttgtgttacatatatttgggattttttagtggccctttttaaaaagctgtttcttatttctgatcattgtgagtggggatagatgtgggaagaaccatgtctctactaaaaatacaaaaaatagccaggcttgttggcacacacctatagtcccagctactcgggagaccgaggcaggagaatcacttgaaccgggaggcagagggcagatcatgccactgtattccagcctgggcaacagagtaagactctgtctcaaaaatgaatgaatgaatgaatgaacgaatgaatgtactatgagctgatactgggatttcaggtaccgcagtttgtgctgaatgatatgtttggggtaaatcagtttttttcttatagaatttcggcgtttttgctgcaactgccactaattttgcatttaaaagaacaaaagaggaatgtatttttcaaaggagtgaatgaggttaaaatcaagattttgaatggtataaatatgcaactaattcagttgtaggatattattaaattttttattgctaaatatgtttctttcatacgttgcagtgcttacagttccaacagctttccaagaaaacatttccatatttgtgttatttgtaaagtatacataaataatgtaaaataatttgggattatttcaactttacattgtatgtctgaatttcatcgatgttgtacctggctcagtcaatagttgtcacaggtattaagccattttggaatttgccacttttttctgggtaacctgttttagtttagtttacagcatttagaaacagaaggtaactttatagaagtaacaccaatatcctagtctgcttgccccgaatataactaatagtattaggatgtaagcaatattaagatggtttttattattttttatacactgtgtgcttttactttttatttaaactacagcaaaaaactgattttttaactaaaattgaatggcgtttatcttaatgaccagttattgaccaaagtgtactcagaagatgttattatgtcccaatctaaggaatcctttaatttggggattaattttacttacacatgccatttcagtttcagttgcctcattctattacatcattcttgtcaagtctaagctttatcatgtctgaattcttttaacactgaatctgtgatgtaaaaatgtatgatgtgccataaattttattcataataaactaagttatagcctattgtaatctgtaaaacatttcttgtaaattacctaatttattttttcatttatgtacagtatcttatgtaaatttgaaaaatgtttgccatggcgcattctgtaaacattcccgtattcttttccttaatgcttatttgcatgaaggtaacttgggttttgcttgtttgtattggataaccattaagccaacttcagtttctctgcctttttttctgtagtttaaccatttctaattttgttcatattctaaatagatgttagaatcatactttttattttctactttctaaataaattatctaagttgtttactatg

SEQ ID NO: 1059 - DNA, 372 bp, Homo sapiens
tgactaccatgtgacatgtgaagtacatatcttttatttaaaaaaaattagcaagaactaggatgaaaaaaatctaagatctggactaaaggagaacatgatgcagtatggaagagatttgaggtgtagtttagctattcaaatgtaggaagtactgctgtcgcaagcacttagaaataagctcctaaagagcatacattcaaggctacacacttaagtctttcatttaaataaactttccaaggagggaaaagtctgtactggagtcaatacacagtgctatataaattttgaaagtggccaggagcagtagctcacacctacaatcccagcactttgggaaaccaaggcaggtggatcacttgaggccag

SEQ ID NO: 1060 - DNA, 1242 bp, Homo sapiens
tttctttctttctttctttttttttttttttgagacggagtcttgctccgtcgcccaggctggagtgcaatggcgcgatctctgctcactgcaagctccacctcccgggttcacgccattctcctgcctcagcctccagagtagctgggactacaggcgcctgccaccacggccggctaatttttttgtatttttttagtagagacggggtttcgctgtgttagccaggaaggtctcgatctcctgacctcgtgatccacccgtctcggcctcccaaagtgctgggatcacaggcgtaagccaccgcgcccggcctggagataatgattatttactgaagggaattgctttttgggtttgttttttatgacaggatctcactctgttacctaatctgcagtgtagtggtgcaaacatggctcaccgcagccccagcctcctggactcaagtgatcctcctgcctcagcctcctgtaactgggactacaggtgcatgctgccacgcccagctaatttttaaattttttgcggagacaggatcttgttatattgccaaggctggtttcaaactcctgttttcaagcgatcccccctacctcagcctcccaaagtattgggatttcaggtgtgagcaccatacctggcaggaattgctttttaaggaggtgcttttctcctgggttacttgaagtgattataggccagttttattgtattaaaatgcttatagaaacaaagattttcatgcccttagtgttgacctatttattgaaaaaagaatgatctgaattttttctcatccctggagcacatggtatttagtaaatgaaaaggggttgcctaccaggccaggaattaaaagatcctgggtcaactctaagcaccctatacgtttttagaaaatatattaataaaactttgaagggccgagcgcggtggctcacgcctgcaatcccagcactttgggaggcagaggcaggcggatcacaaggtcaggagatcgagaccatcctggctaacacggtgaaaccccgtctctactaaaaatacaaaaaaaaaaaaaattaggcaggcgtggtggtgggcacctgtagtcccagctactcgggaggctgaggcaggagaatggcgtgaacccgggaggcggagtttgcagtgagccaagatcgcgccactgcactccagcctgggcaacagagcgagactccatctcaaaaaaaaaaaaaaaaaaaaaactttgaa

SEQ ID NO: 1061 - DNA, 350 bp, Homo sapiens
tttttagaaaatatattaataaaactttgaagggccgagcgcggtggctcacgcctgcaatcccagcactttgggaggcagaggcaggcggatcacaaggtcaggagatcgagaccatcctggctaacacggtgaaaccccgtctctactaaaaatacaaaaaaaaaaaaaattaggcaggcgtggtggtgggcacctgtagtcccagctactcgggaggctgaggcaggagaatggcgtgaacccgggaggcggagtttgcagtgagccaagatcgcgccactgcactccagcctgggcaacagagcgagactccatctcaaaaaaaaaaaaaaaaaaaaaactttgaa

SEQ ID NO: 1062 - DNA, 372 bp, Homo sapiens; identical to SEQ ID NO: 1059

SEQ ID NO: 1063 - DNA, 8056 bp, Homo sapiens
ccccactgccccctcccccaattatccttccccttccctccaggtctcggaggaccccatcctagccctacctgtctcggcccgcaacctccccgaagccgtcggtgccactcccagcccatgtgggcccccgcgggctgcccacgcctgtcccccagctccccgttccgctgggctttaccctcgccaggggtggctttctgagccgcccgctccgtgcccctctctgcagcctctcctgccactcggggcccccgttccccctcccggcggcggggggctgcccccggggggctggcggagctgggccgcgggggccccggggccggcggtgccggggtcatcgggatgatgcggacgcagtgtctgctggggctgcgcacgttcgtggccttcgccgccaagctctggagcttcttcatttaccttctgcggaggcagatccgcacggtgagccagggtgggcgctggcggtgttggggacgtctggcggtgttggggacatctgtccgtggtgctcaggggttttcggagtgtcgggcctctgtttgggcctaggaagggaatcctggctggggcttttctcgccagagaattgggcaccctaagcggggcgaggtgggagacccttgtaatagaaccttgcccttgggggttttgatggggctagatgggacaggatttggcaactcttgggggctaaggtggtgggtggggcgctctttaagaaagctggagttgttgctaaagaaaccaagaggcggggaacacctgtttgatgacagccggatctgtggatgtgggcttgggaaagaccctatttggaacctcggtgtgtgtttggtcctataacaaggaagagacagacttgtgtgtcaagggtggaggtgggtgggagggcatacgttacaaacaaggacgggaacttgggaaagccctgggtgtgaaggagaaacgcctgcggttcccattaagagaattcctccaaaaaggctgtgaaaatttatttcatagtgtgagtgtaggtatctggatttattgaagactaaagcagatgcttttacgatgggcctctttaattgtgggagggagttcaaggtgggtgctgtgcccaccattgaagtttgggtgtccctgtcagaggacagcgctgggcagttgtagggcttgaaaatgaggacgtttgcttctccaggagagcctagcattctgagggaaactgtccggatggacccaagcatctctgggtcccctctcccttagcttttctccaaggtcagaggtccttcagctaacagcactttaaatgaatgtgctcttgtggtctcaccaccaccagggagaatcctcggaaggagtctggggagaatttagtaagcggagacacaggttctgggtctgtactgtggtctgtaccccttagcatacctcaatacaatttgaaagaataaacccaggttggggtgacctggggtccagagaatttccagaaagccctcagtggtagtggtggttgatttaactgatttgggagaatgggtctggccttgggttcattctgtcctttaccagtctgcttccacttcctgatttagggcgcgaacagtacaggatggttgtggctgtaggcagcagcgctattcccccgagacaagagctaggagccaagaaaaatttagggtcagagatgctgggatatgtgtggggctatctcctggggttttcttttcttttctgagacagtctcgctttgtcgcccaggctggagtgcagtggtgccatctccgctcactgcaacctccacttcctgggttcaagcgattctcctgcttcagcctctcgaatagctgggattacaggcacctgccaccacacctggctaatttttgtaattttagtagaaacgggttttcaccatgttggccaggatggtctcaaactcctgacctcaagtgatctgcccgccttggcctcacaaaagtactgggattgagccactgcacccggcctccagcggttttctttatgggttgactgccatcttctctgacgttctcgctccaacacatcagttttctgggcatacggagtggtgcttcagctcatccacaggttacttccaaaattgctctcctttgggcagcactgaccccatagccttttgtcctcccttcccttccaatctggtttctttccccaccccgcttctggcagatgcttggagcattccctacatgcccagcatatgcaacccgagatagcaaggctggacactggagctctttcggacctcatcatggcccagggagaaaagaagggcagatcttgattagggggagagagccctgtgggtttagaagggagaacctggttctggtgtggcttggggcctaggtatgcactgaagagggtttgtacctttgaagaaaagtgtggaagagggaattgccaggctttgtatggggagatgtgcgtattaggaaatagcccctagagaatgcttggagaagcagagctggatgaggtggtgacgtccttgtcccttattcacctctcacttaacggccctgacttcactctggcctcctccagaccctgccagtcagcctggcaggggctttccagtgttctttgcctcaccctgggtaccaggataaggagactgttcagagggctgaggttctctgaacttgtgacttggctagaagggacagaagtggacaggtggctggttaaaataggcctggtggcttctagccagaggaacttagctgacctgacaacctctggattccctcattctatattcccattaaggacccagggatctcctcccgactcctactccatgtgcactagggaatctgaggcacttagttcccaatgatggtagttgctacaaataattcttggggtgaaggttgcgttgtgggggtcgtttctttgttcagtgtagcaggataatatcacagttaagagggcagcttcggccgggggtggtggctcttgcctgtaatcccagcactttgggaagctgaggcaggtggatcatgaggtcaggagctcaagaccagcctggccaatatggtgaaaccccgtctctactaaaaatacaaaaattagctgggcgtggttcgcgcgcctatagtcccagctgcttaggaggctgaggcaggagaattgcttgaacctgggaggtggaggttgcagtgagctgagatcgcgccactgcactccagcctgggcaatggagtgagactcccttctcaaaaaaaaaaaaaagaaaaaaaaagagggcacgttcttgggttgaactgcattggtacaatcctggctctatcacttcattgattctacttttttttttttttttttttttttttttgcgacggagtcttgctctgtcaccaggctggagtacagtggtgcgatctcggctcactgcaacctctgcctcctgggttcaagccactctgctgcctcagcctcccgagtagctggggctatgggcacgcaccaccacgcccagctaatttttatatttttagtagagacggggtttcaccatgttggccaggatggtctccgtctcttgaccttgtgatccgcctgccttggcctcccaaagtgctgggattacaggcatgagccactgcgcctggctgattctactaatatcaactgaccacttttgctactgtgttctaggcactgggaatacagccatgatctagacaaaatcatattctcatggagttttcattttaattagggagagaaacaacttaagataattcctagctgtgtggcctcagtttctttaaccttaaaacaggtataacagtaatattatggttgttttgaggattaaatgaaaaaggccagcgtagtggctcattcctgtaatcccagcactttgggaggcaaaggcaggaggatcacaaggtcaggagtttgagaccagccaggccaatatagttaaaccccgcctctactagaaatacaaaaatgagccgagcgtggtggtgcacgcctgtagtcccagctattagggaggctgaggcaggagaattgcttgaacctgggaggcggaggttgcagtgagccgagatcatgccgctgcactccagcctgggcaacagagcgagactccatctcaaaaaaaaaaaaaaaagaagaagaaataagcctaaattacatacatagtacctgtggtaaatgttcattatgtgctccctgttactgttactggggaaggcttccttatcaagggtttcaatcctcttttgtgctatttgtaggtaattcagtaccaaactgttcgatatgatatcctccccttatctcctgtgtcccggaatcggctaggtaagtatgtggtgggaagcctcctttagggtgaagtaggggctagctctgggtcagaggtcggtcaatattattcctccccactctggttcagcccaggtgaagaggaagatcctggtgctggatctggatgagacacttattcactcccaccatgatggggtcctgaggcccacagtccggcctggtacgcctcctgacttcatcctcaaggtgtgtggtggtggggagtgatgaaatggttccatctgttcctctgcccaaacctggactccctttcccagtcccagagcatctgtctccatccgctggcaccagtgtcagcctggaggagggaagcagatgggtggggcgttttctaggcctgggttgtggtggtcatgacatcccccagcccatcttgttcctctgtaggtggtaatagacaaacatcctgtccggttttttgtacataagaggccccatgtggatttcttcctggaagtggtgagttttggagagctaaagggagctctgtaatgaaggaatggttttagggctctgggaattgggaggatttggaggaaggggtgaggagaaacgggttagagcagttttctagaggggaggctgtgtaatggtaggggagtggctttcagtacttggggttcatttgttgtgctgatgtaattcttttccgctggcatctttctcttttgttcttgcatttctgaatcataagagtgtaggatgcctaacactgagtttggaggtttgggctgggggttcagaatttcgtgtcctcagagacatttgatgttgatggaaggcctgaaggactatgccattgcctttctgaaagataactgtatgtctaaaggaatcatcaccttgtatggcatcgccctctcccccaatctatttcaggtgagccagtggtacgagctggtggtgtttacagcaagcatggagatctatggctctgctgtggcagataaactggacaatagcagaagcattcttaagaggagatattacagacaggtaagctagaatcccagtctaagagtgtggcttgggagggaggccaccagggagggatctgggtttgaggagagtatcctggagagaggcctgctacatgatcccctgccttccagcactgcactttggagttgggcagctacatcaaggacctctctgtggtccacagtgacctctccagcattgtgatcctggataactccccaggggcttacaggagccatccaggtacgggggaaggtggtgagtctggcaggaccagaacatggttctgagaaggtatttttgcaggagacctgggctttggtccttgagagctgggattccctagattatccctagtttgctgtaagtcgaaatgcaagttatttttgtgtttcaaatgagataccatatatgtccatttcataagtcggatttcttatatcatttttttcatttttaaaatttatttttggctgggcacggtggattatgcttgtaatcccagcactttgggaggccgaggcaggcggatcacgaggtcagaagttcgagaccagcctaacaaacatggtgaaaccccatctctactaaaaatagaaaaaactagccaggcgtggtggcgcacgcctgtaatcccagcaactcgggaggctgaggcaggagaatcgcttgaacccgggaggcggaggttgcagtgagccgagattgcaccattgcactccagcctgggtgacagagcgagacgccgtctcaaaaaaaataaataataaataaataaaaataaaatttatttttatttattttttgagatagggtctcactctgttcccaggctggagtgcagtgtcatgatcatagctcactgcagcctcgatctcccaggctcaagtgatccttctgcctcagcctctcagtagttgggactacaggcgtgcaccaccatgcccagctaatttttttattttttatttttttttgagacagagtctcgcactgtcacccaggctggaatgcagtggcgtgatctcggcttactgcaacctccgacttccaggttcaagcaattctcctgcctcagcctcccaagtagctgggatcacaggcacctgccaccacgcgcagctaattttttgtatttttagtagcgacggagtttcaccacgttggccaggctggtcttgaattcctgacctcgtgattcgtccgctttggcctcccaaagtgctgggattacaggcgtaagccactgcccttggccaattttttgatttttagtagagaagggatctcattatgttgcccaggctggactcaaactcctgagctcaagtgatcctcccacctcggcctctcaaagtgttgggataacaggtgtgagccactgcgcctggccaagtgtgtttcaagtgaggcacaatggcagtaagcttgactagaagcatcaataggtatgagatctggtgattaaaacttagtttcggagcataaaccaggaaagttttacttaggttgttgacttccggtagtgggaggcatatatttttaacaataattcctccttccctccaagaagagaaaaacaccgtctctcttgaattctgtttcttctcatctgcattttcacccaccctagacaatgccatccccatcaaatcctggttcagtgaccccagcgacacagcccttctcaacctgctcccaatgctggatgccctcaggtaagggaagtgggctctggacacttggatatctcaagaaaggaggaggtgggggatcctcagagggaataaaaaaggtttgtcctgttttaactctgttcccttaagaatttaacatttggacccaggtcgtcttacttcaaagctcatcactttagctagtaggctgtgggcaaattgaacctatctaatcatgaatatggtgataatttaggtcccacatctccagtgatgctgccttacaagagtgttgtgagggtatgaactataaggtactctaccaatgcaagttattgtcaccccaggttcaccgctgatgttcgttccgtgctgagccgaaaccttcaccaacatcggctctggtgacagctgctccccctccacctgagttggggtgggggggaaagggagggcgagcccttgggatgccgtctgatgccctgtccaatgtgaggactgcctgggcagggtctgcccctcccacccctctctgccctgggagccctacactccacttgggagtctggatggacacatgggccaggggctctgaagcagcctcactcttaacttcgtgttcacactccatggaaaccccagactgggacacaggcggaagcctaggagagccgaatcagtgtttgtgaagaggcaggactggccagagtgacagacatacggtgatccaggaggctcaaagagaagccaagtcagctttgttgtgatttgattttttttaaaaaactcttgtacaaaactgatctaattcttcactcctgctccaagggctgggctgtgggtgggatactgggattttgggccactggattttccctaaatttgtcccccctttactctccctctatttttctctccttagactccctcagacctgtaaccagctttgtgtcttttttccttttctctcttttaaaccatgcattataactttgaaaccaaag

SEQ ID NO: 1064 - DNA, 1405 bp, Homo sapiens
gggccgtgggggcctccggggccggcggtgccggggtcatccggatggtgcggacgcagtgtctgctgggactgcgcacgttcgtggccttcgctgccaagctctggagcttcttcatttaccttttgcgggggcagatccgcacggtaattcagtaccaaactgttcgatatgatatcctccccttatctcctgtgtcccggaattggctagcccaggtgaggaggaagatcctggtgctggatctggatgagacacttattcactcccaccatgatggggtcctgaggccgcagtccggcctgttaggcctcctgacttcatcctcaaggtggtaatagacaaacattctgtccggttttttgtacgtaagaggccccatgtggatttcttcctggaagtggtgagccagtggtacgagctggtggtgtttacagaaagcatggagatctatggctttgctgtggcaggtaaactggacaatagcagaagcatccttaagaggagatattacagacagcactgcactttgcagttgagcagctacatcaaggacctctctgtggtccacagtgacctctccagcattgtgatcctggataactccctaggggcttacaggagccatccagacaatgccatccccatcaaatcctggttcagtgaccccagcgacacagcccttctcaacctgctcccgatgctggatgccctcaggttcaccgctgacgttcattctgtgctgagccgaaaccttcaccaacatcggctctggtgacagctaatccccctccacttgggttggggtgggggggcgggggggaaagggatggcgagcccttgggatgccatctgatgccctgtccaatgtgaggactgcctgggcagggtctgcccctcccacccctctctgccctgggagccctacactccacttggagtctggatggacacatgggctgggggctctgaagcagcctcactcttaacttcatgttcacactccatggaaaccccagactgggacacaggtggaagcctaggggagccgaatcagtgtttgtgaagaggcaggactggccagagtgacagacgtacggtgatccaggaggctcaaagagaagccaagtcagctttgttgtgattcgattttttaaaaaaactcttgtacaaaactgatctaattcttcactcctgctccaagggctgggctgtgggtgggatactgggattttgggccactggattttccctaaatttttcccctctttactctccttctatttttctctccttagactccctcagacctgtaaccagctttgtgtcttttttcctttcctctcttttaaaccacacattataactttgaaaaaaaaataaattagaaaaaggacagcaaact

SEQ ID NO: 1065 - DNA, 1333 bp, Homo sapiens
gggccgtgggggcctccggggccggcggtgccggggtcatccggatggtgcggacgcagtgtctgctgggactgcgcacgttcgtggccttcgctgccaagctctggagcttcttcatttaccttttgcgggggcagatccgcacggtaattcagtaccaaactgttcgatatgatatcctccccttatctcctgtgtcccggaattggctagcccaggtgaggaggaagatcctggtgctggatctggatgagacacttattcactcccaccatgatggggtcctgaggccgcagtccggcctgttaggcctcctgacttcatcctcaaggtggtaatagacaaacattctgtccggttttttgtacgtaagaggccccatgtggatttcttcctggaagtggtgagccagtggtacgagctggtggtgtttacagaaagcatggagatctatggctttgctgtggcaggtaaactggacaatagcagaagcatccttaagaggagatattacagacagcactgcactttgcagttgagcagctacatcaaggacctctctgtggtccacagtgacctctccagcattgtgatcctggataactccctaggggcttacaggagccatccagacaatgccatccccatcaaatcctggttcagtgaccccagcgacacagcccttctcaacctgctcccgatgctggatgccctcaggttcaccgctgacgttcattctgtgctgagccgaaaccttcaccaacatcggctctggtgacagctaatccccctccacttgggttggggtgggggggcgggggggaaagggatggcgagcccttgggatgccatctgatgccctgtccaatgtgaggactgcctgggcagggtctgcccctcccacccctctctgccctgggagccctacactccacttggagtctggatggacacatgggctgggggctctgaagcagcctcactcttaacttcatgttcacactccatggaaaccccagactgggacacaggtggaagcctaggggagccgaatcagtgtttgtgaagaggcaggactggccagagtgacagacgtacggtgatccaggaggctcaaagagaagccaagtcagctttgttgtgattcgattttttaaaaaaactcttgtacaaaactgatctaattcttcactcctgctccaagggctgggctgtgggtgggatactgggattttgggccactggattttccctaaatttttcccctctttactctccttctatttttctctccttagactccctcagacctgtaaccagctttgtgtctttt

SEQ ID NO: 1066 - DNA, 2295 bp, Homo sapiens
gcgcaaattcgtggatcgctccgctgaatccgcccgcgcgtcgccgccgtcgtcgccgccccccgtcccggcccccctgggttccctcagcccagccctgtccagcccggttcccgggaggatgaagttcgtgtacaaagaagagcatccgttcgagaagcgccgctctgagggcgagaagatccgaaagaaatacccggaccgggtgccggtgaggacagtagccagggccgagggcgcgggacgcttacgctgacgccacagcctggccttggatctgggacaggcagcgcagggatcaggctgctggctgtggtggggttggcagcgagcctgaaactgctgtccttgggacccaggatgaaaggagtggggtagtggtggatgtggggttgagagggatgtggacaggagagagaaaccttagcatttgaggccttagagagtttgacagcctgagcttcaaatggtcatccccccagctagctaaggttgcgagattgaatcactagtcgacccaaacaagtcacctccgtctaagatagttgtttatggtgacgccctattgggggatggatcctggatatttaaatgagctccagtcagtgaggtcaggatctctgggactcagtgctgcaccgcgtgtacaaagacaaagagatgaatctggggtagatttaggtgctaggaatattgtttcttgagttcttgacaggtgcagcttcggggctgcattccttctgtctcctaattttcatctctttatcaggtgatagtagaaaaggctcccaaagctcggataggagacctggacaaaaagaaatacctggtgccttctgatctcacaggtgggaacctgatccaagactcaggcttgcttcctgtgggtgggagtgcagtctctgcgggaggaggctccacctagcagctgttcttttgagggcatttttgacctctgtgactttcttgcatcttgtatcttttgcagttggtcagttctacttcttgatccggaagcgaattcatctccgagctgaggatgccttgtttttctttgtcaacaatgtcattccacccaccagtgccacaatgggtcagctgtaccaggtatggtgactgggaagtggtggaggctttggagaggaatcttggaagagcgtgaggggaagaaagtgttgttacatcagtagttttggactagcttcctggcttgccttaaagtttcataatagccgtgggttgggggtttggacagaacagtaggagtagagagaaggaaagagaacagtgagctagagaaactatctgttcgggactcttcccagtccccctccccattccaaagcagcagaaaacagtttgaggcctttttgcccaggactgcagagattatactgctcgtgtggtaggccttggagtcagtgaaggagtcaggcaatggtttgtggttctagaagaacgtgtctgggtcgtggttggtttaagttactggagcccagttgctgaacagttttctgctttcatcccaggaacaccatgaagaagacttctttctctacattgcctacagtgacgaaagtgtctacggtctgtgaagctgctgcccctgagctggaggggggtctcattctacaaagagagaggtggcccccctttcttgacctcctcctccttcaagctcaaacaccacctcccttattcaggaccggcacttcttaatgtttgtggctttctctccagcctctcttaggaggggtaatggtggagttggcatcttgtaactctcctttctcctttcttcccctttctctgcccgcctttcccatcctgctgtagacttcttgattgtcagtctgtgtcacatccagtgattgttttggtttctgttccctttctgactgcccaaggggctcagaaccccagcaatcccttcctttcactaccttcttttttgggggtagttggaagggactgaaattgtggggggaaggtaggaggcacatcaataaagaggaaaccaccaagctgaactgaattttgccttgtgttgctcccctcgtcccgctgattttaagtctttccaaggtgtcagtgggtttcagtggtggggaaagaagagtactgggtacaagctggagggatagaagtatattttggtttattctgttcatgttgggcttttccctgtctgcaaaaagagggtgcttttgttgtgatggaatggaatactgaggattatttcttgaaactttagttttataacacgcatgtgaaactaaatgttaaaaatgctca

SEQ ID NO: 1067 - DNA, 286 bp, Homo sapiens
gtcctttggacggtaaaatggcgcctgtcagagtgggaaacccagctgcagaggctgcagccccggtccccagcggctaaaggacccccgagctcggggagggggaggccgctccggcccagcgctctgcgccctccggctccccctccccctccttccctgctccttcgctctgcaggcccgttctccgctgccgcggccctttgcgcgccgctgcccccgccctccccgttcctgcgagcagccccctagcgcgcctgcgcagcgggccactctctgctttccc

SEQ ID NO: 1068 - DNA, 274 bp, Homo sapiens
ctgccccctcccccaattatccttccccttccctcctggtctcggaggaccccatcctagcccgacctgtctcggcccgcaacttccccgaaggcgtcggtgccactcccagtccatgtgggcccccgcgggctgcccacgcctgtcccccagctccccattccgctgggctttcccctcgccaggggtggctttctgagccgcccgctccgtgcccctctctgcattctctcctgccacttggggcccccgttccccctcccttcggcggggg

SEQ ID NO: 1069 - DNA, 274 bp, Homo sapiens
ctgccccctcccccaattatccttccccttccctcctggtctcggaggaccccatcctagcccgacctgtctcggcccgcaacttccccgaaggcgtcggtgccactcccagtccatgtgggcccccgcgggctgcccacgcctgtcccccagctccccattccgctgggctttcccctcgccaggggtggctttatgagccgcccgctccgtgcccctctctgcattctctcctgccacttggggcccccgttccccctcccttcggcggggg

SEQ ID NO: 1070 - DNA, 1425 bp, Homo sapiens
gggttgaccaggacagttccccatctcagctggtgattgggacagagactccttgttctcctgcacacctggctcatggctcttacttggtgtgtggaggaaggaaaaaagaagaccttcaccatcacctctccccattcatttattcacagcacttaccaccctctacagtgatccccttggaagatgagctccatgagggcagggattgtgtgtatcttgtatatcttcatatgctcagtgtttgcacaatgtctggtgcacagcagggtttcaatgtatgaatgtgtgggatagtggcctggtagggcaaggttacacagcaagtccaggacagagcctaactctggagcctcagactatattctgccagtccaagcaagggaatcctgatttcggcctgagagatgcatcttctagcaaagtcaacatcgggatggctcctgagctttccttctcagaggggtgggcttcctacttccccctcccagactcccagtctgcaaggccaagatccatttccaggagaaaatcaatatttgatgttcccttccttccccagcattggttcagagctctggaaatctcctgccctccttacaccacgcagataggaaatctctcctttggcttttaccttctgggcccaggccacccactgctgccgtggattttagccatattattttctgctgctctgagtgccaacagcacactcagcactagacacaaacatgcaaagacgcagctcttgcctgccccaaaggcttgctgggtaagttaaacagactgtaaaatgcagacttcaaatatgccagaggcaaaggcatttaaaattctcagcgggggctggaaagagaacgcttttaaagtcttttcatttctccctcttcctttgccttcagcatcgagctgcctgtgagttgtcctgcctcttctgtctatgaccatttaaggatgactggtccttttgtgagcaggcaaaggctttgagatgttggctgtgaatgtggacagctcttcccaggctgcctgaaagagcggaggcagctaaacttggcaacaaatatttccaagcctgctttccattccatcatgcagaatggtgttattaaattgatgattcaggatctcaaaccagcagagctctgtcctttgggagaaacataatccatatgacaggtttcaccagggctatttctgaataccagaaaccagtgcctaggacagtgtagatcagagagcaggtgagctgggtgctttgggatcagaagccacctgggccagagttttgcaggtaacactctgcagtggacatgcctgggtcaacctggtgcaccgagtccatgctgtgttcactttggtgtccttttctcctgacaagacttaacctggtgccatatctctcctaaagcatgtgaggag

SEQ ID NO: 1071 - DNA, 1857 bp, Homo sapiens
gcagacgtggtagaaagacagtaagagaggaacaactagaagtggagcccgaagatgtgactgaactgctgcaatctcatgataagacttgaatggatgaagagttacttaagtggtttcatgagatggaatctactgctggtgaagttgctgtgaacattgttgaaatgacagcaaaggatttagaatattacataaacttggttgggcagagtttgagaggattgactccaattttgaaagaagttctgctgcgggtaaaatgctgtcacacagcatcacatgctacagagaaatctttcatgaagagtcaatcaatgagacaaacttcattgttgtcttatttcaataaattggcacagccactctagccttcagcaaccactgatcactcagttcagcagccatcaacatcaagacaagaccctctaccagcaaaatgattacaacttgctgaagggctcaggtgatcattagcgttttttagcaataaagtatttttagatataatgctattacatgcataatagactagagtacagtatagtgtaaacctaccttttatgtacactggggaaccaaaaaattgtgtaacttgctttattgtgatacttgctttattgtggtagtctggaacagatcctgcagtatccccaaggtatgcctgtatctcagtatagtcgtgatcataggtcttgcttttctttagattcactgttggtgttatcatccatgaatttcaccttcctgtgtacaaacatctcttattacagtaggagaatatgggagtcagaaaaggaagacatttattgtcattatgaactcagaaatatgttttctagtgatcattgaaacaactgagattgatattttccagccacggcagttttggtgattgaaagcaagatctgttttttaaaaattaaatataagtttgcacattcttccagggaagggcacgggataatttcccttgccattttattttgaaaccagctttgttgtggtggcacgctccatgagatttgctccatgagatttgctccatgttgcaccacacacagtctttgctcctgtgtccttccatagaaaaaaacagtgtggggaaggatttggtttgtcttaccctttaatcttctgctcctacagctctctggtctgatagttcactattttggtaataaagtcagatatagttcaaatcctgtctggtctattatttcgtgaaatttttgaacttttccatgctttggcatcctccaagaactttttcctttctaagttttactgttttaatataaatggactcctatgtgaacacttttagactggagtctaaaagtggcctaataggcttgctatttttagagaaggagaaagttgccttttgttctctctgtgcttttcacctcccacatgttctttagagttttttttcctgttctggtcttagtagtgacagctttctaattccagaggctttttcctgggtctgtttctggctcattttgtctcatactcaaaatttttaatgtcagaattgggctgggctcttctctttctattatctgtaaacattttgggtttcttttcctctaatttatgaaaattatgaaatgtacacataaaggagtggaaaatatattcacccagtttaaagaagagtaataaaatggacattcgtatatacccaccatccaggttgagaaatagaacattgcttgtgtctcagaagctctctgtgttcctctcagtcacgttcccccaccccaactcctacccaaggtaacctctcatcctgaagcttacatggaagatttgggcatttttattaaaaaaaaaaaaaagaaagaaaaa

SEQ ID NO: 1072 - DNA, 6193 bp, Homo sapiens
agaaacagcagcagtcgtgcagtatcatccacagcctgagagagagtcagcagcaagagctgagccggtttctgaacccgcccagcatcgagaccacccagcccagtgaggacacgaatgccaacagtcaggacaacagcatgcaacctgaggtatgggcacgaggcgtcctctgtcccaggacactctgtgggcttctttcttttaataaaaataaataaaatgggtgctggtcagatcattcaaacaaggtgacaatatttctaataggaatattttcattaaaaaaaaaaaaggcaacggaaatccattgatccagattatgtctatgtctttgccatcttggatgcagttgaggttatttaaaaagagtctgactcatatgaatgccaaaaaaagtgaatgccctgaacttcataattctgtagttttatttttgtctaaagagttaacatcagctctaagggctgcatttgaatctgggtatattacatggagtatggtttacaggaagctctgccctaaatattttcctcccttctctaaagtcatagaaatttgcagtaaaatcagtgaaaatgtttgtaattagctttcaacctccttaaataatcagactcattgaagatatatcctttcctggttgggtatcagaagaacatatggaattcaggacaattggcttgaggagtttctatttattaagtcacagcatattttcattttcaaactctatgtatgtgtctatataaaaaagtacaaggagttatcagcgtcctggagagtcctgtgctgtgagaagcagctggctgggaggacctgcccctttatgaggcagcaattacgatttgaggttaacaacgtggagctgatcccgtgctctgtgcagagcccccagcagcaccaggctccatggtgtgcagcaacgcagccaggggccagagtacctttggaagcctaaggctccacggcccagcagggtgctccaggaggcccactggtgccatagctcagttttcagtagatctcatgttttgggctccccagcctttagaaatcatctgccaccgactgcagggacttctgcggagttagtcaaccaaggggcaaggggaggcatctgcagtggccttgccactggtcaccctgaagatggttggcaatgtctcgcatgggagagggaggcaggctgaagtcaggacagacagtgagacagggctaatgaggttggggaaagtgatgatttcagagccctctgtttttagatgaaaaagcctaagaaagaaagaggtgacaaaaaaaaaaaaaaaaggatactaaagagatgtgaagaccaaggcttttgttaggaaagggagaggtgacaggtgaacctgagaacaggtgaaatgtgtgggaagtcttggcatctctctttctttcactgtagcttagattgttatcagctccatcctccaccagggcccatcatacagctttgcctgcagagaactctttccctgaagctctaagtgtggatctccaggctggtgacagtagactgcccccgcccagcccgtccccactgccccaccttccttcctgcagttccccttccttaccccctggtttgccagcgaagatatgaagggaaacaatgacattctcaggcatggaggggaacgaaccatgggggttacccaggacaagatgtcccagaaagagtggtgtgtccttcagcagggcgtgcagtggtggctcttattcttctgtaacccttaatacccattttcacttttccccattgtggacactctgagtccatgttgttcttcccacttgtcctcctgccatgtgttttcctttcttatagtaaaaggaggagagcgcagggttaaaaagacggtaactgtgtgcttctcctcccatgcagacaagcagccagcagcagctcctgagccccacgctgtcggatcgaggaggaagtcggcaagatgcagccgacgcagggaaaccccagaggaaatttgggcagtggcgtctgccctcaggtaggtccatccaggcatttctccagcgatcgaggcattttaaaggtatttactctgtttgtgtgttttgggtcttgcctttcaaaatgcaagtctgcatctacagttgtttacagacagcaacataatgaaaaatgtagtcttgtcaaaaacattgtcccccaaaataacttctctaaatatgacttacattagcccccattttccgggtacatttcaggctatcatggttgagaagccagcacctatgaaaaagacaagattcagcaagagggagaaatttccaagggctttctgtgtgcctcaaggcatgctcaaacatgggcaaaagtattcaactgaagagggagtgggcagatgcaatcattcagaaaatgccacgaagttctcaaaaaagggacaggcccccgatttctctcagcacactttgcagctgagccggtcactggctttaggcaagctgctttacctccatacaataacaaacaacaacaacaaacacttacgtagtactcactgtatgccagtcactcttctaagtgcattacttgtgttctctcattcaatcctttaataaacagtcccattattttccatattttactgattcagtaagagaattttcttctatgagcttcttctctatagggttttggaaagccaggataatcccattaagagcactcaggaatggagggagagcaatgctccccacagcccagtgtccttgtacatgtttttttctatagataactaagttcatgctaaagcaggagctttataatgctctttaactgtgccccaacttcagcccaattgaaaggagaagatgtgtagcatatgtgttccacaaagcagatgacagcacagcttacattttgaggctgacgatgttcagtgggtcttcactgggactaccaccaaggaaagtatcccctttcatatccaggaacttatttttcagagatcagagaagatctaggttcctcctgattcaaacacagcagagaatgacagcatcaagacaacgtagatggtggtgccaggtcataaattacaagctgagtcggttcaattttatcctgtaggcaattaggagctagcaaagatttctgagcagtatgtgacttttggaatctgtgctttaggaagttgacttggcagcaaaggagggaattgtctatgacagagcctggaggcaggttacaagctggaggaagttaccgtggtgtgagcacaaggcaacaaaggcatggacagagctgggggccagatactgcagggacagataggagaggtgacctggggagaatgcacagtccttggtattcatttaaatggacaaaagaaatgatgctgtcaaaagtacttccattgggccaggcgcagtggctcacccctgtaatcccagcactttgggaggccgaggcaggtggatcatttgaggcctggagttcaagaccagcctggtcaacatggtgaaaccctgtctctactaaaaatacaaaaattagctgaccggtagtggtgtgcacctgtaatcccagctgcttgggaggctgaggcaggagaatcacttgagcctgggaagcagaggttgtggtgaaccaagattgtgccgctgcactcctgtctgggtgagagagtgagaacctgtctcccaaaaaaaaaaaaaaaaaaaaaaaaaaaaaagtacttccactggtccatgcctaggtggtccccaccaaaaacggtgatcgtgaaatagacatgctcttggggtcaggctgagtttgaggaggcagaggagaagaaaaatagtattttgagggggcagcaacaatgtcacaggtgtcatgctatgcactttcctaagtcatctcatgtaacctgttttaatcctgacaatagtctaattaggacattttcattgtcttcatcttacaatggaggaaacttgggttcagagacgtgaagttgcccatagctacatatccacaggttgcagaggtgggtcccaacaccatgactgtgaggccccagaaccacacctttcctcccataccctcactgcatcccccctcgcctttactgtgggtcacactctccttcctttttgttttttttattgcatatgctaatgaatgcacaggtttctgtgacacttaatagttcccgaattggaatttttttagtgattttctagtttttttaattatttcaaaatgaaaggggtgagcagcacgtttttttcccaaatgacatcattagttgtccatgagcacaattaaaaaaaaaatctatcgtgaacataaagaatcaagtcctgaaaaggatgtttacttagcatctgtggctaggacacgttagccaaaagtatcactgatgggaatatcatgggtttttaggagtgattacaatagggtgaagcaataccaagtggctcataggactcattaattccacagccccaaaaccaataagccattcagtgtcctcagtcaacttacggtttggaggaaggacaaccatgaaatctgtcgtgtgcaaaatgaaccccatgactgacgcggcttcctgcggttctgaagttaagaagtggtggacccggcagctgactgtggagagcgacgaaagtggggatgaccttctggatatttaggtggatgtcaatgtagatgaatttctagtggtggaaaccgttttctaataatgtccttgattgtccagtgagcaatctgtaattgatctataactgaattccagcttgtcacaagatgtttataaattgattttcatcctgccacagaaaggcataagctgcatgtatgatgggttactatcaatcattgctcaaaaaaatttttgtataatgacagtactgataatattagaaatgataccgcaagcaaatgtatatcacttaaaaatgtcatatattctgtctgcgtaaactaaggtatatattcatatgtgctctaatgcagtattatcaccgccccgcaaaagagtgctaagcccaaagtggctgatatttagggtacaggggttatagctttagttcacatctttcccatttccactagaaatatttctcttgagagaatttattatttatgattgatctgaaaaggtcagcactgaacttatgctaaaatgatagtagttttacaaactacagattctgaattttaaaaagtatcttctttttctcgtgttatatttttaaatatacacaagacatttggtgaccagaacaagttgatttctgtcctcagttatgttaatgaaactgttgcctccttctaagaaaattgtgtgtgcaagcaccaggcaaagaaatggactcaggatgcttagcggtttaaaacaaacctgtagataaatcacttgagtgacatagttgcgcaaagatgttaagtttcttaagaaaccttttaataactgagtttagcaaaaagaataaaactatatagctcaatttatttaaaaaaatctttgcatgtgtgatgttatcattggcttcatttcttacccaaggtatgtctgttttgccataaatcagcagagtcatttcattctgggtgatcctaacacaccattgctacgttagatttgaaatgacatctctgttaaaagaatcttctatggaaataatggtgccctgcaaaatcttcctttgaactcacaggttagggatcacacaacttacttaatcgttttttgtttttgttttttttccttatatgtcaatggcccatgtcctccgggaaaattagaaaagcaaaatgattacaaagtgctgttagatttcttgtgctgggccagccaagtagaagtggacttgacttggacctttaactattttattacagattggacatttgctgttcagatgttttttaacagagggattatctcagaatcctgtgacctccaggttgttttataatctatttttctctatttaacattcctcagatagataggcaaataggacattccttctgtgtcacagaagtatcgtggtagtggcagtctacagtttatatgattcattgtaactatgagataaagaacaaccagtcatgtggccaaaaggattagatttgatttgatgttcacttggagtttactttttgtacatacaagataaaataaatattggatttgtaaaataa

SEQ ID NO: 1073 - DNA, 336 bp, Homo sapiens
ctctattttttttttttttttttttttttttttgagacggagtcttgctctgtcacccaggctggagtgcagtggcacgatctcggctcactgcaagctccacctcccgggttcacaccattctcctgcctcagcctcccaattagctgggactacaggtgcccgccaccatgcccagctaatttttttgtatttttagtagagacggggtttcaccatgttagccaggatggtctcgatctcctgacctcgtgatccacccgcctcggcctcccaaagtgctgggattacaggcgtgagccaccgtgcccggcccactctattcttaatggtact

SEQ ID NO: 1074 - DNA, 3602 bp, Homo sapiens
gaaggttagaggatttgccctctgaccttggcccagccacttcccccctgtggagcggggttctcaccctgctttttccctggctctgatggagcctttgggctgcagtcgtgcttgagatgaatggccctgcccccgtatcccttcctccatgagctgctgcggcccacctagttgtgacacctggtggtggtcttgtaattgcccacggcttttccctctcctctggactctggcctcctccctccctctgtggccctagcacctggcagatgcattggatgggcagcaggcactcagaacatgtttttataatgaattcctcaaccaagggaactaagggacttgctgtttccttactgtcacctgggattctttttgctgttttctactttctgattgcttttcttcctgctaattcagtttcatcttctcttttcagatgaagctactaaacttatacataaagagggcccagaccaccaacagcaacagcagctcctcctccgatgtctccacgcacagctaatggcagtacctgtctcttgtgtagacctagaagcaatcggtggtgcctctcagagacctttccccacccccttcatcggctgcccagtcagtacaaggaggcccacaaatatttattacaatcagtattttggtcccttccagcttttctgtagaatcttactggtattgaatgtaaaggaagcaaggcctgtattgcagtcttcatacaaaacaaaaggaataagaacagaaaagagccatactgaaacatgtcttgtacagcctgctgagatggcgaaaccctgtgtgtggggtgcagtttttaaaaatcagagcgctctagccactacttggtagaaagtagcattttttttttcagttaataacatatttgggggtggggtggggtgttactttgtgttcttcctccttagcctattttcttgtgcgtatggtctgtgtggggcccctttcacagctgacaccacgaaaggtgatatatctttaagttgtgttctgagacctactaaaaatgggaatcaagtcttggcaagaacagtctgaagatggccttttaacaaacgctgggaattttgcttgtcatatccagactggaggccgactgccctggctttcagcgtagaattgggagtgcaccctgacagtctccttccagctctccctaatcgactccaccgacaaggtccctaccccagagcttccatgcaaaggaattcttcaagtttaaatctggacacaaaaataagataaatgtatggcatcatttagggatgcctgagatggcagttcatgaagcacagaagataaagaagaagtctttcatctttactgctgagatccttgggaacactgttgtcatgggggctctgccaagaccctcatctctgggctacacggtgattcagattgagcaccaacttgtttcctcccctcaaagttctgcctaagccgttcagttctaacatggtctcagttaatctggtaaatggcatctttaccatcttagttctgacttctcagtttaatgtgggattaagagccaagaaaagcctagagagactggatatcacaattttttttaattttataaactgaagtagttccttgaatgtctgttgatgaaatagtcactgtttaaggaaaaaagtaattatgaggtgtagcagattgcagaaaaacaggattagaaacacacttaaaaagaacacacatttagagtctctcttcctcctcagcgaaccactaggccccctttttaaaaacacctttagagcctaattactccaataaaagtaactagaggtttggagtctggttaaataaattctgagtaaaattcttaagccaaatggaaattcttaatgcaatcatgaggacttctattgtctcttactgttgtattagatcctataaattgaactgatttttccataaggaaaatgcttcttttgagattaattctaataacgtatttgctattgcagtgcagagcccaccgcaactgctaggactgaaagcagaggctgggtgccagagcacgtgattcttaacatcatttccacagacccctctgccctgaccctctgcattggatgcaggaagctgggaaagactgatgttgatttggaaacatgggctgaaaatgaaggccccatagtgcataggaacagtaaagccagggtgctgacgtgtgtgtgtgtgtgtgtgtgtgtgtgtgtgtgtgtgtggtgttgtgtgtgtttgtgcgtgcaccctacacatgtgtggtacctcactgctgctgtttagggaacttgagggacgcgtttcaaggggttgggtattactgacgagctttggctcaaaatatagcaggaccaggtcttttgttgataagtactgtttgtttattaatatgtcattaatggtatttcttttttacactctacaagtgaattagggagtctcttgttgacccctttgttgcaggaatgtgcgtcgggctaggttatccatgagtttctttattcctaatgcagttagaaagacctttctccttgagctctttgactcccagaaggtaccccagtccccagtgtacttagaaaggatctcgaacattgctggacgtcctcatagtactcacaaagggctagccttgaatgtcactcgcccagtcttcagtctcctgacttagagatacaatcacgtcacaggtctcttggcctcaatctgaaaactgctgccgccgcgccgaggagactcgcatgccgccaccacctcactgggagggcgccgagcccaccgtcgccccctagaccctgacagctgcagctgccttgccttgccgccgcctccctgcaggcccctgttccaatgaaaaacagaacacaaaagagcagagcacctaagcctgtctctgcctccctgtctaccggactggccagggcccaagacccccgctgctccactgcggggctgggcgggctgactccctgcttcctccaagctgctgcctcccctgcagccagggtctgggcagggtgcagccggtcctcggggcacgcagcttccttcaagtacactgtgtgtgcttcccggacctgcggcgatgcacgggcctgccttttctatgcgcctcactagcttaccaccctgtgcaggtaatgcaactgactttgtctcatcagtctttttctttccctgccaccctttatttatcaagcgtaatgttacactttaaaggacagcaaataagaactttgtagaatcccaccaggactttgctaacaataatgtttggaaataaagaagtgctctgaaacaaatatcagccccaccaaaatagttatgttggcactgtgttcacacgcatgtccccacaccccagcgttgggtgcgtctttttgctttttgcccttttccggggcgggcggcctcttcatgttacatccatatctgtatttatatcttatttgtctcactttcaagtgtatcatggcaaatgtacagatttttttgttaataatgtgctaggatttgctaaaaaagaaaaaaaaaaaacccttttgagtttgccctagaataaatga

SEQ ID NO: 1075 - DNA, 651 bp, Homo sapiens
gcattctgggaggccaaggcgggcggattacttgagctcaggagtttaagaccagcctgggcgacgtggcaaaaccccgtctccactaaaaatacaaaaattagctgggtgtggtggtgtgtctgtaattccagctacccaggaagctgaggtgggagaatcgcttgagcccaggaggcagaggctgcaatgagccgagatcatgccactgcactccagcctgggtgacagagtgatactccatctgaaaaatatatatattaatatacatttttttaaaaaggtcaatctggggaaatatcacatctgatggagtcgcctgggagctggttgctgtgccgtgtgtgcggtgacaaggtgggaggtgagacgcatgggctagaatcccacccacgctcctggaggccatgtgagcaggggcctccctcatcggctccatttcctcaactgatcagtgagaacagtggctccccggaaaggtagaagcaggagaaagcctcagcctcgaatcccgagatgagctggagagccgctgagagcagccgggctcccctgcatgcctgcggttcttctctgctggtcactggggactggagcaggctaggcagggcaagagcagagcctctgggagcaaatgcacaacatcacagg

SEQ ID NO: 1076 - DNA, 1933 bp, Homo sapiens
ccggtgagtgtgtaactcttgggaagattcttttctaaatacaggtataaagagaaggtggagggtgcgggtgcatggaagaaatactatgtgtgaagcagattcaccttcctgggaccggtgacatggtggtgacagtcaatggcttggacagacagacgggcacagtggcatttggaaccctctttggtgccctcccattctctctggaattgtttcaagtctgctggttttcaaacaagaaaagacctttctggccatagggagaatagcagggagtctatgttttggtggttacattggaaacatcttaagcaagatagggaaagttgattttaggcacacatgtaccctccttgacagcaggaactcagacttcaatcttgggggtctaagaccagaatattttccttctgccagaaaagaatcttgcacatatactcctgaaggcatgagtgtgtggtccatggcaagaaatagctaaaggctgctttccaggacccaaagccccatttaatgcaagaaccagagaagtgttctaggccattagtggacaatgtcatgtttggagaaagataacaacacaaataatgtaacctttccttaaaaggcagaactcaatccattttatttgatgcttattctaaccctaaccctgggtcacctggaatgaagaactctatgaataatatttgattttacaacgtgttatggttatgtgaaaactaaacatttgccttttataaagactgacaaaatataaatctttattctaaccctatccccaaaactagccaggccacaccccagatgttcttattgactattggaaagatagaaaaggcgttgtgttttttgtttttttgttgttgttgtcattgttgtttttttcagaagaccagtgtctcagttctgtcttagtagtaccacacccgtaaccgtgttttaaaagtttgttttagcctagagacagatcatacgagttcaacaatgtacagtgtgattgaaaagacaggttggtgtctatttttctttttaaaatatctgaatgtgtatttgtaatacgtaaaggtaaaaaaaaatagtgccaaaaatgtgcaaggcatctcattacagctcatgtacgtctgtttttataagatcaatattaaaacccattgggattaaatatttttgaataggatacactcttgagaaactcgagaatggactgagccttcctacaagccactctttgtttttaaaacagtggggaaatacgtttacagagattgtgagcttcagagaatgcatgtgatggtgtgtattacatgctaattcatataagctgtatctgtcagctaccaccctgtgctttaaaaatgcacacactcaaccctctttagcttggagctcagctttttgcttttttttttttttttttgtagaattatttagctaacataagtattctgattgctacctgatggccattcttacttagtttcatagatgtgctttaactatgatcctttgaagctcaccccttggagagcctacagaacctcaggctgatagctttgaagactgccaaacagcccagaaggaagcaaagcatctgcataatcaggagggttgtataacaagtagtgatttggcaaatatgtgggtagctttaggctgaggcacgggcctcaggcaaaaatgcccttcgagtgaatccgaagggcatgatcttcctatgtccttgactaggcatgacgagtcatttgaggtcagatattatttgagttgttcagcacccccaaaggtaggcattctcctgggaaattttcatttccattttatcgccaaacaaaataaaaagcaaaacaaactttctaagctagaataatgaaattaagtcattttccactttgtatatattgatgctaataaaacagatgaaaaagac

SEQ ID NO: 1077 - DNA, 269 bp, Homo sapiens
gacactctttcaatgatgaaagagcgtgtaatttatgctacaagtgccagaatcgatcaccatgttcagcaagccactctcaagctgtggtaataaacacacaggcttgggaggcaccagcggccccactcatacagtgacaaggatttgtgatgggaaaaaggaggtgccatgtttggaaatgcaggggtgagctctggtttctcctggggttctggaatatctcagccctcaaaatagaggagactcaagtgcactgattctctaaa

SEQ ID NO: 1078 - DNA, 176 bp, Homo sapiens
gtggcagcatcacctccacggctctttcaagctgccctgttcacacagctttcttcagagagcagcccactcctgaggcactggatgggattgtcctggctgaaaccagagacacagccctgcccttggaaacagaggagaaaacaccttgattctgggacctatggtagcagtgg

SEQ ID NO: 1079 - DNA, 2883 bp, Homo sapiens
tggaactgtccctcctaggggggaatgttcactttttttttgtcaggttttatgggggggcaggaacatggtttctggaaaaaatcccattcttttggaattggcccattccttttgggcaaaattttcaaaaggctggatcaacttggtgtggtatctctgatggcttagagtaatggcaatgagggtctctgttgtgatgtcactgagtactttctggggtgcttctgggcaccccttatgatgtcacaggaagcagttcctcagaggttacttcctgtgaacataagggagcaggtacttcctgtgatgtctcaatgagttcttccttgaaggtcactttggtgatatcatgggaaggtgtacttccggtgatgcctagaggtcacgtcctgtgatgtcattaggctgaagcatgtacttcctgtattggacagtgaccagtctctgacctgccttctccctccacacccttctttggtgggtgttggcctgggggtcttcctaggaagagaataaggcacgggacttggatccaatctggaggactctaacggaaaaaaaccaatattgtcagggtcatctccattcaaacacgtcaagtctgcgaactcgccctggagggaggggtgggagatggacctagtgcaaactactgttaaagacctcccttcccacccctgccttttgtgtgcatgcctgtgtctgcgtggctttgtttcattgaatcgggtgagccaagtgtgtggtggctctgtcaggccagtatggccaggtgtagagttcagtgagccatagtagggtcccttgggccagaatgcttcgtgtggtctgataggttagattggtttggtggcttccagcaagctggcatacttcggtgatgtctgatggatcagaatgttttggtgtgctcaccaggggctctggagaactagaatgttctgatggagtctgacaagccaggcggccttgagagttggtttaggagtggctccctgagtgctgtggctgtggtcagctctaaggacctgttggcagactgagatttcagggcctgacaaccatgtagactaggatagctgagacctccctctacccccacccatctccctctcttccttggagaccacctccactttctccaacccaaagcagggcgcccagtgccctggttccatcatcagcatctctgggggaggggcgccccatgcccaccctctcccccatttgtccgcctcctaggtcttccaaacccttttcttctctatgactttgggggaaatccagcctccttgtctctctcctaaaaaaggagggaagaaaagccacagagacaattcctgcccctaaagcctaggagatccctctcccttgctagagagccacccccaaatcaaaatgtgaaaatccctagaaagcaatagccttcgaggtaccttgcactgaatttcccaccccagcccttccacccgatgggaggctgtaacttgggcactggggtgactttttccatgcccttgtcatctccagggtgggaggcaggccccacttcccctcccctatcccccacttcccattgttgttgccccacccctaatctccagactgaacccagatggagatctgagtgccaaaacaattcttgatgtaactttgtacatatcttctactaccgttgggggctcttggggttagaggtgggggcggctctgtgggccattgctcccctccacctctcaaaagaccttacagtatttcacagtatctctacccgcacgcgagtattacagtatctagctggaatatccccctacagccccccaggaccctatgaggaagggaaggagccagggagagtgaagtaaggtctgggactggggaggtgggatctgaatgaactcatttgcatatcatttgcatcctccgcttggcagccgctttctacaaactcattcactggagtctgggtcccaatcagccgggtccaggactcctctcacacagacacatctccggaggctgggcctcctgaaaagtgtttgcttggggtgtctgtgtaacaacccctccctattcatatttcttggggaccccctacccagccagccagggtgatctgaaaggtatactttgctagctcagtgagctagttcactcaccatgttggtgagcagagagccacacctttccccattttaccttgggaaactcactccaccatctttgccatctcttgaaagtcccttctgcaatctgacctcaatcttttgtgctgcagtttgtccagaggggacacagatgtggggtcagggatgaggattattgaaaaacccatcatctctttttttttccccgtctccctattagccaatccgatctcagagtctctgagtggcctccttgcacccttctcttcagcacccagtaggtgcttaataagtgtttgctgcattggattatctccctattccttctcatttgccctctagcttcccataccttctccaagtgtcttcctccctttctttgtctggctccctatgactttctatttttttttcctccgtgtggttcccattgttttctgtcctgtctctatcttagtctttgtctgtcttcctcctttcctcaaatgtctcaactctctctccccaatttccccatttaaaaaaaaaaaaaagtgccaaacttccttggaactgagccgctctggggggagaggaccttggatagaggggaggaaatgggaccatttctctttgaggaggtccctaagaggcattgcaaaagtgtggacatggagctaaattgggtcccccttccacagccctcccaccctgagtttttcttagaatctttgtaagaaaaaaaaaaaaagac

SEQ ID NO: 1080 - DNA, 350 bp, Homo sapiens
caacttacccctatccttttgggtccccccaaattccaccagccaaggagaatcccacttgccaacttcctggcaaatctatggaaactggggaggaggagacaagctcaactcctcctctgctagcccaaggggcggtaccaactggattcaagagaaggacctcaaagctcctatgagaagagggggttcgatgtgccaaattaacctccttcatcccccatctcagggggctctgagccaacctgcccagccaccttcttctgccctgtcccagccacctctacatgggcaaggaggcttcactgcaataattagtaggggtggtgatcagaagacaatgattttgc

SEQ ID NO: 1081 - DNA, 555 bp, Homo sapiens
ctggggaaggggggcaagacgttggtggagtaccaggagctgacgggcgctcgcatccagatctccaagaagggcgagttcctgccaggcacgcggaaccggcgggtcaccatcacgggcagccccgcggccacgcaagccgctcaatacctcatcagtcagcgggtcacctacgagcagggagtgagggcctcaaacccccagaaagtgggatgaggcctgtggtgtgtgctcccacccttttctctcctcccatctcctcctcttccctctcctcctcccccccaactcctgacctcagcttggtgtagtcctgctcctcttgggatggggctggggtaggcccgactgcaccctccccttctggtagtcataggcaggattgagtgacggttgggaagggggctcagaagccccctccccagcccggaactgacccctccttcctccctccctgtgcttggctgggcctgacccttcctgtcccagggcccaggtctgtgtgatatctgtatatattgcattttgttgattttaatagaaaacaaagcgtta

SEQ ID NO: 1082 - DNA, 4243 bp, Homo sapiens
gaagatgatgagaagcttattgaggaaatccagaaggaggctgaagaggaacagaaaagaaagaatggaggcaagtgcccctccccaggcccccaggacagagcagcagccaggccatgcaggcttctgctggcctccctgagtgtcctggcactcaacccagcacaggagaggagggggtgctgtccctcaggtggctatagacctgacttcacccacgcggccacatctcaggcttatggaaaggccttcaacgccttgaatatagttttggcatctccttgatggtgaggaagtcccaaggggtgggtttgagctcaggaatcaatcaagccacacctggctaaagaaaagtagacccagctgatccttctgaggctgaaaagcagtgaagccaggtgtgttggcacacatctgcgatcccagctcctcaggaggcagaggtgggagcatcactggatcccaggaggttggggctagcctgggcaaaatagcaagaccccatctgtttttctttaaaaaaaagaggctaagtgcagtggctcacatctgcaatcccagcactcgggagggtgaggcaggtggatcagttgagcccaggagtttgagaccagcccgggcaacatggcaaaaccccatctattaaaaaaaaaaaaaaaagtaactgagtcactgaggtggcccatcaaggccctggctctgaaggatgtctggctgggtgggtggacgtgccaccttccaaggtgccactgtggagcaagacactggtggaagtacagatttgttcttggtttcttgcagtggcatttgggaggtgtccacgttttgtgctttgatcagcatgtggagccactcccgtgtccagaggtcgctgccctggtcccaggctagattccattgaggttggtttaatgtttttctccactaatccccacatccctttcagagaacaccttcaaacgcattggacccccgctggagaagcctgtggagaaggtgcagagggtggaggccctcccgaggcccgttccgcagaacctgccacagccacagatgccaccctatgccttcgcgcacccacccttccccctgcctcccgtgcggcctgtgttcaacaacttcccactcaacatggggcctatcccagccccgtacgtgccccctctgcccaacgtgcgggtcaactatgacttcggtcccatccacatgcccctggagcacaacctgcccatgcactttggcccccagccgcggcatcgcttctgatggccccgaatccccattgagcagcacaaagcccgtttggggtaggagtgtggatggagaaccctcccccaaggctggtgtctgtaccattgcatcctaagtcagcttgaagggtaggctggttttcttcccacccctttcctagaagggctactgctcctggaagagtggacggatccataataaagacgtcccaaatggtggagttcggagagagctgcgatgtgaactgcccctcccctcgcatcccccaggccaccaacggcagtccttctgccttgtccatggcataggccatagaccaggtccctgctgctcacacctgggcctctcctcggagccgacccctgggtagcaaggcagccgagagcatctccctggaggggcccacggttgggccaagggcagagggggctgcacctgcgggcctgggaagcattgctcagggtggggggctgggaccatggcccgcagaggcactgccacagctgtgagggccaagatgctgtccccccatccaaaacccgtgcgccactgcagtgagtgttgagggcacctctcctcccctcttacacctactcagatgaggcagcagcagacccatctcgcggcgggggttttgttctgttgccgcctaactttctcatcctcggtctctggaaagtcaggctgagaaatcctttcccaggccaggccgctgcggtacactggatggttctgaagctggcccattgaaagagcctcttaaggcagctgggacagaggcctggtggccctgctgggcagcccaactgctgggggagacgtttctgccaccctgggtgatgagcagcttttcccccctggctttctgggggaggagtgggcctccttagggagacaggtgaccctgggtgccacccctgccccgtgtgtgccccgggtgttctcagtggttgctgaaggcaggtagagggtgctgtccagtatcccccatgtgaaggtcacttcccttctcatggagtcagctgagcatcagctcagccctgccatgtccccactcaccctcctcgcctcctgtccggccctgggtttctagcggtgcctgaggcatcactctggcccattgacagatgagaggtctgaagccttcctggccacaggcatcactttctcctcctcctcatgccctgccttgtccttgtcgtgttgccatggggttctgagaggctgggagttcacagacctcagacacagctgagtccgacaaccattggggtggggctgcatcagtctccggagtggcccgccacctcctgaagcagggcctggcccacccaaggtgcctggggcaggcgggcaccgtcattcgctgccattggcttctcagatgtatttcaaggactaaagtgggctctaagatctaagatggcccggcgcggtggctcccgcctgtaatcccagcactttgggaggccgaggcgggcggatgagttgaggtcgggagtttgagtccccgtctctactaaaaatacaaaattagccggacaaggtggcgcatgcctataatcccaggtactcaggaggctgaggcaggagaatcacttgaacctgggaggcagaggttgcagtgagccaagattgtgccactgcactccagcctgagcaacaaaagcaaaactctatctttaaaaaaaaaaaaaaaaaaactaagatacccattctttctgcctttgcccaggatggaggctttgaagacaggtggtcacctggacctggggtaagggtgcgcagggaggccgggcttgggggcagcctgctgctatgtccttgctggcgcccatacctgttggactgcctgaactttgctactagcctgaacgacagtgccttggaaaggcaggctccatgcggcagcaacaggattgtcttcggtaccttaaatatgctccctgtgcttccccagggaggatctctgggagcagagggcggctgtagacatcacagctgaagaggtgacctcaggccctgggagcctcagctccctctgccctgtaccctaggcacgtggctccagcaagagccccaggcaggacaaagggagcaggcagcagctgcagaaacagccctagacaggtgctggcctcaaccctggcaggggagggggagcccagagtgatgtttctcctaaggccaaaccccaggggtgggtcatttgagaggagttccagctgttctggccacactgggctggtggggaaggagcggcggcctctttccttggagggtccctgattcctgaggatcctccccgagccaggcacgggggaccacagggctgccgtgagcacccaccctggttctccaggcccctctgtccagaggcagggcctgaacctcgggctcctgcctggaccagtgacagcattggggagagaagcactgggggtcttcagaccagccagcaaggggccgtgccagtgcccagagagcaggtcagacaacaggcaaccctgaggcagctggctccctctctctgccctgcagggcttgccgcagggcgtgaggctccccagccacagccccctcttacttgccttaaaactggagagaggaatctagtatttgcacttagcaaaatatttaaaaactgaaaaaaatgtgcatgatctgtcactttgtataaaaacaagaaacgattagttcattaaactttttctttaccttctggtagtaaaaatagataaaataattccgtttcaactactgtgtgtaaaaagcctgtatcatatgtaactgggacttttgtaaataaatgtttgtgcgctctgctccctccagcttcgtctctccaccccgccatccggcaagttacaggggccgccgacagattcgtccaagtgattgggtctaaaccagcatcctcacctccccgactgggtcctggcaggagcaggcccggaaggcccagtagtaagatccccaccactcccctgcc

SEQ ID NO: 1083 - DNA, 3461 bp, Homo sapiens
tggtttcttgcagtggcatttgggaggtgtccacgttttgtgctttgatcagcatgtggagccactcccgtgtccagaggtcgctgccctggtcccaggctagattccattgaggttggtttaatgtttttctccactaatccccacatccctttcagagaacaccttcaaacgcattggacccccgctggagaagcctgtggagaaggtgcagagggtggaggccctcccgaggcccgttccgcagaacctgccacagccacagatgccaccctatgccttcgcgcacccacccttccccctgcctcccgtgcggcctgtgttcaacaacttcccactcaacatggggcctatcccagccccgtacgtgccccctctgcccaacgtgcgggtcaactatgacttcggtcccatccacatgcccctggagcacaacctgcccatgcactttggcccccagccgcggcatcgcttctgatggccccgaatccccattgagcagcacaaagcccgtttggggtaggagtgtggatggagaaccctcccccaaggctggtgtctgtaccattgcatcctaagtcagcttgaagggtaggctggttttcttcccacccctttcctagaagggctactgctcctggaagagtggacggatccataataaagacgtcccaaatggtggagttcggagagagctgcgatgtgaactgcccctcccctcgcatcccccaggccaccaacggcagtccttctgccttgtccatggcataggccatagaccaggtccctgctgctcacacctgggcctctcctcggagccgacccctgggtagcaaggcagccgagagcatctccctggaggggcccacggttgggccaagggcagagggggctgcacctgcgggcctgggaagcattgctcagggtggggggctgggaccatggcccgcagaggcactgccacagctgtgagggccaagatgctgtccccccatccaaaacccgtgcgccactgcagtgagtgttgagggcacctctcctcccctcttacacctactcagatgaggcagcagcagacccatctcgcggcgggggttttgttctgttgccgcctaactttctcatcctcggtctctggaaagtcaggctgagaaatcctttcccaggccaggccgctgcggtacactggatggttctgaagctggcccattgaaagagcctcttaaggcagctgggacagaggcctggtgcgcctgctgggcagcccaactgctgggggagacgtttctgccaccctgggtgatgagcagcttttcccccctggctttctggaggaggagtgggcctccttagggagacaggtgaccctgggtgccacccctgccccgtgtgtgccccgggtgttctcagtggttgctgaaggcaggtagagggtgctgtccagtatcccccatgtgaaggtcacttcccttctcatggagtcagctgagcatcagctcagccctgccatgtccccactcaccctcctcgcctcctgtccggccctgggtttctagccgtgcctgaggcatcactctggcccattgacagatgagaggtctgaagccttcctggccacaggcatcactttctcctcctcctcatgccctgccttgtccttgtcgtgttgccatggggttctgagaggctgggagttcacagacctcagacacagctgagtccgacaaccattggggtggggctgcatcagtctccggagtggcccgccacctcctgaagcagggcctggcccacccaaggtgcctggggcaggcgggcaccgtcattcgctgccattggcttctcagatgtatttcaaggactaaagtgggctctaagatctaagatggcccggcgcggtggctcccgcctgtaatcccagcactttgggaggccgaggcaggcggatgagttgaggtcgggagtttgagtccccgtctctactaaaaatacaaaattagccggacaaggtggcgcatgcctataatcccaggtgctcaggaggctgaggcaggagaatcacttgaacctgggaggcagaggttgcagtgagccaagattgtgccactgcactccagcctgagcaacaaaagcaaaactctatctttaaaaaaaaaaaaaaaaaaaaaaagatctaagatacccattctttctgcctttgcccaggatggaggctttgaagacaggtggtcacctggacctggggtaagggtgcgcagggaggccgggcttgggggcagcctgctgctacgtccttgctggcgcccatacctgttggactgcctgaactttgctactagcctgaacgacagtgccttggaaaggcaggctccatgcggcagcaacaggattgtcttcggtaccttaaatatgctccctgtgcttccccagggaggatctctgggagcagagggcggctgtagacatcacagctgaagaggtgacctcaggccctgggagcctcagctccctctgccctgtaccctaggcacgtggctccagcaagagccccaggcaggacaaagggagcaggcagcagctgcagaaacagccctagacaggtgctggcctcaaccctggcaggggagggggagcccagagtgatgtttctcctaaggccaaaccccaggggtgggtcatttgagaggagttccagctgttctggccacactgggctggtggggaaggagcggcggcctctttccttggagggtccctgattcctgaggatcctccccgagccaggcacgggggaccacagggctgccgtgagcacccaccctggttctccaggcccctctgtccagaggcagggcctgaacctcgggctcctgcctggaccagtgacagcattggggagagaagcactgggggtcttctgaccagccagcaaggggccgtgccagtgcccagagagcaggtcagacaacaggcaaccctgaggcagctggctccctctctctgccctgcagggcttgcgcagggcgtgaggctccccagccacagccccctcttacttgccttaaaactggagagaggaatctagtatttgcacttagcaaaatatttaaaaactgaaaaaaatgtgcatgatctgtcactttgtataaaaacaagaaacgattagttcattaaactttttctttaccttctggtagtaaaaatagataaaataattccgtttcaactactgtgtgtaaaaagcctgtatcatatgtaactgggacttttgtaaataaatgtttgtgcgctctgctccctccagcttcgtctctccaccccgccatccggcaagttacaggggccgccgacagattcgtccaagtgattgggtctaaaccagcatcctcacctccccgactgggtcctggcaggagcaggcccggaaggcccagtagtaagatccccaccactcccctgcc

SEQ ID NO: 1084 - DNA, 344 bp, Homo sapiens
tttcaggctgtgcccactcagacccagccctctccaaacccttctcatatccaccacttgcacgcagctcagtgcatggaggccctccatccccccacctcaccaggcagctgcctgccatgctcagacccctctgcccagccttgtggatggcctccttgtggaacgccatcaggctgatgaaggaaggaggccttcggggaaataggaaggaacggtgtgcagcccaggccccactggccagcagcaggcttcgggcttgttccatggccataagcaacaagcggcctcctcactgtcccacggggcctcagcactgcatgaagctacaggttcatccttct

SEQ ID NO: 1085 - DNA, 195 bp, Homo sapiens
ccaagttcaagcgatcctcctgcctcagcctcccgagtagctgggattacaggcgtgtaccaccacgcctggctaattttttgtacctttagtagagacagggtttcaccatgttggcgaggctggtctcaaactcctgaccttgtgatctgcccgtctcggcctcccaaagtgctgggattacaggcgtgaggc

SEQ ID NO: 1086 - DNA, 1899 bp, Homo sapiens
ctattaatgactgtataaaaactgggatctagaacttttaatttgggggaagtgaatatcgctttttagctataaactatacatccttaaaggtgatatttaagtttaaggtgatgtgtttaaaaaattattaaacttccatgtctacttatgatagaagacataacaactcaacaaataccctaaccacaccatccatctgcagatagaacatcatcagcaacattgaaataccccatgtgctctctgcttcctaatctcagcgccctcctgtcctccatgatgaatgtttctcttgaaatttactttgttgtctttctttcacttttctgtgtcgttttaccattacatgcattattcctaaagtcgttctttttgttggattttgcttgctttcaaattttatgaaaatggcagcaaaatgtttatattcttctgccacttgctttttttcatttaatattgttttgaagatctatgcatactgatgcacactgatcatattttcagtgttgtactaattacagtttatgactattccacaatttgttcatccatttattccctcatttttgtgtatttggtttgttggaagatttcctggctttttttttctattatcaactgggctgccacatatgtctttatgcctgtttcatgataaatacgtgcaagaggccaggctatgcaaagtgccagctttacaagatcatgagcagctgttttgctacgtggtattgccagtttagactcacacaagtggtaaagaagcatccccagtgtcctaaatccttgccaacacttagtgtcaccaggcttcttaatttttaccaatctggccagtggataatagcattgaaaagttatttttattgtgatttggagtccaatattttttctgtaagaaatgcatgtacaatgttataagaacatgcaaaaatcaaaatactttataaatgttcactttataaaaaatgaatgagaaaaacataatgcattttacataaagaaaatctgtaatgcttttgttattggctgggtattttcacaccttccaagtggtggctgttgataaattcagcaataatacctttatgtttattaatattaaatgataatgtcgaattaattaaatgaagttcaatttattgatagttattcattatatcctgctgttctaactcatcctggaagagaatagagtgaaagagaaattgcctttatatataaatgactcatagaatttcatatactgacctaaatagatttcattgcaaaggtattatagaggtaataacacagtaactcttaggactgttttgagattttcacaatttgaaaaatccttttagatccttggttgacaaatgccctggctgtgctaattatatgacatttcctgacactagtgacgtggcatggcctctcccggcttacattatagattgttttctgcccccatgggatctgatttgttaaggctcattttctattttaatgtggtggaagaattttagaaaccctagaaccccactttcaccctccactgaaacaaatagaagcagtgtattagtcagttttctcactgttatgaagaaatacctgagactgggtaatttatgaagaaaagaggttgaattggctcatggttccacagctgtacaggaagcatggcaacatctgcctctggagaggcctcaggaaacttttactcatggtgggaggcaaagtgggagcaggtgtcttatgtgacagaagcaggaccaagagagagacgggggaggtgctacacactttttttaaaacagagtctcactctgtcccccaggctggagtgcagtgatgtgatctcggttcgctgcaaccttcgcctcccaggttcaagcatttctcatggct

SEQ ID NO: 1087 - DNA, 225 bp, Homo sapiens
agtaggtttaaattcctaatggcagctgatcacagggattacattcaccccagtccctcagccttggcaagtgctggtcccaggaatccaggcttggccataccacaacagttgccatcagcctcccctacatcaagtggaggaccagcagctcagaccctcactctcacataaatgtatacaggttttactggtgaattatacctcaataaaactgcgggaaaa

SEQ ID NO: 1088 - DNA, 3500 bp, Homo sapiens
cctatgtgcagtcagcgggcgggcacgcgctgcccctgggtaccagccctgcgtccagccaggctggaacagtcacctcgtacgggcccacgagctctgtagctctaggcttcacctcgctggggcccagcggccccgccttcgtgcagcccctgctctcaggtgaggggcggcctggcaggcagtgctggggacccagggtggggctgaggcagtccgggccctaacttggtctcctgcttcttcttctctgtctttcagcaggccaagccccactgctggctcccggtcaggtgggcgtgtcacctgtgcccagtccccagctgccgcctgcctgtgcagcccccggaggtcctgtcataacagcattttactctggcagccctgcacccacctcctcagcacccctggcccagccatcccaggcccccccaagcctggtctacactgtggccaccagcacaaccccacctgcagccaccattctgcccaagggcccgccagcccctgccactgccaccccagccccgactagccctttccccagcgccacaggtaggtgtcagatcaacccagagcagagtgagttgggggacccaggggatgggctccagtcaggcctggctcagcaaacaattttctccccactagcaggttccatgacctacagcttagtggcccccaaggcccagcggcccagcccgaaggccccccagaaagtgaaggcagccatcgccagcattcccgtggggtcctttgaggcaggtgcctctgggcggcctggccctgcaccccggcagcctctggagcctggcccagtccgagagccaactgccccagagtctgagcttgaggggcagcccacaccaccagcccctccacccctgccagagacctggactcccacggcccggagcagccccccactgcccccacctgctgaggagcggaccagcgccaagggccctgagaccatggtgagcgcctgcaggccgtggggctcccactgccacttggctgtgcctctccattgacgtctttgcttttctgtcctactcttctttccatgcctgtgtgtctctcaggttaaagggtcccctctgtcccttctgcctgcctgtgttgtctcctctcccatctgaggcccctgtcttggccttcctgaggccgtgtgacagccttctcaaggggtctgctgggcgggctcagatccaactctttgtttctggcctttgccccagagtctgagctcagtgttcgccatctccctgcccatctccaccccaggccagcaaattccccagctcatcttcagactggcgcgtccctgggcagggcctggagaatcgtggggagcctcccactcctcccagcccggccccagctccagctgtagcccctggtggcagcagcgagagcagcagtgggcgggcagccggggacaccccggagcgcaaggaggcggctggtactggcaagaaggtgaaggtgcggcccccgcccctgaagaagacctttgactctgtggacaagtgagcatgggctggggccttggtggagcgtgttagggtggcgggagtgggagcagctgcaggctgaggcgggggaggtgaccctgccggccctccagcagggtcctgtcagaagtggacttcgaagagcgctttgctgagttgcctgagtttcggcctgaggaggtgctgccctcccccaccctgcagtctctggccacctcaccccgggccatcctgggctcttaccgcaagaagaggaagaactccacgggtaggcgagcattgggcacccagggtccttaggtggagggcagactggggccacctgcactgagtctgcttctgtttggccagacctggattcagcacccgaggaccccacctcgcccaagcgcaagatgagaagacgctccagctgcagctcggagcccaacacccccaagagtgccaagtgcgagggggacatcttcacctttgaccgtacaggtgccgtggtgggcagaactttgggggcctggggacctgcaagaggagtgggtctctggaaggcggttagagagtgagagaggtagggtgggtccatccaggctgggaggaagcacagcctgtcagtggtgggttctggagtctggcaggcccctaggttgccctgtgactgtgggcaggacccctctctgactcccctgtgaaatagaatgcagtgagggcttgggtgggcactcagacggtggcaggaaggccctgccgctgctgcagccttgccatgctgcctgtgccctgcacaggtacagaagccgaggacgtgcttggggagctagagtatgacaaggtgccatactcctccctgcggcgcaccctggaccagcgccgggccctggtcatgcagctctttcaggaccatggcttcttcccgtcaggtgagcctgtctcggagtcttggggtcactcgggtgggacttatctgtacatctcatcctgtgctccccaccgtttttctatctccagcccaggccacagccgccttccaggcccgctatgcagacatctttccctccaaggtttgtctgcagttgaagatccgtgaggtgcgccagaagatcatgcaggctgccactcccacggagcagccccctggagctgaggctcctctccctgtaccgccccccactggcaccgctgctgcccctgcccccactcccagccccgcagggggccctgaccccacctcacccagctcggactctggcacggcccaggctgccccgccactgcctccacccccagagtcggggcctggacagcctggctgggagggggctccccagccctcccccccacccccaggtccctccacagctgccacaggcaggtgagggacccctgagaagatgccaggacttatagtaccccctcaggacatggacagtatgtgggggcaggaaggttatctcctcccgggtaaagccatttcgtcctctccagtttggggcggaatgaggcctgctcctcttgtaaatacccccttccctcgaagctccctcccggtgctggggggcagctgaggggctgcaggggcagtctccctcctccaagcccctgtacataacctggagcgtgtgaccttcagagcttttcactttatgcaaaatggctcctgtgagggctgcaagctggagggtggtgcaggccttgggccacagggaggcgcctgtggaatagggggagttcatgcaccccttttttccccagaggggctggactcaggttagtttgggggtgggggctcctgcactttgccacaggcacggggagggttttctcctcaccccctctgccctcccaacttgggttgtactttctaagaaggtgattccccctgcccttgcccccttccccagaacaaaacatgttgatcatgtgcaatatttcttactgtgccgagaagccgcaatgagcgagattaaagctgtttaacacacctgtgtg

SEQ ID NO: 1089 - DNA, 632 bp, Homo sapiens
cagctgcacaggcaggtgagggacccctgagaagatgccaggacttatagtaccccctcaggacatggacagtatgtgggggcaggaaggttatctcctcccgggtaaagccatttcgtcctctccagtttggggcggaatgaggcctgctcctcttgtaaatacccccttccctcgaagctccctcccggtgctggggggcagctgaggggctgcaggggcagtctccctcctccaagcccctgtacataacctggagcgtgtgaccttcagagcttttcactttatgcaaaatggctcctgtgagggctgcaagctggagggtggtgcaggccttgggccacagggaggcgcctgtggaatagggggagttcatgcaccccttttttccccagaggggctggactcaggttagtttgggggtgggggctcctgcactttgccacaggcacggggagggttttctcctcaccccctctgccctcccaacttgggttgtactttctaagaaggtgattccccctgcccttgcccccttccccagaacaaaacatgttgatcatgtgcaatatttcttactgtgccgagaagccgcaatgagcgagattaaagctgtttaacacaattgtgtg

SEQ ID NO: 1090 - DNA, 174 bp, Homo sapiens
cccgtgcaggccccgcccccgggtggctcagcccagctgctgcctgggaaggtcctagtgcctctggccgcccctagcatgtcagtgcggggtggaggggccggccagccactgccactggtgagcccgcccttctcagtacctgtgcagaatggtgcccagccccccagcaag

SEQ ID NO: 1091 - DNA, 13789 bp, Homo sapiens
cactgaggaaggagagtttaatgttgtgggaaggcagcaggatgcttagggtgcgggctccagcaggggagcaccttggccctggtcttgggccagcagacgcagaagcagggagtgcagagcccggcaaacaggtgtgtagcccaggcggctcagatgcaggtaatcatacatgtcatgatggctgatggtgccatctgagtgcacaaagccagggtcggcatctaggaagtgggcccgagggtggccagccagtgccgcccgtaccagctcgttcacctgtcggttcttctcccgaagtgggttgggatgttggcctcgcggaagcaggccctgagcaggaacacgaggcgtagtaaggaaacaagcatttgagtatcttgttctctgtgccaacctgtcctccacccaccaccatgaagtttccagctgcagaaaacactagggatgggcaagtggggagggtgggagggtagttcctaaatatcacatcctagccctcatttagcaagagacttctgggttttaccctctttcgttttcttttttttttttttttgagacagagtcttgctctgtcgcccagactggagtgcagtggcgcgatctcgactcactgcaagctccgcctcccaggttcacgccattctcctgcctcagcctcccaagtagctgggactacgggcacccaccatcatgcccggctaattttttgtatttttattagagacggggtttcaccgtgttagccaggatggtctcgatctcctgacttcatgatccgcccgcctcggcctcccaaagtgctgggattacaggcgtgagccaccatgcgcggcctagcctctttccaagtatcacttagaaaaatgttgacattggctaggttcagtggctcacgcctgtaatcccagcatgatgggaggcagagctggataggtcgcttgagcccaggagttcgagaccaacctgggcaacatggtgaaaccccatctctaacaaaaatacacaaaaattagtgggacatgatggcgtgtgcctgtagtcccagctactcgggaggctgacgtgggagaatcacttgagccctggaagcagaagttgcagtgagctgagatcatgccaccgcactccagcctgggcaacagagccagatcctgtctcaaaaaataaataggccaagggaggttgctcacgcctgtaatcccagcactttgggaggctgagacgggtggatcacttgaggtcaggagtttgaggccagcccggccaacatggtgaaatgccatctctactaaaaatacaaaaattagccaggtgtggtggcacgcgcctgcagtctcagctactgtgaaggctgaggcaggagaatcacttgaacccaggaggaggaggttgcagtgaggccagattgcgtcactgcactctggcctggcaacagagcaagactctgtcccaaaataaataaataaataaaagatatcaacatcatggctcatgccaagggatcaatccgttttcagaagaggaaatatcctagctacctacaagtgatggagcctagatttaccccaggaatgcctgacaacttttggcctattcaaggttttttgagggtttttcttttgttttctggtgagacagggtctctgtcacccgggcgagagtgcagtagcatgatcacagctcactgttaccttgaattcctgggctcaagtgatccttctcctttagcctcccaagtagctggggttacaggttttgcgcaccatcatacccagctaattctttttttttttgagatggagtcttgctctgttgcccaggctggagtgcagtggcacaatctcggctcactgcaagctccgccccccgggttcatgccattctcctgcctcagcctcccaagtagctgggactacagacgcctgccaccacgcccggctaattttttgtatttttagtagaaacggggtttcaccttgttagccaggatggtctcgatctcctgactttgtgatccaccctcttcagcctcccaaagtgctgggattacaagtttacaggcgtgagccaccgcacccggcttttttttttttttgagacagagtttcgctcctgttgcccaggctggagtgcaatggtgcaatcttggctcaccccaacctccacctcctgggttcaagcgattctcctgccttagcctcccaagtagctgggattataggcatgtgccaccacgcccagctaattttgtatttttagtagagatggagtttctccacgtgtggtcaggctggtcttgaactcccgacctcaggtgatctgcttgcctcggcctcccaaagtgctgggattacaggcatgagccactgcgcccagcccatgcccaactaatttttttttttttgagacggagtctcgctctgtcgcccaggctggagtgcagtggcacagtatcagcttactgcaagctccgcctcccaggttcatgccattctcctgcctcagcctgccaagttagctgggactacaggtgcccgccaccacgcccggctaatttttttttgtatttttagtagaaatggggtttcaccgtgttagccaggatggtcttgatctcctgacctcgtgatccacctgcctcggtctcccaaagtgctgggattacaggcgtgagccaccgtgcctggcccgttttttagtttttcaatacccccaaagtcttaagccatccctgggcaaaaaaggctaattggtctcggagcatattctcaaccacagccactctgaagggtatagcaagctccaacgtgagattctgcctaaaagccactgctctatgtcaagctgcctagaactgtgccaactgtggctatatctgagggggtcccagaccactgccattcttcctttcccactctcccagcctctcaccagcaccacaacccgggcctggggctgtcgctcattcaccagttgcacaatggccttgatgccaccagtcacctgctctgctgtgtgtccgtggttgttggtgcccacccagaccaccacaatctgtggaaaaagagacatgaagcagcggtgagggggcagccaaaagatgttttagagccccacccaagccccgctcaccttgggccggatgtgttccagctccccattctccagccgccacagtacatgctgtgtgccgtcaccaccaatgccaaagttaagtgcatgcagaggagagaagagctcgcgccagatctgtgggcaagaagtggtgtgggcaagaagtggtaggggcacaagggcactgtccgcatggaccatccccctctgtccaggtgttaaccaaatgccattatggaagaaccttacttcatggaagcagtcttaaaattttacctggagcaaactccagcatggctgaacctcactttatagaaatctattagagtctctcacttattttattttattttatatttttgagacagagttattttatttttgagacagagtctcactctgtcacccaggctggagtgcactggcactatctcggctcactgcaacctccgcctccctagttcaagtgattctcatgtctcagcctcctgagtagctgggactacaggtgtacgccaccacgtccagctaattttttgtatttttagtagagatggggtttcaccatgtgggccagactggtctcgaactcctgacctcaggtgatccacctgcctcggcctcccaaagtggtgggattacaggcgtgagcccatggtgcccagcctatttattttttgagacggagttttgctcttgttgcccaggctggagtgcagtagtgcgatctcggctcattgcaatctctgcttcccaggttctggcgattctcctgcctcagcctgccaagtagctgggactataggcatgtgccaccatgcccagctaatttttgtatttttagtagagacaggatttcgccatgttggccagggtggtctcgaactcctggcctcaggtcatccgcctgccttggcctcccaaagtgctgggattacaggcgtaagccaccacaccctgcctagagtctctcactttaaaccaagccccaggctctgttgctcatgctgaggtgggcggactgcttgagcccaggagttcaagaccaacctgcgcaacagggcaaaaccccatctctacaaaaattacaaaaattagccaggtgcatggtgatgtgcacctgtagtcccagctactcggagactaaggtgggaggatcacttgagcccaggaggcagaggttgcagtgaacagagatcataccactgcacgccagcctgggtgacagagcaagaccctgtctcaaaaaccaaccaaccaaccaaccaaccaacaaaacaaaccaagccccatagaagcaagactcacttcatgaaaatccagtctgcttgagccatgcattgaatcaatggcattacagttgaaacttattttgatgaaacccattacagttggacatgctttgtggaaagatattattatgattgagtcctctttgtggagtgccattagagttgcccttcgcttcctgtaaagtgactatagctttgtgtaaacccaacagggctgcgcactacttaaagcaaacaagaaagagcctcactttaggcaagcctatggcaggaaagcctcattttaggtcttagtacattatacacaaatccaatctgataaaaccaaggcatacatttctttctcaatagaatgttgcaccttacaccaagattctcagagcctcgggctgcctgaggccaatctgggtactctcataatacctcacctggcctgggttctggtccagatgtgtcagcatggacacagggctggatggggcagggggagagggactgccctcacctcgcactggtgcatgagctggaccaaggagtccccgatgaagacgacttcgggttccttatctttgctgtcagccacgaaccgatggtgctgcgggagcgcgcgagagggagtcaatggcatgcacgctccagggcccgccccgccctgctcccttaggcagcgcctcctcaactgccctcagtttcccaatcaggtagtgagagtggcacgaaccagccgttctcctgagccaccccccgcgcccccggactcctcaatatcccaggtgggaacgctcaccagggacatccagcgcccgtcgccctgtacgtcctgcaccggcgtgggcttgctggctgggttctcctctccactcatcttggcgccgcagctcctgcaggatgagcgagtcgggtcggcccgggagtgttccgaacggagctggctccgccacgcccactcctacccctcgcggcaacaaaggaccgtcccaacgctagcacacccgcggaggacgaaggccgatacagggcgccgcctcctctccagggacggaagccttcacttaggaggtaggtggaatcaggaaccttcgcttcccccacgacggccgcacagtgggctcgcccggcgcttcccgctcgggccgctgactcccaggccgcgcacccggcacggggtggggggagggagaggcgagaccatccagctcccgaggcggggaggagggagaaaccacccaccggtcacggggaggggcgaactacctgaagagtcgagagtgggcggggaaaatctagccctctgtctagcaaatgggaagaaaccatttgctgtacagagtgaaatgtgcggaagggaccacctactgttgcgggggggggggtgacccattcacgtggtggggggaggggagcgagtggacgagtccattcttatattcccttgaaggggtggctcgaatgcacctggctgggggggacgctcctattttctactgatgtgggggacagaaaaggaagatgacaaaatgtgaaaattcgaggctcccttctaaggagccactctaaggccgcgccagggctttagtgagcctatctactcgtgggcttcccctactcaaaacaccgtgggtgtgtgtgtgtgtgtgtgtgtgtgtgtgtgtgtgtgtgtgttgaaatctaaagtacatatctttgcattcaagacatcacaggacccctactcaaaacaccgtgtgtgtgtgcgcgcgcgtggcataacatataaactacatatctttgcattcaagacaccataggacctgcttggagggtagaagaaggtgcagaaagagaaaggaaattagagacgcctccagggctcaggtccagtctggcgtccctccggcagatcatcttgcagatctgcagcctctacactctctctaaacccacaggccaactgggtatgtctgagctctgaaacctacatccatagccaaggccacctagggtcgcgcctctcccccaacgctgccccaaattaatctcagacctcagtgtcttctcagatctccctcttctctgggaccaggtggggggctcactccctgctaaacgtcctggtcatgttcttgtagcctcactccaggtgggaccttcccatgtattcattccttcgaggtggattgatactgagacagagatgagtgttattcattgtgtttatgttttcaatccactttcctggaactgggccgggcacacagtggttattccacaagtgcttgctgaatgagtagtaaatgagtgggtcagctcctgaccttgtcccaatgtgtttagggagacagatccagacacagaggtgtaggggtgtcaaagttgtgtttgagggagagacagggacctctggggaggaagaggagaaggactctgaggactatgggtttcctaggagtagtatctcagctgggtctgaaagataatgaagaatgggcaagcagaaagaaaagacacaggtaatcactttcttattaggtttggggaatatcgtggaatagcttgattttaaagtctgagggaggccagcatggaggctcatgcctgtaatcccagcactttgggaggctgacatggtcggatcacttgaggtcaaccagcctggccaacatggcgaaaccacgtgtctactaaatatacaaaaaaaaaaaaaaaattagctaggcatggcagcacacgcccgtagtcccagctacttgggaaggctgaggcaggacaattgcttgagtctgggaggcagaggttgcagtgagctgagatcgcgccactgcagcccagcctgggcaacagtggcccagcttgggtgacacagcgagactctgtcttaattacaaaaataaacaaacaaataaagtctgagggagccaggtgcagtgatgcatgcctgtagtcccagctactggggaggctgaggtgcgaggatcgcttgaacccagaagtttgagaccagcctgggtaacacagtgagaccctgtctaaaaaaaaaaaaaaaaaaaggctgggcgcggtggctcacgcctgtaatcccagcactttgggaggccgaggtgggcagatcacgaggtcaggatcgagaccatcctggctaacacggtgaaaccccgtctctactaaaaatacaaaaaattagcggggcgtggtggcaggcgcctgttgtcccagctacttgggaggctgaggcaggagaatagcgtgaacctgggaggcagagcttgcagtgagccgagatggcaccagtgcacttcagcctgggagacagagcgagacgccgtctcaaaaaaaaaaaaaaaaaaaaaaagggcaagtgcctgtagtcccagttagttgggaggctgaggcaggaggatagcttgagcctgggagatgaggtggcagtggcccatgatggtgtcactgcactccaggttgggtgacagagtgagtccctgtctccaaaaaagaagtcataatcagctaggcacggtggctcactcctataatcccagcactttgggaggctgaggtgggcagatcacttggcgtcaggagttcaagaccagtctgaccaacatagcaaaaccccatctctattaaaaaatacaaagattagctgggcaaggtggtctgcgcctgtagtcccagctacctgggaggctgaggcaggagaatcgcttgaacccgggaggtggaggttgcagtgagttcagactgtgccactgcactccagcctcagtgacagatttaaattccatctcaaaaagaaaaggaaagaaaagaaaagaaaagaaaaaagtcttaattatgccttcaagtcagtgatataagagagaattttttttttttttgatagagtctcgctctgtcgcctaggctggactgcaatggcgcgatctcggctcactgcaacctctgcctcccaggttcaagcgattctcctgcctcagcctcctgagtagctgggactacaggcgtgtgccaccacgcccggctaattttttgtatttttaatagagaagaggtttcactgtgttagccaggatggtctcgatctcctgacctcgtgatctacctgccttggcctcccaaagtgctgggattacaggcgtgagccaccatacccaaccgagaaaaaaatttttaaaaataaagtcttagaggataagttggagcagttcctgaagcaaagcttagtgagaaacaaagcttccaggcattcttcattcaccaggcccatttcaagttagacatattggtctagtttatccttctagcaaccaaatgaggaaggtagttttattaccaacccaattttacaggtcagaaaactaagtctgaccagttacaaacatttccaaggtcacacagcccagttgtgccattttgggcatttaaaccaagcctagctatgaatcacaacactacactaacttttttttgagatggagtctttctctgtcacccaggctggaatgcagtggtgtgatctcggctcactgcatcctccacttcccaggttcaagcaattctcctgccccagcctgctgagtcgctgaatatacagtcgtgagccaatgcatgtggcctaatttttgttcttttacagggtcttgccgtctccctcaggcgggcgtgatcatggctcactgctgcctccacctcctaggcttaagtgatcctcctgcatcagcctcccaagtagctgggcccacaggcaagagccactgcgcccagcttatttatttatttagagacggagtctcgctctgtcgcccaggctgaaatgcatctcggctcactgcaagctccgcctcccgggttcacgccattctcctgcctcagcctcccgagtagttaggactacaggcgcccgccaccacgcccggctaattttttgtatttttagtagagacggggtttcaccgtgttagccaggatggtcttgatctcctgacctcgtgatccgcccacctcggcctcccaaagtgctgggattacaggcgtgagccaccacgcccaaagctaatttattttttgtagtcagggtctccctatgttgtccagggtggtcttgaactcttgggctcaagccagcctcctgcctctgcctcccaaagtgctgggattacagacgtgagccaccacgcccggccaactgtataagttttctagggattatgtctgtggctgcttgggggacagctgtgcatgggggctaccatgacccttcttccctttggcacgcctggtctcaactagccctcgaaagaccgctgatagctatctgaaccaatcagcattcaggaagggggcggacctagtgaacctcacagccaattgagggctgggaggtgctgagaccaagaaagggagatttctgaaattgaggctgggaggggaggggctataaccggcgcttccctggcacgcgccgctaggtttccgtcctctcagagccacgaagccaaagggcatggaaagggcacgcgcatgcgtgtgggggagcccgaggcccggaacagcgccaggtgacttcgagagctggggtcaccgcggaaaagaagccattgcgccccacagctacgtgaagtgggaagggccggggttcgttggggcgagagaggtgcccttcccacaccctgctcctgccaaccgtaccccactcccttcactctgcccaccctgccctaccgcggctggccaccatgcttcctctcctaccctaggcccttcctttgtgatcaggccctgtccctgatcgcgcctctgtctcccttcctgttctcttgaggttttctcaggctttccagacttctcttgctgctctccctctcctgcttctctttctctactatctctttccactttctgcattcccctgtacctcgtctacccctggatttctccgtccagaatcactttctggtcccccaaatccctccaatctcatgaccccttcaccaccctccatcttttgttgttgttgttgttgttgttgttgttgagacagagtctcgttgtgtcccccaggctggagtgcagtggcgcgatctcggctcactgcaacctccgcctcccgatttcaagcgattctcctgcctcagcctctttgagtaggtgagattacagtcattcaccaccacgccggctaatttttgtatttttagtagaggcgaggtttcacatgttgcccaggctggtctcgaactcctgacctcaaatgatctacccacctcggcctcccaaagtgctgggactacaggcgtgagccactgcgcctggcccccaccctccatcttttttttttttttttttttttttttttgagatggagtctcgctcggtcatccaggctggagtgcagtggcgcgatctcggcccactgcaagctccgcctcctgggttcacgccattctcctgcctcagcctcccgagtagctgggactacaggcgcccgccaccgcgcccggctaatttttggtatttttagtagagatggggtttcaccgtgttagccaggatggtctccatctcctgacctggtgatccgcccgcctcggcctcccaaagtgctgggattacaggtgtgagtcaccgcgcccggctcaccctccatcttttaactgtttccccatgtccctgttcctaatagcctctctctgtttcctggcttatcttcccattagctgtgactccttcgacttcatcttacccctgtgattccttatctgaccaaaccttttccaatctctctctgctcacttattttctctcatcttctctctctcttttaagagacaaggtctcactctcttgcccaggctggggcacagtgatgcaatcatagctcagagtaacctccaactcctgggctcaagtgatcctcctacctcagcttccctagcagctgggactacaggtgtgggccaccgaatccagcttttttttttttttttttttttttttgagatagagtctcactctgtcactcaggttgaagcgcagtggcgcaatctcggcttactgcaacctccgtctcctgggttcaagcgattctcctgcctcagcctccagagtagctgggattacaggcgcgcaccatcacatacagctaatttttgtatttttagtagagacaggatttcggcatgttggccaggctggtctcgaactcctggcctcaagtgatctgctcgccttggcctcccaaagtgctgggattacaggcatgagtcaccacacctggcatcatccagctaatttttatttttattttttgtagagatgagggtctcactttgctgctcaggttggtcttgaattcctagcctcaagcgatactcccgcctcagcctcccaaagtgctaggattacagatttgagccaccatgcctggcctcatctggtcattctaaatagtattcccaccacaccccaaaacatctccctattcacttgttttgttttgttttgtttttgagatggagtctcactctattgcccagactgaagtgcagtggcacaatcgtgactcactgcaacttctgccttctgggttcaagcaattctcctgcctcagcctcctgagtagctgggattacaggcgtgcaccaccatgcccagctaattttttttttttttgagatggagtcttgctctgttgcccaggctggagtgcaatggcatgatctcagctcaccgcaacctccacctcctgggttcaagtgattctcctgcctcagcctcttgagtagctggaattacaggtgcatgccaccacgtctggctaatttttgtatttttagtagagatggggtttcactatgttggccaggctggtctcgaactcctgacctcaggtaatctgcctgccttggcctcccaaagtactaggattataggtatgggccactgcggctggccaatttttgtattttcagtaaagacagcattttgccatgttggctaggctggtctaaagtgacctggcctaagtgatcggcctgccttggcctaccccagtgttggtattacaggcataagccaccgcgcccagccctccctattcactttgctactccccttgacttatctgcatgctgatggccaccctatctttatattccaggacaccatggatacccagggaccagtctcccagccttttcagcagcctgagaaacctggtcgtgtccgtcgtcggaagactaggcgggaacgtaacaaggccctggtgggcagccgccggccattagcccaccacgatcctcctgtggccattcgggatccacctgtggtccctactgcctccaagctcgtggtcataacccagggccggctgagccgggagcaccggggtctcttcaaccacgaggtgaaatccctagatgttgcaaggctgcttagcagtgggaccctggtgccaggcagccccacactccccgccaagccctccccaagcccaggcagggcccaggaaccagccccacggtccagggacaaagagaaccaggtgcctggaggttcgggcccaggcccacccagttccccagagttgtctggcgtggggcagctgctggcagagctgcagtgtcagctgagtttgccacaggccttcccccggaggaacctgattcaggatgccagggatgccatcgtgcacaccttgcaggcctgtcatggttgtgtgcctgaccttgccctggtgcttcggggctgccagccacccttgccaggtgagcgtccctcctgcccctgtactcccctttcctttgtcggctctagctcagctagcctctatgcttctttcctctgtgccaggggccaagcctggggtctctgagagaaagatgacacccttctggattaatagccctgatcaagtcccagagcaggagaggcaaaggaagcaacaagggacaaaggagttcaccttccccatgccctacacctccagcatgcccactgcgcacagggggagtctggcaccgccaagaggtccctggccaccatactttccctcactgtcttcgccatctggaacagcctggggtcccccaacagcgtttgacttgttaaaaagcatctggctggtagccacgccaccccctcctcggccctggggggttggcctccctcagcccctgcctcagccttcatcacccctgttgccccgaacctctgtcctggactggagccccagccccccttccccactgcccagcctctcctgggtagtagcccagagcagtccggaagcctggtcttttccacccatgagactgtactgaggagaggctgaggctagggctggggacagatatcttgtactcccagtgacctcaataaagtacttttcatggtcctcttga

SEQ ID NO: 1092 - DNA, 2115 bp, Homo sapiens
  misc_feature (2006)..(2006): n equals a,t,g, or c
ccaggtagccccatcccacacactttccactagtgcctatattgggatgaatcttctggcaatcttccttaaaacttcaagagacctctttaagattctgtagttgggtgagcctgtctgtgcccagggtagcctgaagttaaggtgagggcttaacagtggtaccaggcagtttggatcccaactagctagctgtccttgggcaaatgactactttcctactactgttacttcttgtttctattttctcctctgtaaactgtgggtaatgaaaatgttgcgcaaaggtagggtgggtgagtgacagctacaggctcactgttcctgaaaactgcaattcgaaattccacagccccctgaaaataaaaagtctttcagtgaatgttcagcaaactcccttggtggcaaaactgacttgaattaacatgaggctatttatgatattttgtaaatctcagttagtgagactagttgtacattttactgtagaaatatccatgtgtttgatttcagagtactaccctgaaaatacccaggtatttggaagcatagaatatatgaattaaatgacttttttaaaaaattgtggtaaaatacatataacacaacatttactatcttgaccacttttaagggtacagttcaatagtgtttgtatattcacattgttgtgcaaccaatctccagaattctttttacttattaaactgaaactctgtacctatcagacaactccccgttttcccctttccccagcccctggcaaccaccatttgactttccaaatttcttttagaattgcaaaaattccaaattccaaaacacatctggcctcacaagcatttcagataagggattgggaaacttaattagggaaggggaatgcctaacatttgatagagtcaccacctttcgagatgatcctggaagagggagttcttccaatcttacaggggcctgtcaaccacagcacactgcttcccaacatcgatgcccttttgtaaaagatggcacagtaacaagaacaagggccattagattctgaccagagcaaacagaacgcaggtacttgcatgggatgtttgataccttccccttcttttctgtcattcccttgatctcagtttttctcagtaagtagaagtgcacatgttggcagctggttctggcatctactttttatttccattccagggaccatgatggaggatgcttttacagtgaaaaggcatgaaaacctttatgcagactgaactcatggggaagatgctgacagtctgtttagaacttgctggaagccattgaaggccagatttatccattttgcagaactctctaggaatcttcagaaaagcagtagggcttaccctgctgttccccagcagatcacagtatggagaccggttctgagtcatgctccctataactggaataacacagggaattcttcacatgtttcataatgtgtgtgagtgaaaggacaacccagacttgttattgaaaaacccgacagtggtcaggcatcattattggaatgtcttctccacactgcccattctgtaaacatcctggggaaatgtcgaggttactttctgtgtgaggcttgtgctttcttttcctgtttgtaaataccagggatgaaagtggatgccttcagaattggaagcccatgaacacaaaaattctgcagaatacaaaaccctctgatggaccactcctgataaatataaaataaccttagtaccagaacttctacttttgggttatggaaaatatgccaagaattttatgttttaaaaacaaactacaggctgggcgtggtggctcacgcctgtaatctcagcattttgggaggccaagccaggtggatcaactgaggtcaggagttcgagaccagcctggccaatatggtgaaaccccatcactactaaaaatacaaaaattagccaggcatggtggtatacgcatgtgttcccagctacttgggaggctgaggcaggagaatngcttgaacccgggaggcagagtttgcagtgagccgagatcgcaccgttgcaccacagcctgggtgacaagagtgagactctgtgtcaaaaaaaaagaaaaaaaaaaaac

SEQ ID NO: 1093 - DNA, 2115 bp, Homo sapiens
ccaggtagccccatcccacacactttccactagtgcctatattgggatgaatcttctggcaatcttccttaaaacttcaagagacctctttaagattctgtagttgggtgagcctgtctgtgcccagggtagcctgaagttaaggtgagggcttaacagtggtaccaggcagtttggatcccaactagctagctgtccttgggcaaatgactactttcctactactgttacttcttgtttctattttctcctctgtaaactgtgggtaatgaaaatgttgcgcaaaggtagggtgggtgagtgacagctacaggctcactgttcctgaaaactgcaattcgaaattccacagccccctgaaaataaaaagtctttcagtgaatgttcagcaaactcccttggtggcaaaactgacttgaattaacatgaggctatttatgatattttgtaaatctcagttagtgagactagttgtacattttactgtagaaatatccatgtgtttgatttcagagtactaccctgaaaatacccaggtatttggaagcatagaatatatgaattaaatgacttttttaaaaaattgtggtaaaatacatataacacaacatttactatcttgaccacttttaagggtacagttcaatagtgtttgtatattcacattgttgtgcaaccaatctccagaattctttttacttattaaactgaaactctgtacctatcagacaactccccgttttcccctttccccagcccctggcaaccaccatttgactttccaaatttcttttagaattgcaaaaattccaaattccaaaacacatctggcctcacaagcatttcagataagggattgggaaacttaattagggaaggggaatgcctaacatttgatagagtcaccacctttcgagatgatcctggaagagggagttcttccaatcttacaggggcctgtcaaccacagcacactgcttcccaacatcgatgcccttttgtaaaagatggcacagtaacaagaacaagggccattagattctgaccagagcaaacagaacgcaggtacttgcatgggatgtttgataccttccccttcttttctgtcattcccttgatctcagtttttctcagtaagtagaagtgcacatgttggcagctggttctggcatctactttttatttccattccagggaccatgatggaggatgcttttacagtgaaaaggcatgaaaacctttatgcagactgaactcatggggaagatgctgacagtctgtttagaacttgctggaagccattgaaggccagatttatccattttgcagaactctctaggaatcttcagaaaagcagtagggcttaccctgctgttccccagcagatcacagtatggagaccggttctgagtcatgctccctataactggaataacacagggaattcttcacatgtttcataatgtgtgtgagtgaaaggacaacccagacttgttattgaaaaacccgacagtggtcaggcatcattattggaatgtcttctccacactgcccattctgtaaacatcctggggaaatgtcgaggttactttctgtgtgaggcttgtgctttcttttcctgtttgtaaataccagggatgaaagtggatgccttcagaattggaagcccatgaacacaaaaattctgcagaatacaaaaccctctgatggaccactcctgataaatataaaataaccttagtaccagaacttctacttttgggttatggaaaatatgccaagaattttatgttttaaaaacaaactacaggctgggcgtggtggctcacgcctgtaatctcagcattttgggaggccaagccaggtggatcaactgaggtcaggagttcgagaccagcctggccaatatggtgaaaccccatcactactaaaaatacaaaaattagccaggcatggtggtatacgcatgtgttcccagctacttgggaggctgaggcaggagaattgcttgaacccgggaggcagagtttgcagtgagccgagatcgcaccgttgcaccacagcctgggtgacaagagtgagactctgtgtcaaaaaaaaagaaaaaaaaaaaac

SEQ ID NO: 1094 - DNA, 1736 bp, Homo sapiens
tgataaacaactgattgcccagggaccagtgaagaatcttgatgataaaactcctacttgtagtgaaagaatcatgggatcttttgcattttcttacatcaaaaacgaccttgaactgaaagctctctttaaaaaacaaacaaacaaacaacaacaacaaaaaacccaccctaccctgcatactatcacctgctaaactacccagtgtcagaaggacaacttcagagatgctgtggtggcagctgatagtgcctgacatttagtgagtgctcagcacgtgccgggcgttgttctgaatgcttcatgtggattagttcatttccccttccagcagccctgtgagctcaatactgttattatttacatcccacaggtaaagggaaactggggcacagtaggttgaaaaataacggaaattgagtttgtttgaaaaattttaaggctaaaagccttcagtcttatctaatcacatctatcttttgatttcgggttggatttttcttttgggaatcagtcaaaacccactgtgggttattaagagtagaagatgacttataaagggataatgaggatagcctccttttgctgggaagacagaatttttcattccaaattctaatctccagtgtcaccttgcatgtccatttctggatttatattttgtattttagtatttatatcccatgtttcatttgactctgggatacaagcaattgtcagatgcaccattattttccagaccactaagaaaggaaaaaaaaaacctaccgattaaactgtgacacaccattgattgtaagacacaccctgattggtgaggtgtaaaaatgggggaaagtggctctcttagaatgaaatatcttagaatgaatttgtgtgagtcaggggcaggtgaaagtcattttgcaggattctaatggcttctccatacacctctctccgaagaaagaaaggacttggggtgttttgctgactcctggcagcattcttggcccaatgtattctgggtttgctcttccccgttggagagccctttgccagagaacagccactggcttgttgagccaggaagcttaccatgtgagtgcagcttgtgtctgaagaggctgggccagtacagataatacgaatcacatttcactggctttttgatcggctgtttagctcctggcagcttgttcccagcattcatgtttgctgtgagtaggaaacacaaagaacctcgtcttcagaacgagaaagacttggggctggattctagctgtgcccgtggctggcttagtgctcatgattgtggccctgtgcagaccactttgcctccctcagtctcagtttccccatctatcaaaacggatattcattcctgccttgaatgtgttatgtaataatgattaaggaaaataaaatgcaagtgttgaagttgatacaggatctttatttcattccagaaaactctgtaaagtttcctcatttaaaaattccttccttctgtggccgggtgtggtggctcacactgtgatcccagcagtttgggaggccgaggcaggcagatcacttaaggtcaggagttcgagaccagcctggccaacatagtaaaaccctgtctctacaaaaaatacaaaaattagtcggacatactgtcttgaacccaggaggcagaggtttcagtgagctgagattgtgccgctgcactccagcctaggcaacagagcgagactctgtctcaaaaaaaaaaa

SEQ ID NO: 1095 - DNA, 404 bp, Homo sapiens
gggcaaagcctgacggaatggcagggtggggaagcagttgctgcctctcttgagttgcaacccatcagccatttatggtttttgtaggactaattgattcacgcctggtgccattcttccattcataaacatccttgactgctgcagatgagtcctgcaaaacactccagcctccatttattagtttgttctttcattcattcattcaggaaaggggtatgacaagcctcctctgtgctagactctgttagctgctaaggaggtaaaagtagcatctacactcaagctctccccagcacgaagaatgcatttatgttccaacatcaattctctgactgcagctgctgtcctattcagttatgacacacctagtgttagtgtagaccccacaagctaagagttca

SEQ ID NO: 1096 - DNA, 104 bp, Homo sapiens
ccagcactttgggaggccgaggcaggtggatcacttgaggtcaggggttcaagaccagcctggccaacatggtgaaatcctgtctctactaaaaatacaaaaat

SEQ ID NO: 1097 - DNA, 43056 bp, Homo sapiens
aaaatggcggctgccactgtggggcttctgccggccggtagtccctggcgctgctgacccagcatcggcttttctacgtcttgaacctggattcgcctaggggttgggaagggctgtggacggcgttgggggaggcctgacgaggcaagtgagggcgggagaaaggagcgagcctcgggctggggaaggcggcgtcattggccctccgggagcacggggccccgactccgacccggtctcccccgaggactcgcccccgccgcttcggctgcgactgtcccggtcgttcccggcagaagtggtcagcgagggaaagagaagtgacttctccatgggtttcaagctcccagctgttttgcggcagcccgtacggttccctcccgggatcttcttccctcctttctgcttccctctgcttcccctttcatctcttggcgctggaagagttaaaccgacgccagctttagctccttggcttcgtggctacggcgttcttagcctcccctgctcgggctcttcccgtcgttttgggttgagagaccacgaggttgctaagctctggacaccgcttaggcgtccttttagttcttcgactccagagacctttcggttgtttgtaccacactgtactaaaagggtcttgggccttcgcgccctcccgccatcgccctccagcgcttccactatcactgcgaagttctaattcttttttgacttcgtactattttacgtgctctttagaaaagaagaggtcagattgaaccccggcaagtctggcttcctgtgaccaggcgaacctgagctatcatttatacccatcccctaatttttaattttacaacccctttaacccctttcttttttctttctttttttttttttttaataaagacggggtttcactatgttgcccaggccggtgtcgaactcctgggctcaagagatcctcccattttggcctgtgctgggattccaggcgtgagccaccatgcccggccttgcaaccccagtatgaaactggggctctccctcaactgaccgagaagagccttccccactcagtgagctccagggctaacccaaactcctctgttttcccttggattttgcttagttcaccttagttgtcatcaacatgcacggtaattattttttatttttgagaaggaatctcgctctgtcgcccaggctggagtgcagtggcacgattctcggctcactgcaacctctgcctcccgggttcaagtgattctcctgcctcagactcccgagtagctgggactacaggcgcgcaccaccacgcccacctatttttgtagctttagtagagacagggtttcaccttgttggccaggattatccgcctgcctcggcctcccaaagttctgggattacaggcgtgagccaccgcgcctggccgatttattatttgagaccgggtctcgctctgtccacccaggctggagtgcagtggtgccatctcagctcactgcaacttccgcctcctgggctcaagtaatcctcccacctcagcctcccaagtagctggggtcaccagcgcagccaccgcgcccggctacttttttgtgtttttagtagagaaggggttttgtcatattgcccaggctggtctggaactcctgagctcaagtgatctgccctcctcggcctcccaaagtgttgagattaaaggcgcaagccactgcgcccggcaacatgcacgattattattaagagggcaagtaactgtgagatatttgcgatgaagtagtatctgtcaaaaccagtgctctgaaggaatttatgatatgatgaggcttcattccttcttgcagtacccatttatgctgccttgaccactgaagttggtattggatatacaaagatgatcacttttactcctctatacattgaacatccattcaacaaatactttatgtgcctcctttataacaaaataactaactttgcctagggcaacaaaaaggctttataaaggagtaaatatgtgagctgggtcatatagcatcaaaaggaatttgctgagctcaaaaggagaaggtaatttcgggattcagtacaggaatacagagctttgagaagctttagcatacttagggagagtgggataatcaacctgcctgagcatttagtgcacgagtgattggtgaagcaagaggtaggttaagatcagcttgtgaaggatcttggtttccaatagggagtttagatttttttcagtagttaccaggaatccagtggatattttgtgcaaggagtgagcaggaggatatttgtttttttaggatggtctctgacagctatatggaggatcaactgggaacagaaaaactagatgaaaggaaatgggcaatcattcaggtaaggcaatgagggcctccatggaggcaggacataaaggaggtcagagagacactaagtaaatgtcaaatgggattcacctgctgactgctaagttaatggtaagaaggtgacttgagtttttagtctgggagagtaaatggttggcaatactattaaaacttagtctgagacatgtacataaacataggatggtgccaacctgcactttaggggtgacaacatgatgctctatagtgtaaagcattggtttttatggtctggagtctagatctgcactgttatggtagtcactagccacatgtagctattgagcacttcagatgtcgttagtctatttgaaatgtgctgtaaatataaaatacacagtggattttgaagatttaatatgaaaatgtaaaatattcaacatgattacatgttgaaataatattttggttctattgggttaaataaaattcattaaaattcacccgtttctttttcacttttccatgtggccatgaagaaattaaaaagtacatttgtggcacgcattatatgtctgttgacagagctgttctagtctagactagatgtgggaatttgtaaggaggtggaacatgagctgggcctgaagacattgagcagtgatgtcagggtggcttcctggcaacctccattgccagttaaggcatttggtttgtcttttctcaagcagtaagaagccttcagagatttctgagcaaggggtaataggtgcagggtatttctgaagatgaatctggtagcaatgtttaggttggatgaagggaggaaatactggaggcagagaaactgagaaacccaaacataaggtagtgaggcccttcctgtattagggtactggcagtgggatagaaagggaatgatgtgcaaagcgttcctgagggaagaataatcaggaactggtaataatagactgtcccagaagtgaagaatcagcatgtagcatttcaaaccttggttacttagataacaactaatatattcatgtcgcagagctataaaatacaatttgagactgaagaaatttggtcacaagatagaatcagtaacgttaggaaggggtggtccactaaatactttcgctttttatctccctgctttctgtatcatctcatcaatcatacacaccagctaatatccccaaaatacagaattacctgtatcatgccatctttctacttgataatgagtcttaaaatgtttctgttgcctgcaggactaggttcacagtttccaaggcctttcactatctggcccctttctgttcattaggccttatcttttattttttgcttttgtgaatgttttccaggctagttttttcactggtactttaaaacttactcaaaagtgtagagatctgagatgtctggtattcctttactcctgttactcctctgttttgagtaccttctctttgtttctacccatgtcttaccaatccttagtgagtaatcttaaatcccacctcttctatgattctcaataacataaggtaatgtcaacttaaaaaaaaacttcctaaatatttttatgtcttttattatctgttatgtaagcttaagattcctaaaattaatgacagatctcttttttaaaaaaggaccacgtattatactacttgctgctgctcctgatgccttagggcaagatacaaattaaacaccataattataaacagaatgaaatcataataccacattcataaggcttttatttattttttagattaataaagaactcttcagaattcctggtgtttcatcatatatacgactaagatatcagtaagtagtgaatgtttgataaagatatagctttattatgaataattgtagtgaaaatatcttttcatctgttgaaatcttggtctgtctgcaaaacagttttaatatgaacttactcagttctagctgcaagataccttgcatgttacttcataatctaaatgaagaaagtgggaattaaggaagacttaagtagaaaagagtttcccttaggccattaatataattgtggtacagtaagctttttgacagggataatttccaaggtcctttccaaaattgtatttataaacgtttttcatcaaatagagaattaatgtctttgtaccccaaataagaacacatgaaggccaggcgtgctgtctcacacctgtaattccagcatttggggaggccaaggtgggtggatcacttgagcccaggagttaaagaccagcctgggcaacatagtgaaaccctgtctctacaaaaaattagccgagtgtggtggtgcgtgcccgtagtcccagctacccaggaggctgaggtgggaggatcacttgagcccaggaggttgaagctgcaaatgagccatgattgcaccactgcactccagcctgggtaccagagcaagatcctgtttcaggaaacaaaaacaagtcaatatattttaaattttaacttaccaacagttatttattgaacaaccactatgtgcagggatgtgctaatgtactaaggataaaaaaatggatcaagccaactcctgtactcagagagctctcccaagcaagggcaaatacatgtggatgggttctggtttatggtgtggtaaggacagtgagcttatttaatactagccatgccccattccttcctttaagaaacatttatcggctaccactgtatattaggcactgtggaggcgctggaatgtaactgtgatgaaaacagagaaggtctttaccttcatggagtctgcattccagtgtgggcacaggaggggagaaggtgacagacaaagcaagtaaataaataagtagcaattagagagcactaagtattttgagggaaatagaatgatgttgtaatggatgtgaagaaggactttagggtggtcagagaatgactacctctgagaatgactcagaataaattagagacagggaaaatatatataaaagttagaggttttggtcacagtgaagagagaagaaaatttgagaaatataatgagttgttatgaaagtatatcactggaagtgttttataaaggtcattgataaacctctatacaacttaagccaatggacatttctctggcttctcagacttagtgcaaatgggaggtgaggaagtggagatatatctgtggacaaatattctgagaacttttgctgtgaaagggaaacccaaaaatgatgtagtggttgttgggggttgaagggttaagagagggttcttataagttgggaaattctagagtatttttataagcttgtgggaatggtacatcagtgatacgttgatgcaggggaaagagcgaatgactgaagatgtcaagtctttcagaaggtgaataagaatgggatcaacggcacacatagagggattggccttggatgggagcaggactattctatacaacaggagacccaacagtgtacatgcagataggttaatagatgtagtatctggaaaatgagaaattattgtctaattttattttctgattgaagaatgaaatgagattatcagctgagactagggtggagggagggatgggtgatctttgaacaaagaggaggaggtgtggagtagtagtctcagaaactgaaagtcaacctactaagaaaagtcagattgaagggtaatacttacggcctgtttgaggcctttggccatgaatttaaagagcaaatagcgttagccaggtgtggtggcaggtgcctgtaatcccagctactcgggaggctgaggcaggagaaatacttgaacccaggaggtggaggttgcagtgagctgagatcttgccactgtataccagcctgggtgacaagagtgaaactctgtctcaaaaaaaaaagaaaaaaaatgggccaggtggatcatgaggtcaagagatcgagactattgtggccaacatggtgaaactccgtctctaccaaaaagaattagctgggcgtggtggtgcatgcctgtagtcccagctactcaggtggctgaggcaggagaatcacttgaacccgggagatggaggtggcagtgagccaagatcgtgacactgcactccagcctggcaacagagtgagactccgtctcaaaaaaaagcaaatagcacagctgtaattctcctccatatcccatccccccgccggccctgcatgattggagttaatcaggactggggttttgccagcctagtagagagaagtacctagaggagcaagacatttgagtgtttgcaaataatgttaacagatcatgaattgaaggtgaggacctgagtaaaaacaggagggggtcatggatagggaaaaagtagtcagcgaattagagagataccactgaccccagaggatttttgcaatgggaatactagagtaagtaaggtgttagagaatgagatgcttgaagtgaaattttgaaagtagaacagttactggtagtgataaggtctagggtgtaatcgtagtggtgggtggctgaagtgaaatgattattggagttgaggaagtcaaggaaccaacaggtcagtattgaagttactgagaggaacaacgggtcatgtaaaagtcctcagtgaatgaggccaggtgaatagatgccatagtgaagaggaaatgtggaagactaatagtgaactgctgggtggcaagagctttaatgggactagactatttgaaagaggaaagagaagacatggtttagaagctgcagtgaggagcaaggaacacatacctcctgcttttcaagtacagggggtacaagaagttaaaacaacaacaacaaaaaaccttgagaaggccgtaagaggaagagtatgatgagggaacagccaggtacctgggaagacaagcaggtgaagagaattttcagagaagcagttgcagttacaggtgagtatgatcacagttccagagagcatcctgaaaggatttgagagggagaagaggtaggggattaggtcttactgggagacgtacacatcgttgataattgataacctagcagtcttgtgattttggctgtcactcagataaacaaggctgggagatgtggtgggtttagcagcccctgtcagcctcttatgaaaggtggatattcagtttaccttagtttgttgatggccttgagtagtggtaagaaattattaggtaactcggtggccttctctcctacttgcatagttagccaggaaaagctcatttattttagggagctaaaatctgaaatgttgctgtggagttgaactttgctaatgaatattttcataacttctgcttaatagcacacagttccaggttctaaatcccatttttaaaaaatgtatatattttattttatttattttttagatacaaagtctcactttgttgcccagtctagggtacactctagggtctcactctgtgcccagtctagtggcgcactcatagctcacagtaacctcggactcctgggctcaagcaattctctcatcttggccttctgagtagctaggactacaggtacatgccaccagccagttttcttatattttttttttgtagagacagggtctcactacattgcctaggctggtctcaaactcctgaactctagcagtcttcctgcctcggcttcccaaagtgctgggatcacaggcgtgagccaccgtgcctggcctgtagatgtgttcatgttatattttcctgaaatatatgtagtaggcatcccaatttgcatttcatcagatatatgttgaagcgtgcatcaggttctatttagggagttgcaaacatatgccacctatgtttttcagttgctcacattccaatgcaagggttcttaatgttaaactccctgaaaagtttgtgaatttctacgtgtatatgtactcttgttttttgtttgagtgtgttgagagttggtgggggagggggagggtccataggtttttatcagattctcaaggggatctatttaaggaccactggtctaattaatgggagagaaagacatgtaaactaatcattgtaatacagtgaaatcagtgccatcacaaagcaagataaaagaggaagagattcaccttgaaggatgagttcattaattcctaaacatttatttattgaggaacttggatgcagtagtatctgttataggtaatttatacattatttgaaatacttcaacattgtttttacatgtatactaatactaatgttttatagactgagatacataggtgaggaaagtttaattaacttgcttcaaatcacatagaagtagattcatatatgggtctatttgattgcaacattcactaccccactagggagccactaaagggctcattgtgtctaagattatctttgtgcttttaaacttggcagtgacttaataaacttgctttcacttaaaaaaaaaaagtaaacttggcaatgatggaaatgggcctttaaactgcttttcgtgttaatggaatttctatgcacttaaagatttgaaataattttaatcaatttgtttattatatatgccagactgtgcttttatgtttaattatgttttcatttcatttgaaagactcttctagcttgctgtttctggaccaaaaaaaatgacgtctattatcaaattaactaccctttctggggtccaagaagaatctgccctttgctatcttctccaagttgatgagtttagatttttattggactgtggctgggatgagcacttttctatggatattattgattccctgaggaagtaagttacatttcataattctatgtttttattaaatcaacttctcttttctgtactgtaataccatttcgatgtgataaatactgcctttttacactagtttatagcaaaaggcttaattttacttatgccaaaaacctatagtgacattttaacttgtaaagttttgattgacttataagctttgcttgttgaaattcagcaaaatcttaagctaatggatttcagtagaaacttttgcatgctaatttttggaaagaacaagaatacataagaatttgagaagaggaaacattttccatgtgaaagttctgtggtcagatcacattagcttactttctacatcttttgatgcttaacattgtcagctggttctcagaatgaccatgagatactgattcatcaaaaaaaaaatcaattatgggctgggcacagtggctcacgctggcaatcccagtactttaggaggctgaggtgggcagatcacttgagttcaggagttcgagaccagcctggccaacatggtgaaactccaactctactaaaaatacaaaaattagccgggtgtgatggtgtgcacctataatcccagctacttgggaggctgaggcaggagaattgcttgaacccaggaggcagagattgcactgagccgagatcgtaccactacactccagcctgggcgcaaagcaagactctgtttcaaaaaaaaaataagataaaataaaaagtcaatgatgtttgcagtattatactaattttgcaagaaaagaggacttaaatatttaaaaaactttagaacttgagaaaaaaaatccaaaccattttattaatttcttgtgttgatgagaacatatgcttccctgattaactgaagttttactattcaattagcaaaactgtctgtggttactatgcgaaaaagctgggacaaaaatccattataagtatgtggccatataaatatcctctccttaataatttctgaaattcttctcttttattattatttttttttgagatggagtttcacttctgttgcccaagctggagtgcaatggcgtgcttttggctcactgcaacttccgcctccagggttcaagttattctccttcctcagcctcccaagtagctgagattacaggcatgcaccacccggccggctaagtttttgtatttttagtagaaacagggtttcaccatattagccagactggtcccgaactcctgacctcaggcgatccacctacctcggcctcccaaagtgctgggattacaggcctgaaccaccatgcccagccaataataatttctgaaattctaagctgagttcttgaacttaaattaatagtttgcgaccaggcacagtggctaatgccggtaatcccagcactttgggaggccgaggcgggcagatcacttgaggtcaggagttcgagaccagcctgaccaagatggtgaaaccccatctctactaaaattacaaagattagccaggcatggtggtgcatgcctgttatcccagctactcaggaggctgaggcaggagaatcacttgaacctgggaggcggaggttgcagtgagccaagatcgcaccattgcattagagcttgggcaacaagagtgaaactccgtctcaaaaaaaaaacaaaaaaaacaaaaagagttaagtgaggctgggtgcggtggctcatgcctgcaatcccagcactttgggaggtggaggagggcagatcacctgaggtcaggagtttaagaccagcctggccaacatggtgaaagtgtgtctctactaaaaataaaaaaattagccaggtgtggtggtagacacctgtaatcccagctactcaggaggctgaggcaggagagttgcttgaaccgggcggtggaggtcgcagtgagccgaggttgcgccagtgcactccagcctgggcaacagagcgagactacatctccaaaagaaaaaaaatagtatgcaggatagctattaaaaatcaacttatggccgggcgtggtggctcacccctgtaatctcagcactttgggaggccgaggtgggcggatcacctgaggttgggagttcgagaccaccctaaccaacatagagaaaccccatctctaccaaaaatacaaaataagctgggagtggtggcacatgcctgtaatcccagctactcgggaggctgaggcaggagaatcgcttgaacctgggaggcagaggttgtggtgagccggagattgcgtcattgcactccagcctgggcaacaagagcaaaactccatctaaaaaaagaaaatcaagttacttgtgtctactgttcttttttgtttttgttcttgtttttatttttaggcagggtctcactctgtcacccagactggagtgcagtggcatgatctcatcaaggtcaacctcctgtgcccaagtgatcctcccatgtcacccctcaagtagctgggactacaggctcatgccaccacccctggcttttttttttttttgtattttttatagagaacggtgttttgccatgttgcccaggctgatcttgaactcctgagctcaaacgatttgcctgccttggcctccctaagtgctgggattacaggtgtgtgccatcacacatggccttcttttctgtttaaaatgtgtgtacacaccatatatttaagtgtaccttataccacattttttgtagctatggagagcacaggtagtaataattgaaattcataggtaatcataattttagctcttagttttgctcttctgccccagtgtagtcttcaatccagaattggtgaataattttgaatattctgtctttacccttaaaaagattcaagaagtagtcctttggattgtgttcttgtaggcatgttcaccagattgatgcagtgctgttgtctcaccctgatcctctccaccttggtgccctcccgtatgctgtcggaaagttgggtctgaactgtgctatctatgcaaccattcctgtttataaaatgggacagatgttcatgtatgatctttatcaggtaatttaagcaattaaaaaaattttgttagcactccttcagtgattgtttttcacctttatttgtgttattcttttagtctcgacacaatacagaagattttacactctttacattagatgatgtggatgcagcctttgataaaatacagcagctaaaattctctcagattgtgaatttgaaaggtaaaaagaatttccagtagtaagtatttagatgaatggggtttaacttgctggaaaataccgaggagaattcagagagaaaattataggcattataggctgaagaataaaaaagttagcacattctgccttgatacagaactcttaacttccatttgaattttaaaatatttcagaaaaaatgctaacagaatgttaatagctcaggccttttcatatttaacttgggaaaaactcatttagtgtttactgtgtacaataaacaaaagataatgtggccatttcctcttcctcagagcttacagttagattgaggcaacaaagtagctgagatggctaaatgtagtgattggggtaaatgaagtgctatggcagcagagtagataatgaattctagcattggacgttaaaaagtttattattgaattaggaagtcctatactaagtctatatttatcatctacagagataattgtattagatattttcatagatatgaaccctggcattgataaaatggtgcaataatggactctgaagatttagcccagaaataacaacagtctcaacagttttgcttctagttaatttttctgcaggataaattctttagcacaatgagatttaaattattctgttagtttagacgttagcaaaaatggaaacatttggtaactgtatatacaaaatacacattaaaatttgctagttcatactaaataatttaatagtgtactagcttttaaatctaatctctagccttgtacttataagcacaaataactctacaagattacataatatagtaacaagaatgtttgcctctagtgagggagtggagtaggtgggggacaggagagtgaagcctgctttcactatatgcatttttacttttgaaatttgtattattgcatatacagtattacctattaaaatattatagttgagaaataaataacctttctttagggttgtaaaagaaatctgagtattgttatcttgttgacataggtaaaggacatggcctgtctatcacacctctgccagctggtcatatgataggtggaacaatatggaaaatagtcaaagatggagaagaagaaattgtttatgcagttgacttcaaccacaagagggagatgtaggtatatcaagagaaaagctaaaggcaatgcaattggtattattttattctttggagaaaaaataagaaacacagtttttgttttggttaccagaaatttagagcaacttaaaaccgtcaaatagggagtgttttcaaaattaattatttgcatagtaagggggaaagtatggtataagacataagagattttaaaaatttataggttaagtatacactctacaaaacgggtatctccctggagatgttgcaaaggagatgaattttttacgtatcaaattacatgttcttgacctgctatttaacacaactttgtggatgggttgttcttttgttttgtaacgtgatatggtttggctctgtgtccccacccaaatctcatcttatagctcccataattcccacatgttgtgggtgggacccggtgggagatgattgaattatgaggttgggtctttcccgtgctgttcttgtgatagtgaatgggtttcacgagatctgatagttttagaaacaggagttgccttgcacataatgtaattaccatctaatataactgccctgtatgtttaaagttagtccctttgaaagggaactcaattctagttatgattttacacacttcatgtggcactcagagcattactatataatattttggtgtttagtctcttacaggctcgttttgttttatctgtacattaagttcatagctattttgtgttacattacaatagtctcaggatctttatattaagaaatatttaagacaaatagactgaattttagacacttataaccatagattaatgaggaaaggatggctatgttgcagggcaaaagagtgagggtcgtgatcaactcagtataccactggaggctatatgagtaaacagcaaactgttcgcataaacgcagaaaattggcaaactgacaaactgtgtctgccacccagaaggaatgctgagggcagtcaggcctcaggtgcaggtgtttcttgtgattagacacatctgaagcctgttagcagtaatgtgaacctgtgatcaattaagcagctgaccaattgttacctcgtcctccctgctctttctacccaataaatatgaagggctgtagaagctgaaggcagctccctttgctcactagaagcagggagctctcttcttcttctcctgaccccttcctttaaaatagttacttttgttttaagttttcatttctgcattcgtcctccttcgttcagtctcgtagtaaccgtggcaaactgcagcatggctatttgagtaaatggtattgaaggattcaaccattttggaaaaaaatcaatttgtgtccttttaattatataacaaaagaaatttcagatggattagaactaaatagaaatgaagcaatattggtgagtctgatctctgatttggaaaagactttgtaagcataaaaataatgaaccaagttacaaaggaaaagtttgatagatttgatgacatacaggttcaaatgtctgaaacaacaaataaaaaaaaaaatcaaagtaggaaaatatttgcagcaagttgcccaaaaacttacaacatatatataagatcaagtattaatttattaataaaaatataccagttgcaagatggacaaaagttataaagtcaaaagagaaaatttaaatgatctttttttgttagataccattaaaattattattattcttatttatatttttatgtatttttttgaaacagagtctcactctgtcaccgaggctggaggcacaatcacggctcactgtagtgtcgacctcccagcttcaagcaatcttcccattttagcctcccaagtagctaggactacaggtgcgctctaacatgcctggctatttttgtaattttagtagagatgaggttttgccatgctgcccaggctggtcttgaactactgggctccagtgatctgcccacctctgtctcccaaagtgttgggattacaggcatgagccactgcactagtccaaaattatttttaaatggtgattttcttctgggaagtatgtagaattggtcagtctttttgattgaacttttctggatgaggttaaatcttgctggaaagccttttagcagtactatgtattaacagtaaatacatttttaggaatgtgacctaaagaaacaatcagaaatgcaattgaagcttttgtaaaaaatgttctttggaagattataatggcaaaaataagtgaccgaaatatcagtaaagggaaaggatcaaatacagtgtagacacaataaaatgtttttataactgttaaacatttagtttagaaaaaaatttttatgtcctgggtaaaaaccaggatatagaactgagcgtataggaatgtatatgggatatcagctttgtaaaatacatatgtatatcagtacttaccataagacagggcaaaaagaaaaataaaaaaaatacatatgtgcatagaaaaacttatatggttagcaggatgtacaccaaaatattatgtcagttatctctgagtaatggtactctggaagatttttattttcttctttatacttttttgaagttactggatttcttatcaatgagcatgtctacttttatagttagaggagggaacaccttataaatgaagctgcttattttttaagtaagagaagctattattgtttacttgaaatgatataaaatattcctcttcttaaactttcttatagccatttaaatggatgttccctggaaatgctaagcaggccttccctacttatcacagattcattcaatgctacatatgtacagcctagaagaaaacagagagatgagcagcttctgagtacgtattctttcacgtccttattattattattattttgtaactttttgtatatttagggaatataagtacataaaagtacaggtttctttttttttttgagacggactttcgctctttcacccaggctggagtgaagtggcgcgatctcggctcactgtaacttccgcctcctgggttcaagtgattcttgtgcctcagcctcccgagtagctgggattacaggtgtgcaccaccacgcccagctaatttttgtatttttagtggagacagggtttctccatgttggccaggctggtcttgaatttctgacctcaggtgatccacctgccttggcctcccaaagtgctgggattacaggcatgagccaccacgcccggccacaagtataggtttcttaatgcatacgttgcacagtggtgaagtttggccttttactgtatccgtctccagaatcgtgaatgttgtacccaatgtataatgtccttttcaaggagctgtggaaatgcatggtagtgggaatgactgtattctgtttagcacttttcttggtcataagagattggttaactttagtatttttgaaaaaaatattatgtgaccatcagtttttgtataagaagaaacttagctggtttgaatttaacttttgtggaacagtgtgtaaagattggcttctttttgccagtcagtacatagctagctatccctggcactcactggcatatgtctgtatgtaaagacctcgtacaaatctattagaaaaatatactctaaaagaaaaatgaggccaggtgcagtggctcacgcctgtaatcccaccactttgggaggctgaggcaggcggatcatgaggtcaggagattgagaccatcctggctaacacggtgaaaccccgtctctactaaatatacaaaaaattagccgggcgtggtggcgggtgcatgtaatcccagctactcaggaggctgaggcaggagaatggcgtaaacccggaaggcggagcttgcagtgagctgagatctggccactgcactccagcctgggctacagagtgagactccgtctcaaaaaaaaaaagaaaaatgaacaaagagctaagtggataaatgaggctgtaaatattccactaattttgggtgttttacactttaatatagtaggccattgctgcttgcttcatcttacattctttttttttttttttttgagatggtgtcttgctctgttgcccaggctggagtgcagtggcacagtctcggctcactgcaaccttcacttcccgggttgaagtgattctcctgcctcagcctcccaagtagctgggattacagtcatgcgccaccatgcccagctaatttttgtatttttagtggagatggggtttcgccatgttggccaggctggtgttgaactcctgacctcaggtgatcctcctgcctcagcctcccaaagtgttgggattacaggcgtaaaccactgcacctggccttatattctttttaaataagctataagggatttcagcagggaaaattggattccatttttaaacatgttttcaaccattgtttttagttcatctactttaaaagtacaactatttttttttttttttttttttttgagatggagtcttgctctgtcgccaggctggagtgtagtggcacaatcccggttcactgcaacctctgcctcccgggttcaagtgattctcctgcctcagcctcccaggtagctgggattacaggtgtgcgccactacgcccagctaatttttgtacttttaatagagacggggtttcaccatgttggccaggatggtcttgatctcttgaccttgtgatccgcccacctcggcctcccaaagtgctgggattacaggcgtgagccaccgcgccctgccactaaaagtgtaactattaataatataccgtgttgcaccaactttaagaagctcaagccagacactgtggttcacgcctgacattgtggtcaatggtcaacactttgggaggctgaggcaagatgatggcttgaagccagcagttcaagaccagcctgggtaacatagtgagacccccatctctttttttttttttttttgagatgtagtctcgctctgtcgccaggctggagtgcagtggcgcgatctcggctcattgcaacctccacctcctgggttcaggtggttctcctgcctcagcctcccgagtagctgggattacaggcgtgtgcaaccatgcccggctaattttttgtatttttagtagagacggggtttcaccatgttggccaggatggtctcgatctcttgacctcatgatctgcctgccttggcctcccaaagtgctgggattataggtgtgagccaccatgcctggccgcaatccccatctctacaaaaaaaaagaaaatttttgccagacgtggtggtacaggcccgtagttccagctgcttgggaggctggggtgggaggattgcttgaggccaggaggttgaggctgcagtgagctatgatcacaccactgcactccagcctgggtgacagagcgagaccctgtctcaacaaacaaacaaactgaaaaacaaaaaaagtagcggctctttaagtcttagttttgctagagttcagttttaccacatatttccaaggggactttcatctagaggaaggaaatccataaagatatacttgttggaagggaatatgatctatattttattctataggcatacatacatacaaactatgtatcatacatagttggcctttgtagctgctgttccacatctgaggattcaactaactgtggattgaaaatatttgaaaaaacaataaaagaagataatgcaatagtttaaaaaatataagtaaaaaaaaacagtgtaacaaccatttacatagcatgtacactgtattaggtattataagcaatctagagatgatttaaagtatataggaggatgtacgtaggttatatgcagatatattgtttttttgaggcaaagtctttctctgttgtacatgctggagtgtagtggcacaatcacgactctctgcagcctcaaactcctgggctcaagcagtctccctctagcttcccacatagctaagaccacaggcatgtgccaccatgcccggctaatttgtttatttttatagagacgggatctccctatgttgtccaggctggtcttgaactcctggactcaagccatcctcttgccttgacttcccaaactgctgggattacaggtgtgagccattgcgcctggccaccattttatttgagggacctgggcatctgatggttttggtattcgtgggagtcccggggccagtacccatgggtactgagggatggctgtatatataattatgtgagtgtatatatgtatgtatataaatttgggaattcatcataacggagttcactggggtggataggcgagaccagggtagcccggaaacaccaggctggttacatttggcctggtcatacaattttctcagtgatacacacaccattttctatgtgtattatgatgtataaagtgttgaggactactgatttataattttttaatgaagaaagattgagagttaatgacactgaatatatgaagagatattcaacagaatcaaaagcagttgtaatgacctgaacaaaattccttcattttgtacttggcctagtagttgcttatttgtaaattatagtctttctaataaaaacagggagataaaattatctttaattttgtagcatagtattgttacgttctatggggattttacattcttgttttctagcaaatgtcctggaaacacttcgaggtgatggaaatgtgttaatagcagtggacacagcaggcagagttttggaacttgctcaacttcttgatcagatttggaggactaaagatgcaggattgggtgtttactcattggcactcctaaataatgtcagttacaatgtggtggagttttctaagtcccaggtttgttctcatgttgtcacttgtaataagtttgctacagtgattgggtctgtggaagtgggcgtcttaaatgttttttggattttatttttctcttgaagagattgttaataagatgataacttggcattaaccatttactgtcctgtgtgctttaaatgtattatttaatttaatccctatttattctattaagtagtttccattgtgtccctgttttaaagattaggcaaattgcttcccttctaactcttagtatcccagtctgtaaaatggggacaaaaatagaacctacctcatagcattggcatgttagaattcattgttctttcttttaaataagctttttgccttgaaatagcaatctttgggagtaagattttcatttagaacatataccttgccttttcaaaaagatttaaggtgatttatatgtgaaatataatgcaaaattggttttctttgggatgaaagtgagggtgggataatctaatgggaaatggaagcagaaaataagctgcttgtcaaaacagtacaaatttaagcaaccagtgggggtaaaagatagaacttgaattccttgactattagagaatatattgaagttataatatagtatttctaattcttgtcatctttccccccatgttaggtagaatggatgagtgataaattgatgagatgttttgaagacaaaagaaataatccgtttcagtttcgccatctctctttatgtcatggtctttctgacttggcccgtgtacctagccctaaagttgtacttgccagccaacctgacctggaatgcggattttcaagggatctctttattcagtggtgtcaggaccctaaaaactcaatcattctaacctacagaactactcctgggactttagcacgtttcctaattgataatccttctgaaaaaattacagaaatagaggtaagcacttgtatgtgaactttatcttaaaactgtttgggggatacattgtgcatgatgtaaaaaaatagtgaccaaaaataaaacttgaaattgttttaggatttttatcagaattactcttgagagccaggagtggtggtgtgtgctgtagtgccagctactcgggaggctgaggcggaaggaccactcgagcccaggaatttgaggtcagcctgggcaacatgccaagacccaccccccatctcttaaaaaaaaactactgtggaagagagcctttaatagcacaaatttcagagttccttaactggaggttctcattcttctttgagatggggtcttgctttgttacctagtctagagtgcagtggtgctatcatagttccgtgcagcctcaaactcctgggcttaaaggatcctcctccctcagcctcctaagtagctggaaccatagacatgtgccaccatgcctggctatttttttatttttattttttggaaagacgttgtctcattatgttgccatgggtggtctcaaaagaaattctcattcttaaacttttccgtggtaccctctagtttacccagagggtaagcatatacagggttttctcaatctgtgaaaggttcctttcctgtctcttgcttaatttaaatcagactctttcctaaagacgttctttatcctgtagccccctgaagtaattactctttctttcagtgtttcatgtactttgaatggagtacacgtcttccttgttctgtattgcagcttcctagctacttatcttccatttgcagtttttgccttcagacctgctgatatgctgacccctccttgtttctgacatttaatgatctcttggtcattctgttactcattcatcatttgaccctgattcacagtcttcctgtccacttgtgttcaggactttattctcattgactttagcatccatgtgtatgatctgtctggttcttctcagttacttggcaccttatttcttaatcttttccttcgtcttacctcagacatccattcctgctatcatgctatctgctcctgtggtcattgcctgtaaccttcttatggctgaacggtctccagttctccacctcaagcatatcattctgaatttacagctgactttccctattattcccatgacaacaactcttctgttccattgggactttcagttcgtgaacctcaccttttacagtctgtcatccttccagccttaaactcagtggtccacaattaagcaaaattttgcaaatacatttaactctcctacacttctgttttagttgcctggaaaggctttgaccttagttaaaccatttgcttggtttgtgcctgtacttaagcagctttatgtttctgaagttaaacattatggtgtagacagatttgttttcacattcataacttcacatctcaaaaggggaccccataccagtactcagcatttggtaggatgttccctttctcacggtaaggtaattgtatatcttctttctcctcaaacatcctacagctcactctcagccttcattcatagcacatgatcttgtctcaaacttaatgtagaagtcaaagcagtgagtcaggaattcctttatctttccaccactaaatgtactaacttgattctgcatctgcatttgctgccttatctcttgttataggaacaagactattagctcactaaccagtatacccaaagatcatttgcttaataaccagcccatcaaatctatcgatttttcaaaattagtatatcattaaagtttgtagcaattgatatagtgggatggttaataactgccagagttgtacaaaggtttagctgactaaaccttaacatagaactgtaacaaaccttaacataaagcagtatcataaagctgcttctcattttgtctttgtagcactcatataattatttaattagagacagactctcactctgtcacccagcctggagtgcagtggcaccatcatagctcactgtaccctcaaactcttaggctcaagctgtccctacaccaccccctaacccactccaccttccaaagtgctgggattatacatgaaccactgcacctggcccttagcagtcattttaaggaaagtttagtttgttaaaagctatgtggtagagatatctgtctgccaactctacttaagaaaatcataacatcagtaactaaaatctgagatatatgtactataattatagaattgttgagcaaggattctgagcaagtatagcaaagtaaaatggtgtctttggggttatttagtagctcagaaatacaaggttaaaagaactaagaaatacttgaaacaatttcatcagataggaaatactgaatttgaaaattttaattactagaaattcaattaggtctaataaaccatttgaggaattagtaaaagaaaaatggtttaagtttggaaaaaaatagacaatgatgtttagaagcatgctaaagaaatgagaaacagccaaaacatcaaatgttaagtttttgacctttttaataactaatgctgatgctcagggaccttttcttgctcaccttcttagcgatagttcttttgcagttatccctcctatcttcattatctagcagttttccctctacttgatcacatccaaaacaatttttattcttcccctactcccaatactgttctgtcttatctcagacagcacttcccacatattcaagccaaaaatttggaagtttaaaaaatgttcactgaatcgtaatatgtaccaaaacctacgttaagtgtatagcatgatgaacttttacaaaaattgaatgcacctgtctagcctgtaccctgatcgagaaatagaatatttctgtggcatgttgggcagatccaactaaggtaaaaaatagaaatggtaaaaaaagaaatagagggctgggcgtggtggctcacgcctgtaatcccagcactttgggaggcagaggtgggcggatcacgaggtcaggagttcgagaccagcctggccaacaaagtgaaaccctgtctctactaaaaatacaaaaaattagcctggcgtggtggtgggcgcctgtaatcccagctactcgggaggctgaggcaggagaatcgcttgaacctgagaggtggagattgcagtgagccaggatcgcgccactgcactccaacctgggtgacagagcgagactccatctcaaaaaacaaacaaaaacacatacagttcactctcttaaccatttttatgtgtacagtacagtagtgttaactatatgtacattgttgtatgacagatctctaaaactttttcatgtagcaaaactgaaactctgtacctattggataacagctcccagagagagcttttaaacattcatcatttcatgtcattcacttgcttaaatggctccaaagccttccttcttctctttcaataaaatccatgctacttacacaggcttcttagatcccatatgatctaatccccacctaccttctgaccttagcttattccactttctctatgccctacggtgcatcaggatctttgtactagctgttcttctgcctatagtgttctttcctggctttgcgcatggctggctcctggtcattcaggcctcaggtttaaccccctcaggtaggcctttgactacagatttaaaatacctgcctggtttagctgcccatcaccttacttgaagtatttttcctagcactcatcaccatctgatgtatttcttttttgttgtcttcctcttcccaccatcaactagaatatgaattccatgagaaaaaggcccttgttttttggtatccctagcacccagaactgtgcctgacatattggagggcttcagtgagtgcactggttgaattcatgaataatcaaaaaagtgaatatggaataaactagatttctgattatgttagataagaaaagtttaccaagtatggtattttttcatctatatctaatgcccttctaagtcaagtcttactcatttagaaaaagcaaaaatgaacaacgaaggattaataggttggagtagatttggattagaaaaaggagtaagttggaggtaatacggtgaaggagtaggaagaaaaatatttttgagttggttattctagaaatctgtttctgaataagccattaatcttacatattttaaatgaaaaataagatggagataaaaatttattatagcaacaggcataaactaaatcacagaggtaaatactttgttaaagattattggtgggtaaaaggcatctatgtaggttgctaactgtttttaaaaaaaacccactattttctgaatgaaacttattttcaaataagttattaggcaaatgtgagatgccaaatataaacatgtatttatttgtttattttaactttttattttttgagacagggtcatgtcattccctgtcacccaggctggagtgcagttgcatgatcatagctcactgcagtcttgaactcttgggctcaagcgcgcctcctgcttaagcctcccaattagttcgcactgcaggcatgtgccgccatgcccagctaatttaaaaaaaaatttatagagatgggaacttgctgtgttgcccaagctggtcttgaactactggcctcaaacaattctcccaccttggcctcccaaagtgtgggtattataggtgtgagccactgctcctggccttaaacatgtaaatcacccatttattttatacatgaaaataatctgattttggtttaatttttttgtttttacttgtctcccctccccttaccccactgggcagcccctgaactagaatagtttcagagagattcccccttttccattacttttaattttgaaaaaatttcaaacaggaaagttacaaaaatattatacccagattccccaattgtcaacattttactggatttgctttatcacttatatacacataaacacaatattactttttctgaaccatttgaagaaaaattgcaaatattttatcattatctctaaatattgccagtgtgtgttacctaaaaacaagggcaatctccagcaaaactgtgttacatccattgaaatcaggaaatcaacattgataccatcctaccatttcacccattgaccccattcagcattcaccttttaccgatgaccacaatgtcctttataattaccctttccttttttgtccaggttcgcatccatgactacatactgcatttaattgtcataactgttgacatttttgaagcatatatattctgggttttttttttcttattgatatactaatacctggtttttattttatttttttaaagagatgggagcaaggtgtggtggcatgtggctgtagtcccagctattgaggcaagaggattgcttgagcctaggagtttaaggcaagcctgggcgatatagcaaggcctcttctcaaaaaaaaaaaaaaaagaaagaaatgtatatatatatatgtagagagagagagatgggaccaaattatcatgtattccacataccctgagacttgtattttcacttgagtccttcttgaacaatgtaagaagatatgggtctaccttacatagtacctggtatattacaaacatttaaatgtttttggataaataaatgtaagctttttagtaattttataatagtacattgtatatgtgtgctgtgattatttaatctcgtggttctcaaaagtgtggtttgaggacgcctgggagtccctgagaccctttcagggagtccacaaagccaaaactatttttcataatactggtaagatgatatttgccttttcactgtgcctacatttgtactgatgagtaagatcagtggtgcataaagtgcttacaccttggcctaaaactccactagtagccactgcatttttcaccaccgtacatacacgtcattaaaaaaaaaatgctagtttcacttaagaatgtccttgagaggctgggcgtcatggcccatgcctattcctaacactttgcgaggctaagatgggaggttcacctgaggccaggagtttcagaccagcctgggcaacagcaacactctgcctctacgaagtataaaggtatattaaacaaaagaaatttgaaagagaatgtctttgaggggccagacatactggctcatgcttgtaatcccagcactttgggaggctgaggtgagaggattgcttgaggccaggagtttgagaccagtctgggcagcatagcgagaccctgtctctacaaaaaagaaaaaaaagtccttgagggaatagtaaaagttactaatattactaagttctttcagtaaaagtttttttgtttttttttgagatgggtcttgctctgtcgtctaggctggagtgcagtggtacgatctcggctcactgcaacctccgcctcccaggttcaagtgattctcctgcttcagcctcctgagtagctgggactacaggtgtgtgccaccacgcctggctgattttttgtagttttagtagagacattgtttcaccatgttaaccaggatggtcttgatctcctgactttgtgatccgtctgcctcagcatcccaaagtgctgggatcacaggcatgagtcactgcgcctggcctagtaaaagattttttaaaataatttgggtgacaagatgggaagtattaataaagaatttgcgttgtgtactaaagtacaatggctatctccaagaaaaacacttgtatgtttatttgagtcgtgagttaaactagccacttttttctgggaacaccttttttttgttggtattttttttttcttgtgtttgagacggagccttgctctgtcgccaggctggagcgctcggctcactgcaacctctacttcccgggttcaagcgattctcctgcctcagcctcccaagtagctgggactacaggtgtgtgccacgttgcccagctaatttttttttttcatatttttagtagagatggggtttcactatgttggccaggctggtctcgaactcctgacctcaggcgatccacctgcctcggcctcccaaagtgttgggattacaggcgcgagtcaccgcaccaggccctgttttgtgtgtgtgttttttttttttgagtttgggtctctgttgcccaggttggagtgcagaggcacaatcatggctcaccacatccttgaacttctgcgttcatgtgaccctcctgcctcagccttcctaccagctaggactacgggtgtgtttcaccacacctgtaatttttaattcttttttgtagagactgggtcttgctacgctgcccatatggtctcgaactggcctcaagcaatcctctcacctccgactcccaaagtgctagaattacaggcatgaatcactgtgcccagtctggaacaccatttttatgtgaaataatgacagggttattcagatttgggtatttggcagacattttcttgaaaattaatacattgagcctgtcactctaaagaaaacaattgacagcatttgttggcttaaatctgataaaattctaattttcaaatgaaaatttagaattttggaaaacttatacccagcactgtgagattgacaacttaaactgaaaagacttctgataagattggtggtgatatttacaaatgtgattttaaaaatattgtcaacatttgtaagatctggataacttggtgaactagtattttccaaataaccaattaattatgttagaaaataatgcacaaattaaaagatccattcaaaatttaaaatacaggctgggcacagtggctcacacctgtaatcccagcactttgggaggcagaggcaggaggatggcttcagttcaggagttcaagactagtctggataacatagcgagaccttgtctctacaaaaaattaaaaatcagctgggcatggtggtgcacatctgtggtcgcagctattcaggaggctgggaggtagaagggttgcttgaacctgggagttcgaggctgcagtgagcagtgatcatgccactgcactcatcgtaggcaacagagtgagaccctgtctcaaaaacaaaacaaaacaaaacaaaaaacaagagtgtaagatacataaaaaaaaaaaaaaattaacacaacagagtataaaaagtctattagtatggtttcaggttctgcgttaaaactaaccttgaagaaactaccactttctgagttttaatgtagtatcaaagaataatatccatgaaaggactatttacatatttttcccttttcaactatacatgcgtataagcctggattttcttcatatactttaaccaaaacaacatattgcaagagactgaatggagaagcaaatgtgagaatccagctgtcttctgttgagctagacattaaagagatttgcaaaaatatagaataatgctataggccaggtgcggtggctcatgactgtaatcccagcactttgagaggctgaggagggcagattgcttgactccaggagtttgagaccagcttgggcagcatgtcaagactcggtctctacaaaaaaaatacaaaaattagctgggagtggtggatggctgaagtgggaggatcgcttgaggctggaagattgagctgcagtgagctataattgcaccactgcactccagcctgggcaatggagcaagaccctgtctcaaaaaaaaaaaaaaatgccgttcttcccactatcttttttttgctttggaaaatgtaattattttttgtaaaaatctgttaatgttgccatgtggttttatttattatttatttattattattttttcatttttgagatgtagtttcgctcttgttgcccaggctggagcgcaatggtgccatctcggctcactgcaacctccgcctcccaggttcaagtgattctcctgcctcagcctccctagtagctgagattacaggcatgtgccatcacgcccggctaattttgtatttttagtagagatgggctttctccatattgatcaggcttgtctcgaattcccgaccttaggtgatctgcccgcctcgacctcccacagtgctgggattacaggtgtgagccgtcgcgcccggcctattattattattaatttatttatttttgagctggagtctcactctgttgtccaagctggagtgtaatggtgcgattatggctcactgcagtttccgcctcccaggttccagcgattctcctgcctcagcttcctgggtaactgggattacaggcatgtgccaccatgcctggctactttttatatttatagtagagacggggtttcaccatgttggccaggctggtctcggactcctgaccttaggtgatctgcctgcctcgacctcccaaagtactaggattacaggtataagccaccatgccctgctggttttattattttttaaatgaacagataaatattttaaaaattgctcagttttaatttctgataaggtagacattgataaatataacccacaaaaacaaaaagctctttggggttctctaatttttaggagtctaaggtagtcctgagataaatatatgagaactactgatttaatcattccattttgatggattttaaaattttgtccagttttttactactataagcattgctgcaatgtacgaatgtactttttttttacacatttgtgattgtttcagtaggataaattcctagaagtagaaatactgtgtcaaatgtcaaattttatttttagatgttagcaaattgccttttaacatagttgcactaattttccaacagataatggaagaaggtactctttccccatgtatggcattgccaatctcatagatgaaaacaattatgttttttatattttgtgcttttcaaaaattagtaaaattaaggatcttttcatggccagtagttatttgtctttcttattttgtaaattgcctttttaagtatcttgtgctttttcatgtgttgatcatccttttcttaactaatttggaagagctcttaggaaaaaatcatttttattggtcgtagtgctgaaaatatttttctgtttcttttttgtttttcttttcagtttcttattttgagatttaaaatgtcaaagggagtttttctttattcatgttgctgtatttatttatgtttcccattatggcttttgggcctcacctactccaaattataaaaatgcttatctgtattttcttttcctgattggtgatttttaaccagtttgattgtttggttgattgagacagggtcttgctctgtcagactgaagtgatcctcagtctcagactcaagtgatactcagtctctgagtagctgggactacaggtgcatgctaccactactggcttttttttttttttttctgagacagagtattgctttgtcacccaggctggagtacagtggtgtgagcacagctcactgcagccttgacctcccaggctcaagtgatcttccactttaaccacctgagtagcggggacaacaggcacatgccaccactcctggcttttttttttttttttttttatgtggagacaaagtctcattatgttgcccaggctagtctcaaactcaagtgattttcctgccttgcaaagtgctaggattataggtgtgagccaccgtgcccagcctcccagctaatttttaaattattcctagagacagagtcaacctatgttgcccaggctggtcttgaactcctggcctcaagcagtcctcccacagtgctaggattataggtgtgagctactgtgcctggccaaccagtttgatttaaattaaacccattctagatgatgtgtgacagctcaattttaatactaatctaaataggacctataattgtatgtaatggaaacttgattaatttcagaggaaacaatcagtttaaagatgatagagcaatttagagatgtgatgtatctcatatcccactgctttaaccccctaatattaacatattaacatttccttttgtcttttatttttttttagttgaggaaacgtgtgaagcttgaagggaaagaacttgaagaatacttggaaaaagagaaactaaagaaagaagctgccaaaaagcttgagcagtcaaaagagtgagtcattttcagacagattataaatttatggatgcaatttgagaagaatgtgtccttgacttaaatgtttcattgaaaatatttttaaattttcgtaagacttaattttgttacagacatctttcaaatgtctagaataccagatcctgtcagtgctaatattattatgcatttatttgttatgttttataaaatgtcagtccaataaagttgaatgttattccagtcatgcatcacttaatgatggggacagttctgagaaaagtgtcgttaggggatttagtcattgtgcaaacattaggatatatgtttacacaaaccttgatggtatagcctactgtgtatccagagtatatgatatggcccattgttcctaggctacaaacctgtacagcatgttactgtactgaatactgtaggccattgtaacacaatgttaagtatttgtgtatctaaatgtatctaaacatagaaaaggtacagtaatcttatgggacctctgttgtatatgtggtctattgttgttgaccgacataactgtatattatcatttaatattgaattaataatattgagtatggattcagtaataaattgataaatattaatttaaaatatctttgaaactttatgaccttgatctattctaaaatcctcctagggcagatatagattccagtgatgagagtgatattgaggaagatattgaccagccatcagctcataagacgaagcatgacttgatgatgaaaggtgaaggcagtcgtaaaggaagttttttcaaacaggcaaaaaagtcctatcctatgtttcctgccccagaagaaagaattaaatgggatgaatatggagagattatcaagtatgtgagcaaaacaaacttttctctcttacaaattggaggtattaactgtgttatcatttcatttcagtgaatttgatctttcacttgatctttctagtcacatgtatggggttagcttctgagtacctcagcctgaagacacagaagacttgtaacttgaaacataaaaatagagatgctgagaaacatctagagaatattgagagaaaactggcagtttatgacttagttgtgtaaaggtttaaaaacatgatcacgtgatcaagacttttttcccccacttaaaaagagaggaagatgtaggataggaagaactttggggctgtgtgtggtggctcatgcctgtaatcccaacactttgggaggccgagatgggaggatcacttgagctcaggagtttgagaccagcccaggcaatatagtgagacccccatctctatctttaaaaaaaaaaaaagaactttggatggctggtgattgcatttccaatggattatgtcttaagtattatacaagttttatgagattaagaggaatgtgagatagcatgagtgaaatcatggaaaaatctacaaaatctatactgactattagaaaaacaactgcaatcacatgttgtaattgcaaatttgaaaacactactatcctgtgtggaaaataaaaaaagaaaaacatgatacaggccaggtgtggtggctcacgcctgtaatcccagcactttgggaggccgaggcaggtggatcatgaggtcaggagttcaggaccagcctggccaagatggtgaaaccacatctccactaaaaatacaaaaaaattagccgggcgtgatggcaggcacctgtaatcctagctactctgggggctgaggcagagaattgcttgaacagggaggcggaggttgcagtgagccgagatggcgccaccacactccagcctgggtgacagagggagactctacctcaaaaaaaaccaaaaaacgcaatacatacagccatctggtaattgatatgaaattgcatcagctttggatgaaatgtatatttaaatcttgagatatgtgaggactccaaaaattatgccacctactagtcatatatgttatgtagtattagcttgctttttactgcttctaattagagacttattatttagaccagaggatttcttagtgccagagcttcaagctactgaagaagaaaaaagcaaattagaatctggtttgacaaatggagatgaacctatggatcaggatttatctgatgttcctactaaatgtatttctacaacagagtctattgaaataaagtaagtgcttttgtgacattttgaaaatagattataagataaaatttcaagcatttgaattatataatttacattatgtcaagcaaaatttctgaatattctttagtaagtttgtgcttttaaaatttatttttgtatgaagagacttgtgaagtatggtggcatgatattttctcttcattaatggtatttgaatgccaaagtaattgaattggtggtggtggggggtgcttaaattgtaacattaaattgtacatttatatgaagaaaaattatttttggcctttttattctgtaagcaggtgaaagggaataatgtgactcacagtttaatttttctgagtaactgcttgtttcataaaatatactccttaacttaaacatctctaagaccctaatgtctggaaaatactgttgtgatctgaagtagttagaaaccttttttctcccgctttctacttagttaaataataccagtaagtgatcattttggaatttcttttaagtcatcagagaacaaagttttttatttgtccagtaatatcatttagtatatatttttgggtgtagataaaatctaaataatacagatagggccgggcacggtggctgatgcctgtaatcccagcactttggtaggccgagataggctgatcactcgagatcaggagtttgagaccagcctggccaacatggtgaaatctcatctctactgaaaatgcaaaattatccctgcgtggtggtgcatgcctataatcccagttacttgggaggctgagtcaggagaatcacttgaacctgggaggtagaggttgcaatgagcgaagatcatgctactgcactctagcctgggcaaaagagcgagacccaatctcagaaaaataaaaacaaaaataaaataaatcatacagatactataacatgtgtatttctcaaatcctagtgttatatattgtatacatgataaaagccatttttttttagaattatgagaaaagtaatcttgaataatcatatctaattacagagcccgggttacctacatagactatgaaggacgctctgatggggattccattaaaaaaatcattaatcagatgaaaccacgacagttgatcatcgtccatggcccaccagaggccagtcaagatctggcagagtgctgtcgcgcctttggtgggaaagatattaaagtgtacatgccaaagctacatgaaacagttgatgccactagtgaaactcacatctaccaggtaaacatgccaggagttgccattgagtagaaataagtactttttgttgcaggttaggacagataacattagaaataccgagatgtgtgagacagacatggatggtctcctgccctagcagacctcatagggtatggggcttagaacaaggaaataccatttatcatgttgttgtgccactgagagaagaagtacaggatgctatgagagtatcaagaggggaaaccacccacatttagaggtttagaaaaggtttcctacaggaagtgataactaatcctaactgatgtttagatgggttgtcaggacagacagagtaggaaagggggggaagagcgttctaggcagagggaaccatatttgcaaaagtacagaggtgaggaaaatgattaagaattcaaaagttttagaagaattcccggatatcaaggttctactcctaattggaacaaatggagatggataccaaatataggactagcacagtagagagataaattttgtctggtaatgggagatggtgtcagtttaaggccagagtgatgtctatatctggaagaaatggatgtgcacataccaggcaggaaatttattctgggcagagtaagaagaagcaaccttccaagaatatggagatgtgaaattctgtggtatattcaggaaaggacaagcagttcagtacctactgaagtatgccaagtactagaggatgggagtgatcagtggttctcaaccttgactgcacataagaatcatctggggagcttcgtgagggtcagagggactcagtttttctggtcttaatcttaccagttatgttagaaacactggatatgacgctctgatatactttttgttttaattgccatgtgattccattttgtagtcagggttaagaatctctattttggaaagtaggcaggggcccaatgatctgcaggtaatgaggtcattgcaggtcattgtgggactcagatgagtgaaagattttccaattttaacatattaccagaggtagaaaatgataataggttatatttaatttgttaatatgtattctgtgggttttatttctctccccctcctttgcatgtctaggtgaggttaaaagactcacttgtcagctctcttcagttttgtaaggcaaaagatgctgaattagcttggatagatggtgtcttagatatgagagtttccaaagtggacacaggggttattttagaagaaggagaactaaaggatgatggagaagactcagagatgcaagtggaagctccctcagattctagcgttatagcacaacaaaaggccatgaaaagtctgttcggagatgatgaaaaagaaacaggtgaagaaagtgagatcattcctactttggaacccttgccacctcatgaggtaaaaaaagcatgtgcttttttgatttcttcctgaatttgtcatccttctagttttcatgtcttttggtttttttccccccttctaaaactaagtgggtctgtggaaccttttatatttttaaccatttaaaatatatgtcagctgggggcagtgactcacgcctgtaatcccagcactttgggaggctgaggtgggagaattgcttgaggccaggagctctacatcagcctgattatagggacaccctgtcagaaacctagtcggcatggtggcatgcacctgtaatctcagcttagaaggctgaggcaggaggattgcttgagctcaggagttcgagactacagtgagccacaattgtgccactgcatctagcctatatgatagagtgagaccctgtcttgaacataaaatatgtctcacatttgggctgattttggagtttttaaaaaagagaacttgtgacatgcttctgtgtgtatgtctctgtgtatatattaattctatatagctaaggaatgacatatctttagcaaatcttttaaggtacataattgtttcatgattttttttttttggtctggatttttaaattttaagtttgatgattgtgaggatcacctgcctgcttccagtcaggagatttatagttttctaagaaagtcatactgttttttttttgttttgttttgttttttgagatggagtctcgctctgttgcccaggattgagtgcagtggtgtgatcttgtctcactgcaacctccgcctcccgggttcaagcgattctcctgcctcagcctcccaagtagctgggattacaggcatgagccactgggcccggctagtttttgtacttttagtagaaacggggttttgccatgttggccaggctggtcttgaactcctgacctcaggtgatccacccatctcagcctcccaaagtgctgggattacaggcgtgagccaatgcacccagccaatagtcatacctccatttttttatgttattcagttcaaataacttttggttttgatatagttagaaatctttaagtatagatataatttagtctagcatttacatattcttgagaggtatctagttaactagcaagattctaggtaattaaacttggaaaaatattaaaactatgaatcctacatgcatgtcaagtgatgtcttcagccctactatgaaattaagaatagagagacagcctctgttgttggattcccttctagtacaaccctcaaaattgggaggaggaataagaatatttttttcttctgtgctaaagctaatgctcttcaaagtaatgtcaaagcagaaagcagcagcattaggcaagaaccactttcgttactgattgtagaacctatggcatccattacatttgctctgaggaaggagggacagggaaaatgggattggggaggaaacgtcttttgaagtaagcaaatgactgggatctagaaaatgaatttttggttcagtcctgcccatggcacgctagttgaccccattatgcaagtgggtgagtgaagagcctaacattaccaaacgtctctgttatgatgaggcatgactaacaaaactgattgtgaaacagaaaatgtgaagggctttgttaaataatgttaaataatggggtaaaatttagaataacaacttggaatgtgatttacagtcttgaaatgatctgtcaaaggacttcagggaataatagaaaatctcttagagataatgtagtattttactttattcagtacagttgtatgtctggtgttttacttgaagttattctttcccctttgaccttatctaaggttcctggacatcagtcagtttttatgaatgaaccaaggctgtcagacttcaagcaagttctcttacgggaggggattcaagctgaatttgtaggaggtgtacttgtttgcaacaatcaagtagcagtccgcagagtaagtgtgttttcaataagggctgaattgaacacatacgtctgatgttttgtcattttgaaattctgtaattcttgtttggtattttcacaaaactgaagatcagtaatttatattcatgatcatgacctcaaaggcttacagaagtcttattgacttgaaggcttatgaaagactcttgaagaaatgatatataattttattgtaaattttaattatttgaatcttctgacatttatgtctatgtaaaattcatgacttcaatattatatccatatgctgtgaatcagagcaacccatgtcctgaccaatcataaagtaatctatttcatatatttcggttattatgtctgcatattaatgaatagaaaatgtactaaagaattttttttatttggtttctagacggaaactggacgcattggattagaaggctgcctttgtcaagatttttataggataagagaccttttatatgaacaatatgccattgtataaaggacatgatgtcaagaagtatctgcttgacctttctaagaaaaagggattcttatcttactctgagcttttgatgttttgttttgtaacatacaaaaagaatctgccagaaaaacttacatgtatcagatttttaaaaatataaatagagaacattttgcaaatgctcaaatgagcattctatcttttggctttcagagtgatagagctcctaacaggtgtacaggcccaagagttgaaggtgattggttttctttacagactccttgttctctagaagggctttttacttgaataaaacaatgcaacttagcaaaccaatttatggccttagagaaacatttttgcatgagttcttacaaactgtttgttatattttctggaatgataagtgagaattatttagaaaagacatgctccaaaaaaaaaacaaaactgataaaacagtttttcgaaacttacttttaaaagcatacgtgctatgactctctccagtttgaatatgcaattgttttcacaggcaggatgtctgttttctgcctgtatttcccagtgatttactctagggtaaggtagtacacatttggttcagaaattaatttttatttctcctatatcttgttttatcaagattttgttgtggcatttcaatgtaaattataacaccatcatttgagtatacataattcaaaagaactacttgatgcagtatagtcttaagggttctgcatacattttagaaacatcttagccgtaagttaggtcctgtgttaaactgtttagtgctctgtttttaagaaaacaaatgttgaacctcacacttttatgtggtgacagtgtaatttaattaaaaggtgtaaatgttttcatctcttaggcttgctgtctcctaaggtcacccaagcagtggttggattttatacacattactactaaaataatactgaagttggataaggttatcctttctgtatttgcgtctttcttgtgactaaccaccctgatatagtattaaccactgtgttcaagagtaaaaacaatatatgcaattttcattgaacttaaagagtgaaaaccatgtaaactattgaaactattgtaatccattaatgcttttttagaatggcagaccttgatgtttatttctcaaatggttaagccctcttctttactcttaatttttttttgagacagagtcacccaggctggagtgcagtggtgagattttggctcactataacctcttcctccagggttcaagtgattctcccacctcagcctcccaagtagctgggactacgggcacatgccactgcacctggctaatttttatatttttggtagagacagggtttcaccatgttggccaggctggtctcaaactcctgacctcaagcgatccacccacctaggcctcccaaagtgctgggattacaggcatgaatcaccacaactagcctacccttagatttttggaaggatcgatcttatttaactatgtgtggaacaacccagtaatatcagactcgaattactatttcattctatttcaaatgcttataaagctactattgtagattatagtgttaatgcaaagtttacagacttttgatatggaaaaccagataaaacaatgttacaaaaggcaaatataaagagtatgttttctttttagtgctttggaaaaatttcacttaaactcttattactgtatagattaagccctataatgctatttatattccaggggaacgaaaatctgaatttgttttatgatttaaagcatctggtttgcatattgtattgtaatactgatacagtttggctgtgtccccaccaaattgaattgtgttaatagttcccataatccctacgtgttgtgggagggacccagtgggcagtaatttaatcatggtggtggttaccctcatgctgttcttgtgatggtgagttctcatgagatctgatgggtgtttttttttgttttgttttttgttttttgagatggagttttgctcttgttgcccagactggagtgcaatggcacacgatctcggctcaccgcaacctctgcctcctgggttcaagcgattctcctgcctcagcatctcgagtagctgggattacaggcatgcaccaccacgcccagctaattttgtatttttagtagagacggggtttctccatgttggttaggctggcctcaaactcccgacctcaggtgatccgcccgcctgggcctcccaaagtgctgggattacaggcgtgagccactgctcctggcccaagatctgatggttttgtaagggaattttccccctttgcttggcacttcttcctgctgccatgtgaagaaggatgtgtttgcttccccttccaccatgattgtaagtttcatgaggcctccccagcctgtgggactgtgagtcaattaaacgtgtttactttataaattacccagtctcaggcaattctttatagcagtgtgagaacagactaatatgaataccaatactgaaaaattgtttcttgcctcaccttgtcctatgaacaggaattaaattttaaagtattgccttaagatggctgtgctaaataataatcattgcaagagcaatacttttacctgtttctagatgacaatattactaaaatttctcaaatgaagactttgttttagcttcaattacttcagaaaatataaattttaaagatgactatgagataaatcatgaactcagtggaattttcagatgagatggggcgcgttcagggtggtatgactgtagacggaattttcagatctttgttatttagaagcaagtataggtataacgtggactatcaactgatatctgcaaataatttggttaaaatgaaatttgattgtagtatttgttgctgtaggattataaatgtcaaatatcattgtaaacatttctatatttttagaaatatcttgggtggcctgaaacagaagtgaggaaatcaattttttaaggtgagccatttggcttttttaaaaaattgagattcaacttacataccataaagttcactcttctaaagtgtacaattcattggtgttagtatatttacagagttgtacaactattaccactatataatcccagaacactttcatcactccaaaaagaaacaccatacccactaccagtcactcctcatgcccccttcctatgacccctggcagccattaatctactttctgtctccttgaatttggattttctggacacttcataaaaattgaataatacaatatatgaactttta

SEQ ID NO: 1098 - DNA, 43053 bp, Homo sapiens
aaaatggcggctgccactgtggggcttctgccggccggtagtccctggcgctgctgacccagcatcggcttttctacgtcttgaacctggattcgcctaggggttgggaagggctgtggacggcgttgggggaggcctgacgaggcaagtgagggcgggagaaaggagcgagcctcgggctggggaaggcggcgtcattggccctccgggagcacggggccccgactccgacccggtctcccccgaggactcgcccccgccgcttcggctgcgactgtcccggtcgttcccggcagaagtggtcagcgagggaaagagaagtgacttctccatgggtttcaagctcccagctgttttgcggcagcccgtacggttccctcccgggatcttcttccctcctttctgcttccctctgcttcccctttcatctcttggcgctggaagagttaaaccgacgccagctttagctccttggcttcgtggctacggcgttcttagcctcccctgctcgggctcttcccgtcgttttgggttgagagaccacgaggttgctaagctctggacaccgcttaggcgtccttttagttcttcgactccagagacctttcggttgtttgtaccacactgtactaaaagggtcttgggccttcgcgccctcccgccatcgccctccagcgcttccactatcactgcgaagttctaattcttttttgacttcgtactattttacgtgctctttagaaaagaagaggtcagattgaaccccggcaagtctggcttcctgtgaccaggcgaacctgagctatcatttatacccatcccctaatttttaattttacaacccctttaacccctttcttttttctttctttttttttttttttaataaagacggggtttcactatgttgcccaggccggtgtcgaactcctgggctcaagagatcctcccattttggcctgtgctgggattccaggcgtgagccaccatgcccggccttgcaaccccagtatgaaactggggctctccctcaactgaccgagaagagccttccccactcagtgagctccagggctaacccaaactcctctgttttcccttggattttgcttagttcaccttagttgtcatcaacatgcacggtaattattttttatttttgagaaggaatctcgctctgtcgcccaggctggagtgcagtggcacgattctcggctcactgcaacctctgcctcccgggttcaagtgattctcctgcctcagactcccgagtagctgggactacaggcgcgcaccaccacgcccacctatttttgtagctttagtagagacagggtttcaccttgttggccaggattatccgcctgcctcggcctcccaaagttctgggattacaggcgtgagccaccgcgcctggccgatttattatttgagaccgggtctcgctctgtccacccaggctggagtgcagtggtgccatctcagctcactgcaacttccgcctcctgggctcaagtaatcctcccacctcagcctcccaagtagctggggtcaccagcgcagccaccgcgcccggctacttttttgtgtttttagtagagaaggggttttgtcatattgcccaggctggtctggaactcctgagctcaagtgatctgccctcctcggcctcccaaagtgttgagattaaaggcgcaagccactgcgcccggcaacatgcacgattattattaagagggcaagtaactgtgagatatttgcgatgaagtagtatctgtcaaaaccagtgctctgaaggaatttatgatatgatgaggcttcattccttcttgcagtacccatttatgctgccttgaccactgaagttggtattggatatacaaagatgatcacttttactcctctatacattgaacatccattcaacaaatactttatgtgcctcctttataacaaaataactaactttgcctagggcaacaaaaaggctttataaaggagtaaatatgtgagctgggtcatatagcatcaaaaggaatttgctgagctcaaaaggagaaggtaatttcgggattcagtacaggaatacagagctttgagaagctttagcatacttagggagagtgggataatcaacctgcctgagcatttagtgcacgagtgattggtgaagcaagaggtaggttaagatcagcttgtgaaggatcttggtttccaatagggagtttagatttttttcagtagttaccaggaatccagtggatattttgtgcaaggagtgagcaggaggatatttgtttttttaggatggtctctgacagctatatggaggatcaactgggaacagaaaaactagatgaaaggaaatgggcaatcattcaggtaaggcaatgagggcctccatggaggcaggacataaaggaggtcagagagacactaagtaaatgtcaaatgggattcacctgctgactgctaagttaatggtaagaaggtgacttgagtttttagtctgggagagtaaatggttggcaatactattaaaacttagtctgagacatgtacataaacataggatggtgccaacctgcactttaggggtgacaacatgatgctctatagtgtaaagcattggtttttatggtctggagtctagatctgcactgttatggtagtcactagccacatgtagctattgagcacttcagatgtcgttagtctatttgaaatgtgctgtaaatataaaatacacagtggattttgaagatttaatatgaaaatgtaaaatattcaacatgattacatgttgaaataatattttggttctattgggttaaataaaattcattaaaattcacccgtttctttttcacttttccatgtggccatgaagaaattaaaaagtacatttgtggcacgcattatatgtctgttgacagagctgttctagtctagactagatgtgggaatttgtaaggaggtggaacatgagctgggcctgaagacattgagcagtgatgtcagggtggcttcctggcaacctccattgccagttaaggcatttggtttgtcttttctcaagcagtaagaagccttcagagatttctgagcaaggggtaataggtgcagggtatttctgaagatgaatctggtagcaatgtttaggttggatgaagggaggaaatactggaggcagagaaactgagaaacccaaacataaggtagtgaggcccttcctgtattagggtactggcagtgggatagaaagggaatgatgtgcaaagcgttcctgagggaagaataatcaggaactggtaataatagactgtcccagaagtgaagaatcagcatgtagcatttcaaaccttggttacttagataacaactaatatattcatgtcgcagagctataaaatacaatttgagactgaagaaatttggtcacaagatagaatcagtaacgttaggaaggggtggtccactaaatactttcgctttttatctccctgctttctgtatcatctcatcaatcatacacaccagctaatatccccaaaatacagaattacctgtatcatgccatctttctacttgataatgagtcttaaaatgtttctgttgcctgcaggactaggttcacagtttccaaggcctttcactatctggcccctttctgttcattaggccttatcttttattttttgcttttgtgaatgttttccaggctagttttttcactggtactttaaaacttactcaaaagtgtagagatctgagatgtctggtattcctttactcctgttactcctctgttttgagtaccttctctttgtttctacccatgtcttaccaatccttagtgagtaatcttaaatcccacctcttctatgattctcaataacataaggtaatgtcaacttaaaaaaaaacttcctaaatatttttatgtcttttattatctgttatgtaagcttaagattcctaaaattaatgacagatctcttttttaaaaaaggaccacgtattatactacttgctgctgctcctgatgccttagggcaagatacaaattaaacaccataattataaacagaatgaaatcataataccacattcataaggcttttatttattttttagattaataaagaactcttcagaattcctggtgtttcatcatatatacgactaagatatcagtaagtagtgaatgtttgataaagatatagctttattatgaataattgtagtgaaaatatcttttcatctgttgaaatcttggtctgtctgcaaaacagttttaatatgaacttactcagttctagctgcaagataccttgcatgttacttcataatctaaatgaagaaagtgggaattaaggaagacttaagtagaaaagagtttcccttaggccattaatataattgtggtacagtaagctttttgacagggataatttccaaggtcctttccaaaattgtatttataaacgtttttcatcaaatagagaattaatgtctttgtaccccaaataagaacacatgaaggccaggcgtgctgtctcacacctgtaattccagcatttggggaggccaaggtgggtggatcacttgagcccaggagttaaagaccagcctgggcaacatagtgaaaccctgtctctacaaaaaattagccgagtgtggtggtgcgtgcccgtagtcccagctacccaggaggctgaggtgggaggatcacttgagcccaggaggttgaagctgcaaatgagccatgattgcaccactgcactccagcctgggtaccagagcaagatcctgtttcaggaaacaaaaacaagtcaatatattttaaattttaacttaccaacagttatttattgaacaaccactatgtgcagggatgtgctaatgtactaaggataaaaaaatggatcaagccaactcctgtactcagagagctctcccaagcaagggcaaatacatgtggatgggttctggtttatggtgtggtaaggacagtgagcttatttaatactagccatgccccattccttcctttaagaaacatttatcggctaccactgtatattaggcactgtggaggcgctggaatgtaactgtgatgaaaacagagaaggtctttaccttcatggagtctgcattccagtgtgggcacaggaggggagaaggtgacagacaaagcaagtaaataaataagtagcaattagagagcactaagtattttgagggaaatagaatgatgttgtaatggatgtgaagaaggactttagggtggtcagagaatgactacctctgagaatgactcagaataaattagagacagggaaaatatatataaaagttagaggttttggtcacagtgaagagagaagaaaatttgagaaatataatgagttgttatgaaagtatatcactggaagtgttttataaaggtcattgataaacctctatacaacttaagccaatggacatttctctggcttctcagacttagtgcaaatgggaggtgaggaagtggagatatatctgtggacaaatattctgagaacttttgctgtgaaagggaaacccaaaaatgatgtagtggttgttgggggttgaagggttaagagagggttcttataagttgggaaattctagagtatttttataagcttgtgggaatggtacatcagtgatacgttgatgcaggggaaagagcgaatgactgaagatgtcaagtctttcagaaggtgaataagaatgggatcaacggcacacatagagggattggccttggatgggagcaggactattctatacaacaggagacccaacagtgtacatgcagataggttaatagatgtagtatctggaaaatgagaaattattgtctaattttattttctgattgaagaatgaaatgagattatcagctgagactagggtggagggagggatgggtgatctttgaacaaagaggaggaggtgtggagtagtagtctcagaaactgaaagtcaacctactaagaaaagtcagattgaagggtaatacttacggcctgtttgaggcctttggccatgaatttaaagagcaaatagcgttagccaggtgtggtggcaggtgcctgtaatcccagctactcgggaggctgaggcaggagaaatacttgaacccaggaggtggaggttgcagtgagctgagatcttgccactgtataccagcctgggtgacaagagtgaaactctgtctcaaaaaaaaaagaaaaaaaatgggccaggtggatcatgaggtcaagagatcgagactattgtggccaacatggtgaaactccgtctctaccaaaaagaattagctgggcgtggtggtgcatgcctgtagtcccagctactcaggtggctgaggcaggagaatcacttgaacccgggagatggaggtggcagtgagccaagatcgtgacactgcactccagcctggcaacagagtgagactccgtctcaaaaaaaagcaaatagcacagctgtaattctcctccatatcccatccccccgccggccctgcatgattggagttaatcaggactggggttttgccagcctagtagagagaagtacctagaggagcaagacatttgagtgtttgcaaataatgttaacagatcatgaattgaaggtgaggacctgagtaaaaacaggagggggtcatggatagggaaaaagtagtcagcgaattagagagataccactgaccccagaggatttttgcaatgggaatactagagtaagtaaggtgttagagaatgagatgcttgaagtgaaattttgaaagtagaacagttactggtagtgataaggtctagggtgtaatcgtagtggtgggtggctgaagtgaaatgattattggagttgaggaagtcaaggaaccaacaggtcagtattgaagttactgagaggaacaacgggtcatgtaaaagtcctcagtgaatgaggccaggtgaatagatgccatagtgaagaggaaatgtggaagactaatagtgaactgctgggtggcaagagctttaatgggactagactatttgaaagaggaaagagaagacatggtttagaagctgcagtgaggagcaaggaacacatacctcctgcttttcaagtacagggggtacaagaagttaaaacaacaacaacaaaaaaccttgagaaggccgtaagaggaagagtatgatgagggaacagccaggtacctgggaagacaagcaggtgaagagaattttcagagaagcagttgcagttacaggtgagtatgatcacagttccagagagcatcctgaaaggatttgagagggagaagaggtaggggattaggtcttactgggagacgtacacatcgttgataattgataacctagcagtcttgtgattttggctgtcactcagataaacaaggctgggagatgtggtgggtttagcagcccctgtcagcctcttatgaaaggtggatattcagtttaccttagtttgttgatggccttgagtagtggtaagaaattattaggtaactcggtggccttctctcctacttgcatagttagccaggaaaagctcatttattttagggagctaaaatctgaaatgttgctgtggagttgaactttgctaatgaatattttcataacttctgcttaatagcacacagttccaggttctaaatcccatttttaaaaaatgtatatattttattttatttattttttagatacaaagtctcactttgttgcccagtctagggtacactctagggtctcactctgtgcccagtctagtggcgcactcatagctcacagtaacctcggactcctgggctcaagcaattctctcatcttggccttctgagtagctaggactacaggtacatgccaccagccagttttcttatattttttttttgtagagacagggtctcactacattgcctaggctggtctcaaactcctgaactctagcagtcttcctgcctcggcttcccaaagtgctgggatcacaggcgtgagccaccgtgcctggcctgtagatgtgttcatgttatattttcctgaaatatatgtagtaggcatcccaatttgcatttcatcagatatatgttgaagcgtgcatcaggttctatttagggagttgcaaacatatgccacctatgtttttcagttgctcacattccaatgcaagggttcttaatgttaaactccctgaaaagtttgtgaatttctacgtgtatatgtactcttgttttttgtttgagtgtgttgagagttggtgggggagggggagggtccataggtttttatcagattctcaaggggatctatttaaggaccactggtctaattaatgggagagaaagacatgtaaactaatcattgtaatacagtgaaatcagtgccatcacaaagcaagataaaagaggaagagattcaccttgaaggatgagttcattaattcctaaacatttatttattgaggaacttggatgcagtagtatctgttataggtaatttatacattatttgaaatacttcaacattgtttttacatgtatactaatactaatgttttatagactgagatacataggtgaggaaagtttaattaacttgcttcaaatcacatagaagtagattcatatatgggtctatttgattgcaacattcactaccccactagggagccactaaagggctcattgtgtctaagattatctttgtgcttttaaacttggcagtgacttaataaacttgctttcacttaaaaaaaaaaagtaaacttggcaatgatggaaatgggcctttaaactgcttttcgtgttaatggaatttctatgcacttaaagatttgaaataattttaatcaatttgtttattatatatgccagactgtgcttttatgtttaattatgttttcatttcatttgaaagactcttctagcttgctgtttctggaccaaaaaaaatgacgtctattatcaaattaactaccctttctggggtccaagaagaatctgccctttgctatcttctccaagttgatgagtttagatttttattggactgtggctgggatgagcacttttctatggatattattgattccctgaggaagtaagttacatttcataattctatgtttttattaaatcaacttctcttttctgtactgtaataccatttcgatgtgataaatactgcctttttacactagtttatagcaaaaggcttaattttacttatgccaaaaacctatagtgacattttaacttgtaaagttttgattgacttataagctttgcttgttgaaattcagcaaaatcttaagctaatggatttcagtagaaacttttgcatgctaatttttggaaagaacaagaatacataagaatttgagaagaggaaacattttccatgtgaaagttctgtggtcagatcacattagcttactttctacatcttttgatgcttaacattgtcagctggttctcagaatgaccatgagatactgattcatcaaaaaaaaaatcaattatgggctgggcacagtggctcacgctggcaatcccagtactttaggaggctgaggtgggcagatcacttgagttcaggagttcgagaccagcctggccaacatggtgaaactccaactctactaaaaatacaaaaattagccgggtgtgatggtgtgcacctataatcccagctacttgggaggctgaggcaggagaattgcttgaacccaggaggcagagattgcactgagccgagatcgtaccactacactccagcctgggcgcaaagcaagactctgtttcaaaaaaaaaataagataaaataaaaagtcaatgatgtttgcagtattatactaattttgcaagaaaagaggacttaaatatttaaaaaactttagaacttgagaaaaaaaatccaaaccattttattaatttcttgtgttgatgagaacatatgcttccctgattaactgaagttttactattcaattagcaaaactgtctgtggttactatgcgaaaaagctgggacaaaaatccattataagtatgtggccatataaatatcctctccttaataatttctgaaattcttctcttttattattatttttttttgagatggagtttcacttctgttgcccaagctggagtgcaatggcgtgcttttggctcactgcaacttccgcctccagggttcaagttattctccttcctcagcctcccaagtagctgagattacaggcatgcaccacccggccggctaagtttttgtatttttagtagaaacagggtttcaccatattagccagactggtcccgaactcctgacctcaggcgatccacctacctcggcctcccaaagtgctgggattacaggcctgaaccaccatgcccagccaataataatttctgaaattctaagctgagttcttgaacttaaattaatagtttgcgaccaggcacagtggctaatgccggtaatcccagcactttgggaggccgagggggcagatacttgaggtcaggagtttgatctcagcctgaccaagatggtggtcccccatctctactaaaattacaaagattagccaggcatggtggtgcatgcctgtaatcccagctactcaggaggctgaggcaggagaatcacttgaacctgggaggcggaggttgcagtgagccaagatcgcaccattgcattagagcttgggcaacaagagtgaaactccgtctcaaaaaaaaaacaaaaaaaacaaaaagagttaagtgaggctgggtgcggtggctcatgcctgcaatcccagcactttgggaggtgaggagggcagatcacctgaggtcaggagtttaagaccagcctggccaacatggtgaaagtgtgtctctactaaaaataaaaaaattagccaggtgtggtggtagacacctgtaatcccagctactcaggaggctgaggcaggagagttgcttgaaccgggcggtggaggtcgcagtgagccgaggttgcgccagtgcactccagcctgggcaacagagcgagactacatctccaaaagaaaaaaaatagtatgcaggatagctattaaaaatcaacttatggccgggcgtggtggctcacccctgtaatctcagcactttgggaggccgaggtgggcggatcacctgaggttgggagttcgagaccaccctaaccaacatagagaaaccccatctctaccaaaaatacaaaataagctgggagtggtggcacatgcctgtaatcccagctactcgggaggctgaggcaggagaatcgcttgaacctgggaggcagaggttgtggtgagccggagattgcgtcattgcactccagcctgggcaacaagagcaaaactccatctaaaaaaagaaaatcaagttacttgtgtctactgttcttttttgtttttgttcttgtttttatttttaggcagggtctcactctgtcacccagactggagtgcagtggcatgatctcatcaaggtcaacctcctgtgcccaagtgatcctcccatgtcacccctcaagtagctgggactacaggctcatgccaccacccctggcttttttttttttttgtattttttatagagaacggtgttttgccatgttgcccaggctgatcttgaactcctgagctcaaacgatttgcctgccttggcctccctaagtgctgggattacaggtgtgtgccatcacacatggccttcttttctgtttaaaatgtgtgtacacaccatatatttaagtgtaccttataccacattttttgtagctatggagagcacaggtagtaataattgaaattcataggtaatcataattttagctcttagttttgctcttctgccccagtgtagtcttcaatccagaattggtgaataattttgaatattctgtctttacccttaaaaagattcaagaagtagtcctttggattgtgttcttgtaggcatgttcaccagattgatgcagtgctgttgtctcaccctgatcctctccaccttggtgccctcccgtatgctgtcggaaagttgggtctgaactgtgctatctatgcaaccattcctgtttataaaatgggacagatgttcatgtatgatctttatcaggtaatttaagcaattaaaaaaattttgttagcactccttcagtgattgtttttcacctttatttgtgttattcttttagtctcgacacaatacagaagattttacactctttacattagatgatgtggatgcagcctttgataaaatacagcagctaaaattctctcagattgtgaatttgaaaggtaaaaagaatttccagtagtaagtatttagatgaatggggtttaacttgctggaaaataccgaggagaattcagagagaaaattataggcattataggctgaagaataaaaaagttagcacattctgccttgatacagaactcttaacttccatttgaattttaaaatatttcagaaaaaatgctaacagaatgttaatagctcaggccttttcatatttaacttgggaaaaactcatttagtgtttactgtgtacaataaacaaaagataatgtggccatttcctcttcctcagagcttacagttagattgaggcaacaaagtagctgagatggctaaatgtagtgattggggtaaatgaagtgctatggcagcagagtagataatgaattctagcattggacgttaaaaagtttattattgaattaggaagtcctatactaagtctatatttatcatctacagagataattgtattagatattttcatagatatgaaccctggcattgataaaatggtgcaataatggactctgaagatttagcccagaaataacaacagtctcaacagttttgcttctagttaatttttctgcaggataaattctttagcacaatgagatttaaattattctgttagtttagacgttagcaaaaatggaaacatttggtaactgtatatacaaaatacacattaaaatttgctagttcatactaaataatttaatagtgtactagcttttaaatctaatctctagccttgtacttataagcacaaataactctacaagattacataatatagtaacaagaatgtttgcctctagtgagggagtggagtaggtgggggacaggagagtgaagcctgctttcactatatgcatttttacttttgaaatttgtattattgcatatacagtattacctattaaaatattatagttgagaaataaataacctttctttagggttgtaaaagaaatctgagtattgttatcttgttgacataggtaaaggacatggcctgtctatcacacctctgccagctggtcatatgataggtggaacaatatggaaaatagtcaaagatggagaagaagaaattgtttatgcagttgacttcaaccacaagagggagatgtaggtatatcaagagaaaagctaaaggcaatgcaattggtattattttattctttggagaaaaaataagaaacacagtttttgttttggttaccagaaatttagagcaacttaaaaccgtcaaatagggagtgttttcaaaattaattatttgcatagtaagggggaaagtatggtataagacataagagattttaaaaatttataggttaagtatacactctacaaaacgggtatctccctggagatgttgcaaaggagatgaattttttacgtatcaaattacatgttcttgacctgctatttaacacaactttgtggatgggttgttcttttgttttgtaacgtgatatggtttggctctgtgtccccacccaaatctcatcttatagctcccataattcccacatgttgtgggtgggacccggtgggagatgattgaattatgaggttgggtctttcccgtgctgttcttgtgatagtgaatgggtttcacgagatctgatagttttagaaacaggagttgccttgcacataatgtaattaccatctaatataactgccctgtatgtttaaagttagtccctttgaaagggaactcaattctagttatgattttacacacttcatgtggcactcagagcattactatataatattttggtgtttagtctcttacaggctcgttttgttttatctgtacattaagttcatagctattttgtgttacattacaatagtctcaggatctttatattaagaaatatttaagacaaatagactgaattttagacacttataaccatagattaatgaggaaaggatggctatgttgcagggcaaaagagtgagggtcgtgatcaactcagtataccactggaggctatatgagtaaacagcaaactgttcgcataaacgcagaaaattggcaaactgacaaactgtgtctgccacccagaaggaatgctgagggcagtcaggcctcaggtgcaggtgtttcttgtgattagacacatctgaagcctgttagcagtaatgtgaacctgtgatcaattaagcagctgaccaattgttacctcgtcctccctgctctttctacccaataaatatgaagggctgtagaagctgaaggcagctccctttgctcactagaagcagggagctctcttcttcttctcctgaccccttcctttaaaatagttacttttgttttaagttttcatttctgcattcgtcctccttcgttcagtctcgtagtaaccgtggcaaactgcagcatggctatttgagtaaatggtattgaaggattcaaccattttggaaaaaaatcaatttgtgtccttttaattatataacaaaagaaatttcagatggattagaactaaatagaaatgaagcaatattggtgagtctgatctctgatttggaaaagactttgtaagcataaaaataatgaaccaagttacaaagtaaaagtttgatagatttgatgacatacaggttcaaatgtctgaaacaacaaataaaaaaaaaaatcaaagtaggaaaatatttgcagcaagttgcccaaaaacttacaacatatatataagatcaagtattaatttattaataaaaatataccagttgcaagatggacaaaagttataaagtcaaaagagaaaatttaaatgatctttttttgttagataccattaaaattattattattcttatttatatttttatgtatttttttgaaacagagtctcactctgtcaccgaggctggaggcacaatcacggctcactgtagtgtcgacctcccagcttcaagcaatcttcccattttagcctcccaagtagctaggactacaggtgcgctctaacatgcctggctatttttgtaattttagtagagatgaggttttgccatgctgcccaggctggtcttgaactactgggctccagtgatctgcccacctctgtctcccaaagtgttgggattacaggcatgagccactgcactagtccaaaattatttttaaatggtgattttcttctgggaagtatgtagaattggtcagtctttttgattgaacttttctggatgaggttaaatcttgctggaaagccttttagcagtactatgtattaacagtaaatacatttttaggaatgtgacctaaagaaacaatcagaaatgcaattgaagcttttgtaaaaaatgttctttggaagattataatggcaaaaataagtgaccgaaatatcagtaaagggaaaggatcaaatacagtgtagacacaataaaatgtttttataactgttaaacatttagtttagaaaaaaatttttatgtcctgggtaaaaaccaggatatagaactgagcgtataggaatgtatatgggatatcagctttgtaaaatacatatgtatatcagtacttaccataagacagggcaaaaagaaaaataaaaaaaatacatatgtgcatagaaaaacttatatggttagcaggatgtacaccaaaatattatgtcagttatctctgagtaatggtactctggaagatttttattttcttctttatacttttttgaagttactggatttcttatcaatgagcatgtctacttttatagttagaggagggaacaccttataaatgaagctgcttattttttaagtaagagaagctattattgtttacttgaaatgatataaaatattcctcttcttaaactttcttatagccatttaaatggatgttccctggaaatgctaagcaggccttccctacttatcacagattcattcaatgctacatatgtacagcctagaagaaaacagagagatgagcagcttctgagtacgtattctttcacgtccttattattattattattttgtaactttttgtatatttagggaatataagtacataaaagtacaggtttctttttttttttgagacggactttcgctctttcacccaggctggagtgaagtggcgcgatctcggctcactgtaacttccgcctcctgggttcaagtgattcttgtgcctcagcctcccgagtagctgggattacaggtgtgcaccaccacgcccagctaatttttgtatttttagtggagacagggtttctccatgttggccaggctggtcttgaatttctgacctcaggtgatccacctgccttggcctcccaaagtgctgggattacaggcatgagccaccacgcccggccacaagtataggtttcttaatgcatacgttgcacagtggtgaagtttggccttttactgtatccgtctccagaatcgtgaatgttgtacccaatgtataatgtccttttcaaggagctgtggaaatgcatggtagtgggaatgactgtattctgtttagcacttttcttggtcataagagattggttaactttagtatttttgaaaaaaatattatgtgaccatcagtttttgtataagaagaaacttagctggtttgaatttaacttttgtggaacagtgtgtaaagattggcttctttttgccagtcagtacatagctagctatccctggcactcactggcatatgtctgtatgtaaagacctcgtacaaatctattagaaaaatatactctaaaagaaaaatgaggccaggtgcagtggctcacgcctgtaatcccaccactttgggaggctgaggcaggcggatcatgaggtcaggagattgagaccatcctggctaacacggtgaaaccccgtctctactaaatatacaaaaaattagccgggcgtggtggcgggtgcatgtaatcccagctactcaggaggctgaggcaggagaatggcgtaaacccggaaggcggacttgcagtgagctgagatctggccactgcactccagcctgggctacagagtgagactccgtctcaaaaaaaaaaagaaaaatgaacaaagagctaagtggataaatgaggctgtaaatattccactaattttgggtgttttacactttaatatagtaggccattgctgcttgcttcatcttacattctttttttttttttttttgagatggtgtcttgctctgttgcccaggctggagtgcagtggcacagtctcggctcactgcaaccttcacttcccgggttgaagtgattcttctgcctcagcctcccaagtagctgggattacaggcatgcgccaccatgcccagctaatttttatatttttagtggagatggggtttcgccatgttggccaggctggtgttgaactcctgacctcaggtgatcctcctgcctcagcctcccaaagtgttgggattacaggcgtaaaccactgcacctggccttatattctttttaaataagctataagggatttcagcagggaaaattggattccatttttaaacatgttttcaaccattgtttttagttcatctactttaaaagtacaactattttttttttttttttttttttgagatggagtcttgctctgtcgccaggctggagtgtagtggcacaatcccggttcactgcaacctctgcctcccgggttcaagtgattctcctgcctcagcctcccaggtagctgggattacaggtgtgcgccactacgcccagctaatttttgtacttttaatagagacggggtttcaccatgttggccaggatggtcttgatctcttgaccttgtgatccgcccacctcggcctcccaaagtgctgggattacaggcgtgagccaccgcgccctgccactaaaagtgtaactattaataatataccgtgttgcaccaactttaagaagctcaagccagacactgtggttcacgcctgacattgtggtcaatggtcaacactttgggaggctgaggcaagatgatggcttgaagccagcagttcaagaccagcctgggtaacatagtgagacccccatctctttttttttttttttttgagatgtagtctcgctctgtcgccaggctggagtgcagtggcgcgatctcggctcattgcaacctccacctcctgggttcaggtggttctcctgcctcagcctcccgagtagctgggattacaggcgtgtgcaaccatgcccggctaattttttgtatttttagtagagacggggtttcaccatgttggccaggatggtctcgatctcttgacctcatgatctgcctgccttggcctcccaaagtgctgggattataggtgtgagccaccatgcctggccgcaatccccatctctacaaaaaaaaagaaaatttttgccagacgtggtggtacaggcccgtagttccagctgcttgggaggctggggtgggaggattgcttgaggccaggaggttgaggctgcagtgagctatgatcacaccactgcactccagcctgggtgacagagcgagaccctgtctcaacaaacaaacaaactgaaaaacaaaaaaagtagcggctctttaagtcttagttttgctagagttcagttttaccacatatttccaaggggactttcatctagaggaaggaaatccataaagatatacttgttggaagggaatatgatctatattttattctataggcatacatacatacaaactatgtatcatacatagttggcctttgtagctgctgttccacatctgaggattcaactaactgtggattgaaaatatttgaaaaaacaataaaagaagataatgcaatagtttaaaaaatataagtaaaaaaaaacagtgtaacaaccatttacatagcatgtacactgtattaggtattataagcaatctagagatgatttaaagtatataggaggatgtacgtaggttatatgcagatatattgtttttttgaggcaaagtctttctctgttgtacatgctggagtgtagtggcacaatcacgactctctgcagcctcaaactcctgggctcaagcagtctccctctagcttcccacatagctaagaccacaggcatgtgccaccatgcccggctaatttgtttatttttatagagacgggatctccctatgttgtccaggctggtcttgaactcctggactcaagccatcctcttgccttgacttcccaaactgctgggattacaggtgtgagccattgcgcctggccaccattttatttgagggacctgggcatctgatggttttggtattcgtgggagtcccggggccagtacccatgggtactgagggatggctgtatatataattatgtgagtgtatatatgtatgtatataaatttgggaattcatcataacggagttcactggggtggataggcgagaccagggtagcccggaaacaccaggctggttacatttggcctggtcatacaattttctcagtgatacacacaccattttctatgtgtattatgatgtataaagtgttgaggactactgatttataattttttaatgaagaaagattgagagttaatgacactgaatatatgaagagatattcaacagaatcaaaagcagttgtaatgacctgaacaaaattccttcattttgtacttggcctagtagttgcttatttgtaaattatagtctttctaataaaaacagggagataaaattatctttaattttgtagcatagtattgttacgttctatggggattttacattcttgttttctagcaaatgtcctggaaacacttcgaggtgatggaaatgtgttaatagcagtggacacagcaggcagagttttggaacttgctcaacttcttgatcagatttggaggactaaagatgcaggattgggtgtttactcattggcactcctaaataatgtcagttacaatgtggtggagttttctaagtcccaggtttgttctcatgttgtcacttgtaataagtttgctacagtgattgggtctgtggaagtgggcgtcttaaatgttttttggattttatttttctcttgaagagattgttaataagatgataacttggcattaaccatttactgtcctgtgtgctttaaatgtattatttaatttaatccctatttattctattaagtagtttccattgtgtccctgttttaaagattaggcaaattgcttcccttctaactcttagtatcccagtctgtaaaatggggacaaaaatagaacctacctcatagcattggcatgttagaattcattgttctttcttttaaataagctttttgccttgaaatagcaatctttgggagtaagattttcatttagaacatataccttgccttttcaaaaagatttaaggtgatttatatgtgaaatataatgcaaaattggttttctttgggatgaaagtgagggtgggataatctaatgggaaatggaagcagaaaataagctgcttgtcaaaacagtacaaatttaagcaaccagtgggggtaaaagatagaacttgaattccttgactattagagaatatattgaagttataatatagtatttctaattcttgtcatctttccccccatgttaggtagaatggatgagtgataaattgatgagatgttttgaagacaaaagaaataatccgtttcagtttcgccatctctctttatgtcatggtctttctgacttggcccgtgtacctagccctaaagttgtacttgccagccaacctgacctggaatgcggattttcaagggatctctttattcagtggtgtcaggaccctaaaaactcaatcattctaacctacagaactactcctgggactttagcacgtttcctaattgataatccttctgaaaaaattacagaaatagaggtaagcacttgtatgtgaactttatcttaaaactgtttgggggatacattgtgcatgatgtaaaaaaatagtgaccaaaaataaaacttgaaattgttttaggatttttatcagaattactcttgagagccaggagtggtggtgtgtgctgtagtgccagctactcgggaggctgaggcggaaggaccactcgagcccaggaatttgaggtcagcctgggcaacatgccaagacccaccccccatctcttaaaaaaaaactactgtggaagagagcctttaatagcacaaatttcagagttccttaactggaggttctcattcttctttgagatggggtcttgctttgttacctagtctagagtgcagtggtgctatcatagttccgtgcagcctcaaactcctgggcttaaaggatcctcctccctcagcctcctaagtagctggaaccatagacatgtgccaccatgcctggctatttttttatttttattttttggaaagacgttgtctcattatgttgccatgggtggtctcaaaagaaattctcattcttaaacttttccgtggtaccctctagtttacccagagggtaagcatatacagggttttctcaatctgtgaaaggttcctttcctgtctcttgcttaatttaaatcagactctttcctaaagacgttctttatcctgtagccccctgaagtaattactctttctttcagtgtttcatgtactttgaatggagtacacgtcttccttgttctgtattgcagcttcctagctacttatcttccatttgcagtttttgccttcagacctgctgatatgctgacccctccttgtttctgacatttaatgatctcttggtcattctgttactcattcatcatttgaccctgattcacagtcttcctgtccacttgtgttcaggactttattctcattgactttagcatccatgtgtatgatctgtctggttcttctcagttacttggcaccttatttcttaatcttttccttcgtcttacctcagacatccattcctgctatcatgctatctgctcctgtggtcattgcctgtaaccttcttatggctgaacggtctccagttctccacctcaagcatatcattctgaatttacagctgactttccctattattcccatgacaacaactcttctgttccattgggactttcagttcgtgaacctcaccttttacagtctgtcatccttccagccttaaactcagtggtccacaattaagcaaaattttgcaaatacatttaactctcctacacttctgttttagttgcctggaaaggctttgaccttagttaaaccatttgcttggtttgtgcctgtacttaagcagctttatgtttctgaagttaaacattatggtgtagacagatttgttttcacattcataacttcacatctcaaaaggggaccccataccagtactcagcatttggtaggatgttccctttctcacggtaaggtaattgtatatcttctttctcctcaaacatcctacagctcactctcagccttcattcatagcacatgatcttgtctcaaacttaatgtagaagtcaaagcagtgagtcaggaattcctttatctttccaccactaaatgtactaacttgattctgcatctgcatttgctgccttatctcttgttataggaacaagactattagctcactaaccagtatacccaaagatcatttgcttaataaccagcccatcaaatctatcgatttttcaaaattagtatatcattaaagtttgtagcaattgatatagtgggatggttaataactgccagagttgtacaaaggtttagctgactaaaccttaacatagaactgtaacaaaccttaacataaagcagtatcataaagctgcttctcattttgtctttgtagcactcatataattatttaattagagacagactctcactctgtcacccagcctggagtgcagtggcaccatcatagctcactgtaccctcaaactcttaggctcaagctgtccctacaccaccccctaacccactccaccttccaaagtgctgggattatacatgaaccactgcacctggcccttagcagtcattttaaggaaagtttagtttgttaaaagctatgtggtagagatatctgtctgccaactctacttaagaaaatcataacatcagtaactaaaatctgagatatatgtactataattatagaattgttgagcaaggattctgagcaagtatagcaaagtaaaatggtgtctttggggttatttagtagctcagaaatacaaggttaaaagaactaagaaatacttgaaacaatttcatcagataggaaatactgaatttgaaaattttaattactagaaattcaattaggtctaataaaccatttgaggaattagtaaaagaaaaatggtttaagtttggaaaaaaatagacaatgatgtttagaagcatgctaaagaaatgagaaacagccaaaacatcaaatgttaagtttttgacctttttaataactaatgctgatgctcagggaccttttcttgctcaccttcttagcgatagttcttttgcagttatccctcctatcttcattatctagcagttttccctctacttgatcacatccaaaacaatttttattcttcccctactcccaatactgttctgtcttatctcagacagcacttcccacatattcaagccaaaaatttggaagtttaaaaaatgttcactgaatcgtaatatgtaccaaaacctacgttaagtgtatagcatgatgaacttttacaaaaattgaatgcacctgtctagcctgtaccctgatcgagaaatagaatatttctgtggcatgttgggcagatccaactaaggtaaaaaatagaaatggtaaaaaaagaaatagagggctgggcgtggtggctcacgcctgtaatcccagcactttgggaggcagaggtgggcggatcacgaggtcaggagttcgagaccagcctggccaacaaagtgaaaccctgtctctactaaaaatacaaaaaattagcctggcgtggtggtgggcgcctgtaatcccagctactcgggaggctgaggcaggagaatcgcttgaacctgagaggtggagattgcagtgagccaggatcgcgccactgcactccaacctgggtgacagagcgagactccatctcaaaaaacaaacaaaaacacatacagttcactctcttaaccatttttatgtgtacagtacagtagtgttaactatatgtacattgttgtatgacagatctctaaaactttttcatgtagcaaaactgaaactctgtacctattggataacagctcccagagagagcttttaaacattcatcatttcatgtcattcacttgcttaaatggctccaaagccttccttcttctctttcaataaaatccatgctacttacacaggcttcttagatcccatatgatctaatccccacctaccttctgaccttagcttattccactttctctatgccctacggtgcatcaggatctttgtactagctgttcttctgcctatagtgttctttcctggctttgcgcatggctggctcctggtcattcaggcctcaggtttaaccccctcaggtaggcctttgactacagatttaaaatacctgcctggtttagctgcccatcaccttacttgaagtatttttcctagcactcatcaccatctgatgtatttcttttttgttgtcttcctcttcccaccatcaactagaatatgaattccatgagaaaaaggcccttgttttttggtatccctagcacccagaactgtgcctgacatattggagggcttcagtgagtgcactggttgaattcatgaataatcaaaaaagtgaatatggaataaactagatttctgattatgttagataagaaaagtttaccaagtatggtattttttcatctatatctaatgcccttctaagtcaagtcttactcatttagaaaaagcaaaaatgaacaacgaaggattaataggttggagtagatttggattagaaaaaggagtaagttggaggtaatacggtgaaggagtaggaagaaaaatatttttgagttggttattctagaaatctgtttctgaataagccattaatcttacatattttaaatgaaaaataagatggagataaaaatttattatagcaacaggcataaactaaatcacagaggtaaatactttgttaaagattattggtgggtaaaaggcatctatgtaggttgctaactgtttttaaaaaaaacccactattttctgaatgaaacttattttcaaataagttattaggcaaatgtgagatgccaaatataaacatgtatttatttgtttattttaactttttattttttgagacagggtcatgtcattccctgtcacccaggctggagtgcagttgcatgatcatagctcactgcagtcttgaactcttgggctcaagcgcgcctcctgcttaagcctcccaattagttcgcactgcaggcatgtgccgccatgcccagctaatttaaaaaaaaatttatagagatgggaacttgctgtgttgcccaagctggtcttgaactactggcctcaaacaattctcccaccttggcctcccaaagtgtgggtattataggtgtgagccactgctcctggccttaaacatgtaaatcacccatttattttatacatgaaaataatctgattttggtttaatttttttgtttttacttgtctcccctccccttaccccactgggcagcccctgaactagaatagtttcagagagattcccccttttccattacttttaattttgaaaaaatttcaaacaggaaagttacaaaaatattatacccagattccccaattgtcaacattttactggatttgctttatcacttatatacacataaacacaatattactttttctgaaccatttgaagaaaaattgcaaatattttatcattatctctaaatattgccagtgtgtgttacctaaaaacaagggcaatctccagcaaaactgtgttacatccattgaaatcaggaaatcaacattgataccatcctaccatttcacccattgaccccattcagcattcaccttttaccgatgaccacaatgtcctttataattaccctttccttttttgtccaggttcgcatccatgactacatactgcatttaattgtcataactgttgacatttttgaagcatatatattctgggttttttttttcttattgatatactaatacctggtttttattttatttttttaaagagatgggagcaaggtgtggtggcatgtggctgtagtcccagctattgaggcaagaggattgcttgagcctaggagtttaaggcaagcctgggcgatatagcaaggcctcttctcaaaaaaaaaaaaaaaagaaagaaatgtatatatatatatgtagagagagagagatgggaccaaattatcatgtattccacataccctgagacttgtattttcacttgagtccttcttgaacaatgtaagaagatatgggtctaccttacatagtacctggtatattacaaacatttaaatgtttttggataaataaatgtaagctttttagtaattttataatagtacattgtatatgtgtgctgtgattatttaatctcgtggttctcaaaagtgtggtttgaggacgcctgggagtccctgagaccctttcagggagtccacaaagccaaaactatttttcataatactggtaagatgatatttgccttttcactgtgcctacatttgtactgatgagtaagatcagtggtgcataaagtgcttacaccttggcctaaaactccactagtagccactgcatttttcaccaccgtacatacacgtcattaaaaaaaaaatgctagtttcacttaagaatgtccttgagaggctgggcgtcatggcccatgcctattcctaacactttgcgaggctaagatgggaggttcacctgaggccaggagtttcagaccagcctgggcaacagcaacactctgcctctacgaagtataaaggtatattaaacaaaagaaatttgaaagagaatgtctttgaggggccagacatactggctcatgcttgtaatcccagcactttgggaggctgaggtgagaggattgcttgaggccaggagtttgagaccagtctgggcagcatagcgagaccctgtctctacaaaaaagaaaaaaaagtccttgagggaatagtaaaagttactaatattactaagttctttcagtaaaagtttttttgtttttttttgagatgggtcttgctctgtcgtctaggctggagtgcagtggtacgatctcggctcactgcaacctccgcctcccaggttcaagtgattctcctgcttcagcctcctgagtagctgggactacaggtgtgtgccaccacgcctggctgattttttgtagttttagtagagacattgtttcaccatgttaaccaggatggtcttgatctcctgactttgtgatccgtctgcctcagcatcccaaagtgctgggatcacaggcatgagtcactgcgcctggcctagtaaaagattttttaaaataatttgggtgacaagatgggaagtattaataaagaatttgcgttgtgtactaaagtacaatggctatctccaagaaaaacacttgtatgtttatttgagtcgtgagttaaactagccacttttttctgggaacaccttttttttgttggtattttttttttcttgtgtttgagacggagccttgctctgtcgccaggctggagcgctcggctcactgcaacctctacttcccgggttcaagcgattctcctgcctcagcctcccaagtagctgggactacaggtgtgtgccacgttgcccagctaatttttttttttcatatttttagtagagatggggtttcactatgttggccaggctggtctcgaactcctgacctcaggcgatccacctgcctcggcctcccaaagtgttgggattacaggcgcgagtcaccgcaccaggccctgttttgtgtgtgtgttttttttttttgagtttgggtctctgttgcccaggttggagtgcagaggcacaatcatggctcaccacatccttgaacttctgcgttcatgtgaccctcctgcctcagccttcctaccagctaggactacgggtgtgtttcaccacacctgtaatttttaattcttttttgtagagactgggtcttgctacgctgcccatatggtctcgaactggcctcaagcaatcctctcacctccgactcccaaagtgctagaattacaggcatgaatcactgtgcccagtctggaacaccatttttatgtgaaataatgacagggttattcagatttgggtatttggcagacattttcttgaaaattaatacattgagcctgtcactctaaagaaaacaattgacagcatttgttggcttaaatctgataaaattctaattttcaaatgaaaatttagaattttggaaaacttatacccagcactgtgagattgacaacttaaactgaaaagacttctgataagattggtggtgatatttacaaatgtgattttaaaaatattgtcaacatttgtaagatctggataacttggtgaactagtattttccaaataaccaattaattatgttagaaaataatgcacaaattaaaagatccattcaaaatttaaaatacaggctgggcacagtggctcacacctgtaatcccagcactttgggaggcagaggcaggaggatggcttcagttcaggagttcaagactagtctggataacatagcgagaccttgtctctacaaaaaattaaaaatcagctgggcatggtggtgcacatctgtggtcgcagctattcaggaggctgggaggtagaagggttgcttgaacctgggagttcgaggctgcagtgagcagtgatcatgccactgcactcatcgtaggcaacagagtgagaccctgtctcaaaaacaaaacaaaacaaaacaaaaaacaagagtgtaagatacataaaaaaaaaaaaaaattaacacaacagagtataaaaagtctattagtatggtttcaggttctgcgttaaaactaaccttgaagaaactaccactttctgagttttaatgtagtatcaaagaataatatccatgaaaggactatttacatatttttcccttttcaactatacatgcgtataagcctggattttcttcatatactttaaccaaaacaacatattgcaagagactgaatggagaagcaaatgtgagaatccagctgtcttctgttgagctagacattaaagagatttgcaaaaatatagaataatgctataggccaggtgcggtggctcatgactgtaatcccagcactttgagaggctgaggagggcagattgcttgactccaggagtttgagaccagcttgggcagcatgtcaagactcggtctctacaaaaaaaatacaaaaattagctgggagtggtggatggctgaagtgggaggatcgcttgaggctggaagattgagctgcagtgagctataattgcaccactgcactccagcctgggcaatggagcaagaccctgtctcaaaaaaaaaaaaaaaaatgccgttcttcccactatcttttttttgctttggaaaatgtaattattttttgtaaaaatctgttaatgttgccatgtggttttatttattatttatttattattattttttcatttttgagatgtagtttcgctcttgttgcccaggctggagcgcaatggtgccatctcggctcactgcaacctccgcctcccaggttcaagtgattctcctgcctcagcctccctagtagctgagattacaggcatgtgccatcacgcccggctaattttgtatttttagtagagatgggctttctccatattgatcaggcttgtctcgaattcccgaccttaggtgatctgcccgcctcgacctcccacagtgctgggattacaggtgtgagccgtcgcgcccggcctattattattattaatttatttatttttgagctggagtctcactctgttgtccaagctggagtgtaatggtgcgattatggctcactgcagtttccgcctcccaggttccagcgattctcctgcctcagcttcctgggtaactgggattacaggcatgtgccaccatgcctggctactttttatatttatagtagagacggggtttcaccatgttggccaggctggtctcggactcctgaccttaggtgatctgcctgcctcgacctcccaaagtactaggattacaggtataagccaccatgccctgctggttttattattttttaaatgaacagataaatattttaaaaattgctcagttttaatttctgataaggtagacattgataaatataacccacaaaaacaaaaagctctttggggttctctaatttttaggagtctaaggtagtcctgagataaatatatgagaactactgatttaatcattccattttgatggattttaaaattttgtccagttttttactactataagcattgctgcaatgtacgaatgtactttttttttacacatttgtgattgtttcagtaggataaattcctagaagtagaaatactgtgtcaaatgtcaaattttatttttagatgttagcaaattgccttttaacatagttgcactaattttccaacagataatggaagaaggtactctttccccatgtatggcattgccaatctcatagatgaaaacaattatgttttttatattttgtgcttttcaaaaattagtaaaattaaggatcttttcatggccagtagttatttgtctttcttattttgtaaattgcctttttaagtatcttgtgctttttcatgtgttgatcatccttttcttaactaatttggaagagctcttaggaaaaaatcatttttattggtcgtagtgctgaaaatatttttctgtttcttttttgtttttcttttcagtttcttattttgagatttaaaatgtcaaagggagtttttctttattcatgttgctgtatttatttatgtttcccattatggcttttgggcctcacctactccaaattataaaaatgcttatctgtattttcttttcctgattggtgatttttaaccagtttgattgtttggttgattgagacagggtcttgctctgtcagactgaagtgatcctcagtctcagactcaagtgatactcagtctctgagtagctgggactacaggtgcatgctaccactactggcttttttttttttttttctgagacagagtattgctttgtcacccaggctggagtacagtggtgtgagcacagctcactgcagccttgacctcccaggctcaagtgatcttccactttaaccacctgagtagcggggacaacaggcacatgccaccactcctggcttttttttttttttttttttatgtggagacaaagtctcattatgttgcccaggctagtctcaaactcaagtgattttcctgccttgcaaagtgctaggattataggtgtgagccaccgtgcccagcctcccagctaatttttaaattattcctagagacagagtcaacctatgttgcccaggctggtcttgaactcctggcctcaagcagtcctcccacagtgctaggattataggtgtgagctactgtgcctggccaaccagtttgatttaaattaaacccattctagatgatgtgtgacagctcaattttaatactaatctaaataggacctataattgtatgtaatggaaacttgattaatttcagaggaaacaatcagtttaaagatgatagagcaatttagagatgtgatgtatctcatatcccactgctttaaccccctaatattaacatattaacatttccttttgtcttttatttttttttagttgaggaaacgtgtgaagcttgaagggaaagaacttgaagaatacttggaaaaagagaaactaaagaaagaagctgccaaaaagcttgagcagtcaaaagagtgagtcattttcagacagattataaatttatggatgcaatttgagaagaatgtgtccttgacttaaatgtttcattgaaaatatttttaaattttcgtaagacttaattttgttacagacatctttcaaatgtctagaataccagatcctgtcagtgctaatattattatgcatttatttgttatgttttataaaatgtcagtccaataaagttgaatgttattccagtcatgcatcacttaatgatggggacagttctgagaaaagtgtcgttaggggatttagtcattgtgcaaacattaggatatatgtttacacaaaccttgatggtatagcctactgtgtatccagagtatatgatatggcccattgttcctaggctacaaacctgtacagcatgttactgtactgaatactgtaggccattgtaacacaatgttaagtatttgtgtatctaaatgtatctaaacatagaaaaggtacagtaatcttatgggacctctgttgtatatgtggtctattgttgttgaccgacataactgtatattatcatttaatattgaattaataatattgagtatggattcagtaataaattgataaatattaatttaaaatatctttgaaactttatgaccttgatctattctaaaatcctcctagggcagatatagattccagtgatgagagtgatattgaggaagatattgaccagccatcagctcataagacgaagcatgacttgatgatgaaaggtgaaggcagtcgtaaaggaagttttttcaaacaggcaaaaaagtcctatcctatgtttcctgccccagaagaaagaattaaatgggatgaatatggagagattatcaagtatgtgagcaaaacaaacttttctctcttacaaattggaggtattaactgtgttatcatttcatttcagtgaatttgatctttcacttgatctttctagtcacatgtatggggttagcttctgagtacctcagcctgaagacacagaagacttgtaacttgaaacataaaaatagagatgctgagaaacatctagagaatattgagagaaaactggcagtttatgacttagttgtgtaaaggtttaaaaacatgatcacgtgatcaagacttttttcccccacttaaaaagagaggaagatgtaggataggaagaactttggggctgtgtgtggtggctcatgcctgtaatcccaacactttgggaggccgagatgggaggatcacttgagctcaggagtttgagaccagcccaggcaatatagtgagacccccatctctatctttaaaaaaaaaaaaagaactttggatggctggtgattgcatttccaatggattatgtcttaagtattatacaagttttatgagattaagaggaatgtgagatagcatgagtgaaatcatggaaaaatctacaaaatctatactgactattagaaaaacaactgcaatcacatgttgtaattgcaaatttgaaaacactactatcctgtgtggaaaataaaaaaagaaaaacatgatacaggccaggtgtggtggctcacgcctgtaatcccagcactttgggaggccgaggcaggtggatcatgaggtcaggagttcaggaccagcctggccaagatggtgaaaccacatctccactaaaaatacaaaaaaattagccgggcgtgatggcaggcacctgtaatcctagctactctgggggctgaggcagagaattgcttgaacagggaggcggaggttgcagtgagccgagatggcgccaccacactccagcctgggtgacagagggagactctacctcaaaaaaaaccaaaaaacgcaatacatacagccatctggtaattgatatgaaattgcatcagctttggatgaaatgtatatttaaatcttgagatatgtgaggactccaaaaattatgccacctactagtcatatatgttatgtagtattagcttgctttttactgcttctaattagagacttattatttagaccagaggatttcttagtgccagagcttcaagctactgaagaagaaaaaagcaaattagaatctggtttgacaaatggagatgaacctatggatcaggatttatctgatgttcctactaaatgtatttctacaacagagtctattgaaataaagtaagtgcttttgtgacattttgaaaatagattataagataaaatttcaagcatttgaattatataatttacattatgtcaagcaaaatttctgaatattctttagtaagtttgtgcttttaaaatttatttttgtatgaagagacttgtgaagtatggtggcatgatattttctcttcattaatggtatttgaatgccaaagtaattgaattggtggtggtggggggtgcttaaattgtaacattaaattgtacatttatatgaagaaaaattatttttggcctttttattctgtaagcaggtgaaagggaataatgtgactcacagtttaatttttctgagtaactgcttgtttcataaaatatactccttaacttaaacatctctaagaccctaatgtctggaaaatactgttgtgatctgaagtagttagaaaccttttttctcccgctttctacttagttaaataataccagtaagtgatcattttggaatttcttttaagtcatcagagaacaaagttttttatttgtccagtaatatcatttagtatatatttttgggtgtagataaaatctaaataatacagatagggccgggcacggtggctgatgcctgtaatcccagcactttggtaggccgagataggctgatcactcgagatcaggagtttgagaccagcctggccaacatggtgaaatctcatctctactgaaaatgcaaaattatccctgcgtggtggtgcatgcctataatcccagttacttgggaggctgagtcaggagaatcacttgaacctgggaggtagaggttgcaatgagcgaagatcatgctactgcactctagcctgggcaaaagagcgagacccaatctcagaaaaataaaaacaaaaataaaataaatcatacagatactataacatgtgtatttctcaaatcctagtgttatatattgtatacatgataaaagccatttttttttagaattatgagaaaagtaatcttgaataatcatatctaattacagagcccgggttacctacatagactatgaaggacgctctgatggggattccattaaaaaaatcattaatcagatgaaaccacgacagttgatcatcgtccatggcccaccagaggccagtcaagatctggcagagtgctgtcgcgcctttggtgggaaagatattaaagtgtacatgccaaagctacatgaaacagttgatgccactagtgaaactcacatctaccaggtaaacatgccaggagttgccattgagtagaaataagtactttttgttgcaggttaggacagataacattagaaataccgagatgtgtgagacagacatggatggtctcctgccctagcagacctcatagggtatggggcttagaacaaggaaataccatttatcatgttgttgtgccactgagagaagaagtacaggatgctatgagagtatcaagaggggaaaccacccacatttagaggtttagaaaaggtttcctacaggaagtgataactaatcctaactgatgtttagatgggttgtcaggacagacagagtaggaaagggggggaagagcgttctaggcagagggaaccatatttgcaaaagtacagaggtgaggaaaatgattaagaattcaaaagttttagaagaattcccggatatcaaggttctactcctaattggaacaaatggagatggataccaaatataggactagcacagtagagagataaattttgtctggtaatgggagatggtgtcagtttaaggccagagtgatgtctatatctggaagaaatggatgtgcacataccaggcaggaaatttattctgggcagagtaagaagaagcaaccttccaagaatatggagatgtgaaattctgtggtatattcaggaaaggacaagcagttcagtacctactgaagtatgccaagtactagaggatgggagtgatcagtggttctcaaccttgactgcacataagaatcatctggggagcttcgtgagggtcagagggactcagtttttctggtcttaatcttaccagttatgttagaaacactggatatgacgctctgatatactttttgttttaattgccatgtgattccattttgtagtcagggttaagaatctctattttggaaagtaggcaggggcccaatgatctgcaggtaatgaggtcattgcaggtcattgtgggactcagatgagtgaaagattttccaattttaacatattaccagaggtagaaaatgataataggttatatttaatttgttaatatgtattctgtgggttttatttctctccccctcctttgcatgtctaggtgaggttaaaagactcacttgtcagctctcttcagttttgtaaggcaaaagatgctgaattagcttggatagatggtgtcttagatatgagagtttccaaagtggacacaggggttattttagaagaaggagaactaaaggatgatggagaagactcagagatgcaagtggaagctccctcagattctagcgttatagcacaacaaaaggccatgaaaagtctgttcggagatgatgaaaaagaaacaggtgaagaaagtgagatcattcctactttggaacccttgccacctcatgaggtaaaaaaagcatgtgcttttttgatttcttcctgaatttgtcatccttctagttttcatgtcttttggtttttttccccccttctaaaactaagtgggtctgtggaaccttttatatttttaaccatttaaaatatatgtcagctgggggcagtgactcacgcctgtaatcccagcactttgggaggctgaggtgggagaattgcttgaggccaggagctctacatcagcctgattatagggacaccctgtcagaaacctagtcggcatggtggcatgcacctgtaatctcagcttagaaggctgaggcaggaggattgcttgagctcaggagttcgagactacagtgagccacaattgtgccactgcatctagcctatatgatagagtgagaccctgtcttgaacataaaatatgtctcacatttgggctgattttggagtttttaaaaaagagaacttgtgacatgcttctgtgtgtatgtctctgtgtatatattaattctatatagctaaggaatgacatatctttagcaaatcttttaaggtacataattgtttcatgattttttttttttggtctggatttttaaattttaagtttgatgattgtgaggatcacctgcctgcttccagtcaggagatttatagttttctaagaaagtcatactgttttttttttgttttgttttgttttttgagatggagtctcgctctgttgcccaggattgagtgcagtggtgtgatcttgtctcactgcaacctccgcctcccgggttcaagcgattctcctgcctcagcctcccaagtagctgggattacaggcatgagccactgggcccggctagtttttgtacttttagtagaaacggggttttgccatgttggccaggctggtcttgaactcctgacctcaggtgatccacccatctcagcctcccaaagtgctgggattacaggcgtgagccaatgcacccagccaatagtcatacctccatttttttatgttattcagttcaaataacttttggttttgatatagttagaaatctttaagtatagatataatttagtctagcatttacatattcttgagaggtatctagttaactagcaagattctaggtaattaaacttggaaaaatattaaaactatgaatcctacatgcatgtcaagtgatgtcttcagccctactatgaaattaagaatagagagacagcctctgttgttggattcccttctagtacaaccctcaaaattgggaggaggaataagaatatttttttcttctgtgctaaagctaatgctcttcaaagtaatgtcaaagcagaaagcagcagcattaggcaagaaccactttcgttactgattgtagaacctatggcatccattacatttgctctgaggaaggagggacagggaaaatgggattggggaggaaacgtcttttgaagtaagcaaatgactgggatctagaaaatgaatttttggttcagtcctgcccatggcacgctagttgaccccattatgcaagtgggtgagtgaagagcctaacattaccaaacgtctctgttatgatgaggcatgactaacaaaactgattgtgaaacagaaaatgtgaagggctttgttaaataatgttaaataatggggtaaaatttagaataacaacttggaatgtgatttacagtcttgaaatgatctgtcaaaggacttcagggaataatagaaaatctcttagagataatgtagtattttactttattcagtacagttgtatgtctggtgttttacttgaagttattctttcccctttgaccttatctaaggttcctggacatcagtcagtttttatgaatgaaccaaggctgtcagacttcaagcaagttctcttacgggaggggattcaagctgaatttgtaggaggtgtacttgtttgcaacaatcaagtagcagtccgcagagtaagtgtgttttcaataagggctgaattgaacacatacgtctgatgttttgtcattttgaaattctgtaattcttgtttggtattttcacaaaactgaagatcagtaatttatattcatgatcatgacctcaaaggcttacagaagtcttattgacttgaaggcttatgaaagactcttgaagaaatgatatataattttattgtaaattttaattatttgaatcttctgacatttatgtctatgtaaaattcatgacttcaatattatatccatatgctgtgaatcagagcaacccatgtcctgaccaatcataaagtaatctatttcatatatttcggttattatgtctgcatattaatgaatagaaaatgtactaaagaattttttttatttggtttctagacggaaactggacgcattggattagaaggctgcctttgtcaagatttttataggataagagaccttttatatgaacaatatgccattgtataaaggacatgatgtcaagaagtatctgcttgacctttctaagaaaaagggattcttatcttactctgagcttttgatgttttgttttgtaacatacaaaaagaatctgccagaaaaacttacatgtatcagatttttaaaaatataaatagagaacattttgcaaatgctcaaatgagcattctatcttttggctttcagagtgatagagctcctaacaggtgtacaggcccaagagttgaaggtgattggttttctttacagactccttgttctctagaagggctttttacttgaataaaacaatgcaacttagcaaaccaatttatggccttagagaaacatttttgcatgagttcttacaaactgtttgttatattttctggaatgataagtgagaattatttagaaaagacatgctccaaaaaaaaaacaaaactgataaaacagtttttcgaaacttacttttaaaagcatacgtgctatgactctctccagtttgaatatgcaattgttttcacaggcaggatgtctgttttctgcctgtatttcccagtgatttactctagggtaaggtagtacacatttggttcagaaattaatttttatttctcctatatcttgttttatcaagattttgttgtggcatttcaatgtaaattataacaccatcatttgagtatacataattcaaaagaactacttgatgcagtatagtcttaagggttctgcatacattttagaaacatcttagccgtaagttaggtcctgtgttaaactgtttagtgctctgtttttaagaaaacaaatgttgaacctcacacttttatgtggtgacagtgtaatttaattaaaaggtgtaaatgttttcatctcttaggcttgctgtctcctaaggtcacccaagcagtggttggattttatacacattactactaaaataatactgaagttggataaggttatcctttctgtatttgcgtctttcttgtgactaaccaccctgatatagtattaaccactgtgttcaagagtaaaaacaatatatgcaattttcattgaacttaaagagtgaaaaccatgtaaactattgaaactattgtaatccattaatgcttttttagaatggcagaccttgatgtttatttctcaaatggttaagccctcttctttactcttaatttttttttgagacagagtcacccaggctggagtgcagtggtgagattttggctcactataacctcttcctccagggttcaagtgattctcccacctcagcctcccaagtagctgggactacgggcacatgccactgcacctggctaatttttatatttttggtagagacagggtttcaccatgttggccaggctggtctcaaactcctgacctcaagcgatccacccacctaggcctcccaaagtgctgggattacaggcatgaatcaccacaactagcctacccttagatttttggaaggatcgatcttatttaactatgtgtggaacaacccagtaatatcagactcgaattactatttcattctatttcaaatgcttataaagctactattgtagattatagtgttaatgcaaagtttacagacttttgatatggaaaaccagataaaacaatgttacaaaaggcaaatataaagagtatgttttctttttagtgctttggaaaaatttcacttaaactcttattactgtatagattaagccctataatgctatttatattccaggggaacgaaaatctgaatttgttttatgatttaaagcatctggtttgcatattgtattgtaatactgatacagtttggctgtgtccccaccaaattgaattgtgttaatagttcccataatccctacgtgttgtgggagggacccagtgggcagtaatttaatcatggtggtggttaccctcatgctgttcttgtgatggtgagttctcatgagatctgatgggtgtttttttttgttttgttttttgttttttgagatggagttttgctcttgttgcccagactggagtgcaatggcacacgatctcggctcaccgcaacctctgcctcctgggttcaagcgattctcctgcctcagcatctcgagtagctgggattacaggcatgcaccaccacgcccagctaattttgtatttttagtagagacggggtttctccatgttggttaggctggcctcaaactcccgacctcaggtgatccgcccgcctgggcctcccaaagtgctgggattacaggcgtgagccactgctcctggcccaagatctgatggttttgtaagggaattttccccctttgcttggcacttcttcctgctgccatgtgaagaaggatgtgtttgcttccccttccaccatgattgtaagtttcatgaggcctccccagcctgtgggactgtgagtcaattaaacgtgtttactttataaattacccagtctcaggcaattctttatagcagtgtgagaacagactaatatgaataccaatactgaaaaattgtttcttgcctcaccttgtcctatgaacaggaattaaattttaaagtattgccttaagatggctgtgctaaataataatcattgcaagagcaatacttttacctgtttctagatgacaatattactaaaatttctcaaatgaagactttgttttagcttcaattacttcagaaaatataaattttaaagatgactatgagataaatcatgaactcagtggaattttcagatgagatggggcgcgttcagggtggtatgactgtagacggaattttcagatctttgttatttagaagcaagtataggtataacgtggactatcaactgatatctgcaaataatttggttaaaatgaaatttgattgtagtatttgttgctgtaggattataaatgtcaaatatcattgtaaacatttctatatttttagaaatatcttgggtggcctgaaacagaagtgaggaaatcaattttttaaggtgagccatttggcttttttaaaaaattgagattcaacttacataccataaagttcactcttctaaagtgtacaattcattggtgttagtatatttacagagttgtacaactattaccactatataatcccagaacactttcatcactccaaaaagaaacaccatacccactaccagtcactcctcatgcccccttcctatgacccctggcagccattaatctactttctgtctccttgaatttggattttctggacacttcataaaaattgaataatacaatatatgaactttta

SEQ ID NO: 1099 - DNA, 667 bp, Homo sapiens
tttcagagtgcatcactgttgtaacatgtatcagtaccctttttgtgactgaatattattccaccgaatggatataccacattttacttatccattcaaccgttgatgtacatttgagttgattccaaattttggctattaagaatgctgctctgaacattcatgtgcaagtttttttttttttgtatgtacatatgttttcaattttcttggatatatatctaagaattagaattgctggatcatacagtaattctgcttaaccttttgaggagctgccaggctgttttccaaagtggctacaacattttgcatttccaccagcatgtgtttgagggttccattttctcctcattcttgacaacatttattactccctttttaaattttagtcatcatagtgtgggtgaagaagtgtctcactgaggttttgatttgcatttccttaatgactgatgatgtggagcctctttccatgtgtttattgactttttatatattttggagtaatatctgttcatatcctttgtccattttcaatttgtttatgttcatatcctttgtccattttcaatttgtttatctttactgttgagatgtaagagtttttttatatattttctggatactaaaccattatatattgatttgcaagtattttattcca

SEQ ID NO: 1100 - DNA, 5825 bp, Homo sapiens
tttcagattcttcatgtttttatttctctcagaactttaaaatgtgaacattcgataatctagccagtctttacttccaggtaacttcttcactgggttgcaattccctgtgtggaaagcaaaaaaggaagaaatggaaaaactgtaaataaaactgtgatacgagataaaaggggaagtcagaagaatgattgcaatatttcattttctttttttttttttttttttttgagacgaagtctggctttgtagcccaggctggagtgcagtggcacgatcttggctcactgcaaactccacctcctggcttcaagcgattatcctgcctcaccctcccaagtagctgggattacagctgtgtgccaccacaccgagctaattttttatatttttggtagagacggggtttcaccatgttggccaggctggtctcgaactcctgacctcaaggaatccacctgcctcggcctcccaaagtgctaggattacaggtgtgagccaccgcgcccggtcaatattttattttctattacaccgatccatttaaaaaatttacatattagattcatcatatgtattcttttcattcatgattttaacttttaccatattgttagcttcatttttctgggttaaagaattgtaattacttagtttatctttatatgaaagctattatctctgctcagtgagttcattcgaaatgttttctaaaccctttccagcttattttctttcttgaaatccctgatttgtgaatcacttctaccatctctccatacccactgtggatgctgctcagttctcttgcccctcaggcttcctcctacccagctgtatgcccactggcaggcatcctgtcttgctaactggaactctctgctgccagaggagccatctctagaggcacaatgggaccaggcagctgccagttgctatcactctaccaccaggtctaaagctctcaggtagtgctgctaagaacacagcacctagctgctgttattactatttatctcagctatagcatgtcttaagtaagataatatatgacaatatatgtggaagctgtatataagctaggttttggccagctacttttaaactgtttctatattaaaatgcactttgaattaaaaaaagacgatactttcaaagacctgaaacagcctattcattaaatgaagactttaaattctagaggtaatcatactgttttatccaaggattcaataacaaacaagactaaaaacagtatcatttgaatctaagtcctcaagggggaaaaattaccccttctgtttatttttggcacatatcaaaaagaatattccccaaatttggccaattgctggtttaaaaaaatgcagactaaccttttaaataacatactcttgttccggaaggcagttagccgttcatcactctttctgtctaaataacatccaatgacaaatcccatagggacaagaacatgaacccagtggtcccgcacaatctgaagtaagttcaccatgatagctaaaagaaaaaaaaattatcagaaatacaactgctttgttttttttttgaaatagcttttaaattgcatctgggccaggtgcggtggttcatgcctgtaatcctagcactttgggatgctgaggtgggcagatcacttgagattaggagttcgagaccagcctggccaacatggcaaaaccccatttctactaaaagcacaaaaattagccgggtgtggtggtgcgcgtctgttatcccagctactggagaggctgaggcaggagaattgcttgaacccaggaggcggaggttgcagtgagccaagatcgtgccactgtacttcagcctgggcgacagagcaagactccatctcaataaaataaataaattgcatctgaaacaagaagatgatagacatagatgtaatagatgttaaaagcctaatacgcctctttgtttgcctggcatcagaatgtagtataatactttaaaatctaattgatgaagattacatacgggacaatgattaatataaaattacaccacactgggtctatttattacattttactactagcttcaatagtgatgtgatacgatacagagcagagaaacagagatggtatgtaaaaaaattctacctgcaacagctgattgtttgcaccctcctcatgttgttttggaacttttttttgtaaaagagacaaggtcttgctatgttgcccaggctggagggcagtggctattcacaggcactacagctctcaactcccgggctcaagcattcctcctgcctcagcctcccaagtagctgggactacaggcatacaccactgcacctggctctcatttaggacttttacttgtgtaaaacatatttagaacctctcacaatgcaaaaacaaatttaatacaattttgccagaaatggaattctttaggtaaagctgtaattactgaaaactaaatttagaaaggaaattaaaagatatgagagaaaaaagaaaactatattcaataatgtcactgtagatatgaatataaattactctaaaaaaggtaaaggggccgggtgtagtggctcacgcctgtaatcccagcactttgggaggctgaggcgggtggacgacaacaaggtcaggagttcgagaccagcctggccaacatggtgaaactccatctctactaaaaatacaaaaattaggtgggcgtagtggcacatgcctgtagtcccagttactcaggaggctgaggcaggagaattgcttgaactcgggaggcagaggttgcagtgagctgagatgacgccactacactccagcctgggggatacagcgagtctctgtctcagaaaaaaaagaaagaaaaaaaaaggcaaagggagaagaaaatttacttttatagagtgactactaggtggctcatgcctgtaaccacagcactttgggagactaaggcggatggatcgcttgagcctaggagcttgagactagcctggttaacatggcaaaaccctgtctctacaaaaaatcaaaaaattagctgggtgtggtagtatatgcctgtagtcccagctacttcggaggctgaggtgggaggattgcttgagcccaagagacggaggttgcaatgacctgagatcacaccactgtactctagcctggacgacagagcgtgatgctgtctcaaaaaaaaaaaaaagactactaggttactaggtaccagagccatcatctatttctatacgtaatgtgaaataactattatttacattttacagataagaaaacagcttaatccaaatagctattaagtacagagctggagttcaaattcagcttcactctacagctctggctgctattatagcccatgcctaagaaaccccttcctgaattgatgtttatggtacttaaaagcttttaaatgctgagtttccagaaggtagatgaggaggaatagaactataggtttttccttatccgaaatgcttgggacccgaagtgttttcgattttttgattttgaaatatttgcatgcacataatgagctatcttggggataggaccgaattaaaacataaaattcatttgtgttttatatataccttatacacatagcctgaaggtaatcttatatgaaacttttttttttttttaaatagtctcgctctgtcacctaggatggagtgcagtggagttataatagtccactgcagtcttgaactcctgagctcaagtgatcttcccacctcaatcttctgagaagctggagctacgggtgctaatttaaaaaaattctttaaacatttttttttgtagagacaagatcttgctatgttgcccaggctggtctcaaacttgtggccccaagtttcacatatgggggcattttggatttccaacattctgatcagggatactgaacctgtaatagacatcatgtggaaaataaattgcacaattcaataaaaacatagttggattgccaattttctgtaaaaattcgtgcatacagatgaattcaaaatacacctgtgtgcgtttggactaaactaataaatcatgtacaatgactaagaagacatatgacaacatcctagaaagacaatacattattgccaacaaaagtgcttagcactaagctgtgctaggactatgtagactgaatttctgcctctcctcttacactggcatgcttatacaattcatacttttttctttcctttttttttttttattttgagacgaagtttcgctcttgttgcctaggccggagtgcaatggcgcaatcttggctcacagcaacctctgcctctcggattcaagggattctcctacctcagcctcccaagtagctgggattacaggtatgcgccaccatgcccagctaattttgtatttttggtagagacgaggtttctccatgttggtcaggctggtcttgaattcccaacctcaggtggtccgcccgcctaggcctcccaaagtgctgggattacaggcgtgagccaccgcgcccggccgttcaagtgattttcttgcctcagccttccgagtagctgggactataggcaggtgccaccacgcccggctaatttttgtatttttaagtagagatggggtttcactgttggccgggctggtctcaaactcctgacctcttgatccggccacctcggccttccaaagtgttgggataacaggcgtgagccactaagcctggccatacttttgtcttttaaaaggcaaggtgggccaggtgcagtggctcacgcctgttatcccagcactttgggatgctgaggcgggtggatcacgagatcaggagttcgagaccagcctggccaacatagtgaaaccctcgtctctactaaatatacaaaaaattagccgggtgtggtggcgggcgcctgtaatcccagctacttgggctgctgagacgggagaatcgcttgaacccgggaggcggaggttggagtgagccgagattgcaccattgcactccagcctgggtgacaagagtgaatctctgtctcaaaaataaaaaagcaaagtaaaagggtaagcacatcatttaggcgcaacggtgtcggctcaagaggatttgcgatttggaagagagcgaggttagcgagaagacagaaggctggaacttggacgaatgtaagctgctcgcggaggggaggcagcgtcttccctgcttcaggccaggcgtgggatccgggccggtcttctctccagtccggttagcgggcggtcactgggtcacatctctacggacgttttcctgttatgacagcctcagaaaaccctttccaaaagctccggcccggaaatcccatcctccacccgaagaaaaccccattttcctttcccgtcaccttcgttcggaagccccggggaagcccagaccacccctccacacatgcacagcaccgagggcttgcctagaaccctccccgccaccgtcgccgtgatcctcgtcgcggcggccccccgggctccccaaacccacctgcagcctcagcgcctacagcgaccccgagaccaagggcaacagggaactcaacccgcgccagtggaagctgcgacctcgggacctgccattcgccgcgcccgcacggagcagaggggtgacgccagcaaatcatactactttttcctcctcagggttgactcctctcattttttttttttttagcttccaaacattaccaataatttctgaataaaatttcgctccagacagacgaggcgtgcaggcgtgaccgccgtcgccttccgacagcaccgtgcccaccccccggagatggtctcgcc

SEQ ID NO: 1101 - DNA, 5824 bp, Homo sapiens
tttcagattcttcatgtttttatttctctcagaactttaaaatgtgaacattcgataatctagccagtctttacttccaggtaacttcttcactgggttgcaattccctgtgtggaaagcaaaaaaggaagaaatggaaaaactgtaaataaaactgtgatacgagataaaaggggaagtcagaagaatgattgcaatatttcattttcttttttttttttttttttttgagacgaagtctggctttgtagcccaggctggagtgcagtggcacgatcttggctcactgcaaactccacctcctggcttcaagcgattatcctgcctcaccctcccaagtagctgggattacagctgtgtgccaccacaccgagctaattttttatatttttggtagagacggggtttcaccatgttggccaggctggtctcgaactcctgacctcaaggaatccacctgcctcggcctcccaaagtgctaggattacaggtgtgagccaccgcgcccggtcaatattttattttctattacaccgatccatttaaaaaatttacatattagattcatcatatgtattcttttcattcatgattttaacttttaccatattgttagcttcatttttctgggttaaagaattgtaattacttagtttatctttatatgaaagctattatctctgctcagtgagttcattcgaaatgttttctaaaccctttccagcttattttctttcttgaaatccctgatttgtgaatcacttctaccatctctccatacccactgtggatgctgctcagttctcttgcccctcaggcttcctcctacccagctgtatgcccactggcaggcatcctgtcttgctaactggaactctctgctgccagaggagccatctctagaggcacaatgggaccaggcagctgccagttgctatcactctaccaccaggtctaaagctctcaggtagtgctgctaagaacacagcacctagctgctgttattactatttatctcagctatagcatgtcttaagtaagataatatatgacaatatatgtggaagctgtatataagctaggttttggccagctacttttaaactgtttctatattaaaatgcactttgaattaaaaaaagacgatactttcaaagacctgaaacagcctattcattaaatgaagactttaaattctagaggtaatcatactgttttatccaaggattcaataacaaacaagactaaaaacagtatcatttgaatctaagtcctcaagggggaaaaattaccccttctgtttatttttggcacatatcaaaaagaatattccccaaatttggccaattgctggtttaaaaaaatgcagactaaccttttaaataacatactcttgttccggaaggcagttagccgttcatcactctttctgtctaaataacatccaatgacaaatcccatagggacaagaacatgaacccagtggtcccgcacaatctgaagtaagttcaccatgatagctaaaagaaaaaaaaattatcagaaatacaactgctttgttttttttttgaaatagcttttaaattgcatctgggccaggtgcggtggttcatgcctgtaatcctagcactttgggatgctgaggtgggcagatcacttgagattaggagttcgagaccagcctggccaacatggcaaaaccccatttctactaaaagcacaaaaattagccgggtgtggtggtgcgcgtctgttatcccagctactggagaggctgaggcaggagaattgcttgaacccaggaggcggaggttgcagtgagccaagatcgtgccactgtacttcagcctgggcgacagagcaagactccatctcaataaaataaataaattgcatctgaaacaagaagatgatagacatagatgtaatagatgttaaaagcctaatacgcctctttgtttgcctggcatcagaatgtagtataatactttaaaatctaattgatgaagattacatacgggacaatgattaatataaaattacaccacactgggtctatttattacattttactactagcttcaatagtgatgtgatacgatacagagcagagaaacagagatggtatgtaaaaaaattctacctgcaacagctgattgtttgcaccctcctcatgttgttttggaacttttttttgtaaaagagacaaggtcttgctatgttgcccaggctggagggcagtggctattcacaggcactacagctctcaactcccgggctcaagcattcctcctgcctcagcctcccaagtagctgggactacaggcatacaccactgcacctggctctcatttaggacttttacttgtgtaaaacatatttagaacctctcacaatgcaaaaacaaatttaatacaattttgccagaaatggaattctttaggtaaagctgtaattactgaaaactaaatttagaaaggaaattaaaagatatgagagaaaaaagaaaactatattcaataatgtcactgtagatatgaatataaattactctaaaaaaggtaaaggggccgggtgtagtggctcacgcctgtaatcccagcactttgggaggctgaggcgggtggacgacaacaaggtcaggagttcgagaccagcctggccaacatggtgaaactccatctctactaaaaatacaaaaattaggtgggcgtagtggcacatgcctgtagtcccagttactcaggaggctgaggcaggagaattgcttgaactcgggaggcagaggttgcagtgagctgagatgacgccactacactccagcctgggggatacagcgagtctctgtctcagaaaaaaaagaaagaaaaaaaaaggcaaagggagaagaaaatttacttttatagagtgactactaggtggctcatgcctgtaaccacagcactttgggagactaaggcggatggatcgcttgagcctaggagcttgagactagcctggttaacatggcaaaaccctgtctctacaaaaaatcaaaaaattagctgggtgtggtagtatatgcctgtagtcccagctacttcggaggctgaggtgggaggattgcttgagcccaagagacggaggttgcaatgacctgagatcacaccactgtactctagcctggacgacagagcgtgatgctgtctcaaaaaaaaaaaaaagactactaggttactaggtaccagagccatcatctatttctatacgtaatgtgaaataactattatttacattttacagataagaaaacagcttaatccaaatagctattaagtacagagctggagttcaaattcagcttcactctacagctctggctgctattatagcccatgcctaagaaaccccttcctgaattgatgtttatggtacttaaaagcttttaaatgctgagtttccagaaggtagatgaggaggaatagaactataggtttttccttatccgaaatgcttgggacccgaagtgttttcgattttttgattttgaaatatttgcatgcacataatgagctatcttggggataggaccgaattaaaacataaaattcatttgtgttttatatataccttatacacatagcctgaaggtaatcttatatgaaacttttttttttttttaaatagtctcgctctgtcacctaggatggagtgcagtggagttataatagtccactgcagtcttgaactcctgagctcaagtgatcttcccacctcaatcttctgagaagctggagctacgggtgctaatttaaaaaaattctttaaacatttttttttgtagagacaagatcttgctatgttgcccaggctggtctcaaacttgtggccccaagtttcacatatgggggcattttggatttccaacattctgatcagggatactgaacctgtaatagacatcatgtggaaaataaattgcacaattcaataaaaacatagttggattgccaattttctgtaaaaattcgtgcatacagatgaattcaaaatacacctgtgtgcgtttggactaaactaataaatcatgtacaatgactaagaagacatatgacaacatcctagaaagacaatacattattgccaacaaaagtgcttagcactaagctgtgctaggactatgtagactgaatttctgcctctcctcttacactggcatgcttatacaattcatacttttttctttcctttttttttttttattttgagacgaagtttcgctcttgttgcctaggccggagtgcaatggcgcaatcttggctcacagcaacctctgcctctcggattcaagggattctcctacctcagcctcccaagtagctgggattacaggtatgcgccaccatgcccagctaattttgtatttttggtagagacgaggtttctccatgttggtcaggctggtcttgaattcccaacctcaggtggtccgcccgcctaggcctcccaaagtgctgggattacaggcgtgagccaccgcgcccggccgttcaagtgattttcttgcctcagccttccgagtagctgggactataggcaggtgccaccacgcccggctaatttttgtatttttaagtagagatggggtttcactgttggccgggctggtctcaaactcctgacctcttgatccggccacctcggccttccaaagtgttgggattacaggcgtgagccactaagcctggccatacttttgtcttttaaaaggcaaggtgggccaggtgcagtggctcacgcctgtaatcccagcactttgggatgctgaggcgggtggatcacgagatcaggagttcgagaccagcctggccaacatagtgaaaccctcgtctctactaaatatacaaaaaattagccgggtgtggtggcgggcgcctgtaatcccagctacttgggctgctgagacgggagaatcgcttgaacccgggaggcggaggttggagtgagccgagattgcaccattgcactccagcctgggtgacaagagtgaatctctgtctcaaaaataaaaaagcaaagtaaaagggtaagcacatcatttaggcgcaacggtgtcggctcaagaggatttgcgatttggaagagagcgaggttagcgagaagacagaaggctggaacttggacgaatgtaagctgctcgcggaggggaggcagcgtcttccctgcttcaggccaggcgtgggatccgggccggtcttctctccagtccggttagcgggcggtcactgggtcacatctctacggacgttttcctgttatgacagcctcagaaaaccctttccaaaagctccggcccggaaatcccatcctccacccgaagaaaaccccattttcctttcccgtcaccttcgttcggaagccccggggaagcccagaccacccctccacacatgcacagcaccgagggcttgcctagaaccctccccgccaccgtcgccgtgatcctcgtcgcggcggccccccgggctccccaaacccacctgcagcctcagcgcctacagcgaccccgagaccaagggcaacagggaactcaacccgcgccagtggaagctgcgacctcgggacctgccattcgccgcgcccgcacggagcagaggggtgacgccagcaaatcatactactttttcctcctcagggttgactcctctcattttttttttttttagcttccaaacattaccaataatttctgaataaaatttcgctccagacagacgaggcgtgcaggcgtgaccgccgtcgccttccgacagcaccgtgcccaccccccggagatggtctcgcc

SEQ ID NO: 1102 - DNA, 667 bp, Homo sapiens; identical to SEQ ID NO: 1099

SEQ ID NO: 1103 - DNA, 1716 bp, Homo sapiens
ctgatgatgtaaaaggaaatacagagaaaagcaagcatccttctcccactcctgagcctgtaatcatagggcctagggcttctctgcagacagaacccagccaagacttttcgtaaatgccatgtgcacttcagggcttggtttgttctattatatttagggatgcggtgctgagatgcttgcctgcagaacagcaaaaacctctgacttcattattgttattcagagtaaccagggtcattgctctctggcttgccttaaagccagcaaaggcaattgcccatccctgggcttttggtctggaagagaccgttggcatcattattcagccccctcacttttcaggtaaggagctaatgaagacaacattcccagtgacacacggcaagttactgtggtgttggggtttcagtgtcaggagtctcctctcttcctctggcatttctgctactatgccaggctggctcctttcagtagacataacatcattgaaaaataccacaagtgcccctgtggagagcagagcagatagccattaaaattacaaaagcttatgctttttggcccaacatttccacttcaaggcattcaattcttcctatagatacactcatgtgagggtaaaatgatctctgtataaccttattctttgcaacactgattgtaataaggaaatattggaagcaacccagatgcctatgggtgggaggtgagttacataaattagggaccatccacacaaacagaatatgtgcagctgtgaaaagactgggccacctctccatgtgcaataggaacagctccatcttgccaggcgtggtggctcacacctgtaatcccagtactttgggaggtgaaggtggggcggatcccttgagcctaggcattccagaccagcctgggcaatgcagtgatatgctctcattgtgtaaataaaacaaaataatacattatttgctttgcagatgccactgccgccaggagccctgtaacatcagccatcgtcaaccccaccgtgttcttcaacatcaccgttgacggcaagcctttagacctgcgtctccttcaagctgtttgcagacaaggttccaaagccagcagaaaacttttgtgctctgagcactggagagaaaggatttggttataagagttcctgctttcacagaattattccagggtttatgtgtcagggtggtgacttcatacgccataatggcactggtggcaagtccatctatggggagaaatttgatgatgagaacttcatcctaaagcatacaggtcctggcatgttgtccatggcaaatgctggacccaatacaaatggttcccagtttttaatctgcactgccaagactgagtggttggatggcaagcttgtggtctttggcaaggtgaaggcatgaatattgtggaggccatggagtgctttgtgtccaggaatggcaagaccggccagaagatcaccattgctgactgtggacagctcttataagtttgacttgtgttttatcttaaccaccagaccattccttctgtagctcaggggagcaccctccaccccatttgctcccagtatcctagaatctttgtgctctcgctgcggttccctttgggttccatgttttccttgttcccttccatgcctagctggattgcagagttaagtttatgattatgaaataaaaactaaataacaaaataataataatagta

SEQ ID NO: 1104 - DNA, 491 bp, Homo sapiens
ggccccagacaggaaacatgagaaaagatgatcctttgggaccagctgacagataaaatgccacatgcacaaggaactaaataagggccgactctgctgaggcccggaagttctgctgcaggaagagggaagggaggctcacggggatcctctcctgatgcccaggtggctgcctctctctaggctgcactttttccagctgtgaaatgaggttgttgggatggggggggtcctttgtaaggtccgcggtgtaactcatttcttgcagagaattttgaatgcctttgcctcttcacagcatcctgcttcagacacttgacctgtggcgtgggtgttattatttcccacctcccagatgaagaaacagaggcacagagaagtaacttcccaaggtcacacagtggatctgtagaggacccaggatgtaggcccagttctgtctgacccaaagtctatttcttttagacacttttatactcactctggtaccc

SEQ ID NO: 1105 - DNA, 801 bp, Homo sapiens
gaggtgaatgagctggcgtctccaggtccacactagtcactggggaatcaggggagtcccaacagctgagggcatgtgacagggaaactctgcagcttgcaagtgtccctgagtgtgcatcagatgctctgttcctccacggcagagtcgctccactagagagcctggcgccagtcaccaagactccctgacccttgtctgccaagaagaaacagccaagcctttgctgtctctgagggtctccctcgggtgtccctggcagactgcaccagcctcacaggcatctcccaagccatgggtcagggatgagtctctcggtggcttggtggctctcagtgtgctcagcagcaggtgaggggcctaccccagggcagtgctcggcattcagaaggccgacaggaaaccagaagtttccgaatattatggccccatctcctcttcagtcttcctttccctgaagctcttgtaaacccctttctttcctagctcaacacaacaaaagaaaaccactggataggccgggcgtgctggttcatgcctgtcatcccagcgctttgggaggcccaggcgggtggatcacctgaggtcaggagttgaagaccagtctggccaacgtggtgaaaccccgtctctactaaaatacaaaaattagctgatggtgcgtgcctgtaatcccagctactcaggaggctgagacaggagaattgcttgaaccgaggaggcagaggctgcagtgagccgagatcgtgccacttcattccagcccgggtgacagagcgagactccgtctcaaaaaaaaaa

SEQ ID NO: 1106 - DNA, 800 bp, Homo sapiens
gaggtgaatgagctggcgtctccaggtccactctagtcactggggaatcaggggagtcccaacagctgagggcatgtgacagggaaactctgcagcttgcaagtgtccctgagtgtgcatcagatgctctgttcctccacggcagagtcgctccactagagagcctggcgccagtcaccaagactccctgacccttgtctgccaagaagaaacagccaagcctttgctgtctctgagggtctccctcgggtgtccctggcagactgcaccagcctcacaggcatctcccaagccgtgggtcagggatgagtctctcggtggcttggtggctctcagtgtgctcagcagcaggtgaggggcctaccccagggcagtgctcggcattcagaaggccgacaggaaaccagaagtttccgaatattatggccccatctcctcttcagtcttcctttccctgaagctcttgtaaacccctttctttcctagctcaacacaacaaaagaaaaccactggataggccgggcatgctggttcatgcctgtcatcccagcactttgggaggcccaggcgggtggatcacctgaggtcaggagttgaagaccagtctggccaacgtggtgaaaccccatctctactaaaatacaaaaattagctgatgatgcgtgcctgtaatcgcagctactcaggaggctgagacaggagaattgcttgaaccgaggaggcagaggctgcagtgagccgagatcgtgccacttcattccagcccgggtgacagagcgagatccgtctcaaaaaaaaaa

SEQ ID NO: 1107 - DNA, 827 bp, Homo sapiens
gaggtgaatgagctggcgtctccaggtccactctagtcactggggaatcaggggagtcccaacagctgagggcatgtgacagggaaactctgcagcttgcaagtgtccctgagtgtgcatcagatgctctgttcctccacggcagagtcgctccactagagagcctggcgccagtcaccaagactccctgacccttgtctgccaagaagaaacagccaagcctttgctgtctctgagggtctccctcgggtgtccctggcagactgcaccagcctcacaggcatctcccaagccgtgggtcagggatgagtctctcggtggcttggtggctctcagtgtgctcagcagcaggtgaggggcctaccccagggcagtgctcggcattcagaaggccgacaggaaaccagaagtttccgaatattatggccccatctcctcttcagtcttcctttccctgaagctcttgtaaacccctttctttcctagctcaacacaacaaaagaaaaccactggataggccgggcatgctggttcatgcctgtcatcccagcactttgggaggcccaggcgggtggatcacctgaggtcaggagttgaagaccagtctggccaacgtggtgaaaccccatctctactaaaatacaaaaattagctgatgatgcgtgcctgtaatcgcagctactcaggaggctgagacaggagaattgcttgaaccgaggaggcaaaggctgcagtgagccgagatcgtgccacttcattccagcccgggtgacagagcgagactccgtctcaaaaaaaaaaaaaaaaaaaaaaaaaaaaaaaaaaaa

SEQ ID NO: 1108 - DNA, 100 bp, Homo sapiens
cttgcagtgagccgagatcacgccactgctctccaccctgggcgacagagtgagactccatctcaaaaaaaaaaaaaaaaagaaaagaaaagaaaagaaa

SEQ ID NO: 1109 - DNA, 279 bp, Homo sapiens
cttgcagtgagccgagatcacgccactgctctccaccctgggcgacagagtgagactccatctcaaaaaaaaaaaaaaaaagaaaagaaaagaaaagaaagtaagtattggggcggggcatgatggctcatgcctgtaatctcagcactttgagaggctgaggcgggcagatcaactgaggtcgggagttcaagaccagcctgaccaacatggagaaaccccatctctacgaatacaaaattagccaggcatggtggcacatgcctgtaatcccaacta

SEQ ID NO: 1110 - DNA, 192 bp, Homo sapiens
tttttttttttgagacggagtctcgctctgtcacccaggctggagtgcagtggtgcgatctcagctcactgcaacctctgcctcccaggttcaagcacttctcctgcctcagcctcctgagtagctgggattacaggctcccgccaccatgcccagccaatttttgtatttttagtagagacggggtttcac

SEQ ID NO: 1111 - DNA, 4333 bp, Homo sapiens
tccagattggaagtggtttttctgactcttattttggttttgtttgctttctgaaagttgttactgacctgaaagtgtagcgtcgtgaactggggaaggagagaagagaggcaggatgagaatcgtggagtgcggaggcaggtagcccgtggggtgcctcctgtgctcggtggagctggaagccgcttaggtgccagagctttttctgtgaccaaattctggcttttgaaataacccagtaacagttctctatcttttcattctgcccgctcctcccacagcctggtccctcagaggaaaggaaggacaaggagtgctttgcagcacgtgcccctggcggcgtcatggtactttcctggccctgctgcccctgcccgtccgtcttttatgatttttatttactcgtattggtttttttaaatttctattttttgcagaactgagcctttttctgccctgcctttctcctgtttgtctttcctttgtggttgatattgtgttgtcttctccaaagtatttgtcattagaaacttacagcaagcgtatactttttagcatgtcagtatttttattatgttgccctccttgtctttgataactgcctgtggacgctgtgtaaactttctggtaaaaatccttttttttccccctgtagtctctccatttcaaggactaaaacagtcttgcgttaagtaaaaacctgtgaccagagctgaaggaagactctaggactgaaaactgcaacagaaattagcacaatttgaaaacaaaacaaaattgcaaaagccttagttgctttttccacctaagaagttgatcaatggagaaaatgtccactggagtttgaataatgaactttgagtttgggtgcaagcaaatgactcagagaagggtccagctctcaagctgaatgacaaacatgctgttgtaaatttagtctcaggtgtaaatacccaagccctctggtacccagggagctggctggtctgtggtgcatgtgtgtccctgtgatggcaatcattgtagttgctggccttcagaagaattgaggatctgatggaggttttttatgtatttattttctgttcaccttgtgaccctgtgtcaaaatttataaagatacaaaaggcattactgaaatggtactttctgtaatttgatactatttggcttaatcatcttcacttgactatttgtaatactgttgtaatgttaactctgttaagtacccaagctgcttgtcttccaccaaagagtgctttattaacaagaatctgtgaaaatcacatttaaacactgttgcatgttgtaagaccaggtggtaccttagtaacctaaaacttgcaagagaatattaatggtagctttagaagactcaggaggagaaactgacttcagagttggaagatgttgcaagtcgttcctttttctgtccttcagggactgaagaactgggaggctgcccattgtttggttgccagtcatacaaattaaaatcatatttccttccatgaatggaagaaacacactattggtttttccccttggaaacagcaatcccaaataatgtcggcttacaaaaaaaaaaagttaccacttttttagagtccttccctgtaacattggattttttttttcccttatgagatccacctaaggccattgacgtggcctgcgatctcagtgacaatgatctgcttctggatctcactgttgcctttggttagggaacacaactagtaactctgcagagtgccttctcccgcagccctactggaacacagcagagtctgtgccatgaagcagttacagaaacagaattgatgtgctgctaaaaaaaaaaaaaaaaatggggcccgaaataaaagaatatatagtactcacctcagttccttccataagaagtgggtggtttaatgattgttaagccatttttgcctgtgccgggagcatggagggctgagatgtcgacaggcagtgggaaacaaatgccctcctaagccacaaggcgtgcgccagattagtaggcaactccattttaagaagctgcctttttcacaaaactggaagaaataaaagcggttggaataaacaagttaaaagtctttaatgcaaaaagtaattgaaaggcagtgcctccattttggtgtactttcttggaagaaagtataaaattgaccggcatcatgagagacggaagatgccgtgttctcagccaaacaagcaactctttccccgccaggcactgtcgggtggggtcaggccagcttttaaacactggggactggatcacagaaaaacagtggttttctgtccctggaaatgaataggcacaaagacccacttggctgtgggcagactactcttcaataagatttgggtgggaggaggaacattccttttgctattttgagctgagacaatataaatattcaaactgtgccatgcataaagcattgaattctcagggcacctcttcttccccttaccccttttaaggccatcccctccattaataataatccaggtagttgtgaaaatcgtgcttctatctgatcccttcttagtttggcttttcatcccatcagaacaagtaaacgtaggcgccacagctcttgtgagtactgtctccctcacggtgaatgagcctcctggtgtttcgtccaagaaaagaaagggtgtcactggaaccacagccctttttcattttataaactgcctcttcatgttgcctgctcaagtttccacctagaattgctatcactgtggctctttctaaaaatctttctatttaactggttcactgaaattagtcatagaaaacttgtgatttggtgaagaggcattccttgtaataaccaaatgacttgggatggtgtgcatagcaagggcagtgttacacttatgaggactgtctctagcatccaggaagtctctgggtctgagggatggaaagttcttcctgctatgaatgagagtggactcttcccctcacccccaactgaaaccacaaacaaccagaatcttctggaattctgacttagagtcgttgttatagaagaccttgttgctatggaacatgaaactgtgtgtcagatggagagatccccttaacctaagagccttaaatagccctgaaagtacactgggacggtttgcgatggaattaaaattggaagtgaatatttttaggtgctcttgaagctttctggggactcaaaattatcaaaagtcagggacagtccggaggaagagcgtctgcaaaactgggttcctagaagtatagacggacttagctttttgtagaatttggtgaggagcagcgcctcgtgagagcagaatggcctggcgtggccagtgcttcccggcagcacgcagctctgcggcctccagaattcccctgttctgagcttgatgcccctagcctgtcccctacctacttcctcccctcctctctagccctctcacaggggtgattgctacctctctgttttcttgggcctaggcaagttttagaggagttcccaagcattgttatgaggccagtgtgctcgctgggctgggcgggatggcctgggcttgtgtgtggcctgagggctctcctggggccttctcttttcccagtcacctttggagccacagaagcagtgcactcattggatgtctgttcttaacacagcttctctttctacattaaaaaaaatcattattgcattttggaaagcagtgctcatcaaaagcaacttttaaaacctattttattgttcctttaaatgttctctcccgctgaaactgccctggagaggctatctgctgctcttccatttacccacatcaggttattctccatgtcactcagtggagatgactccagatgtgtttaaagactggacaattcacctatactgtgtaggaaattacctccttaattacctggtagaattgtcagcagacatgttcatccgatgatagtactgcagttttctattaataatttgcagacttttatctaacctgcactcatgtacagattattaaaagttttaaaatgtaactgatcagtattgatcaatcattgtcttgatttttttttacagcgtatatttctaatcatattttttaaagccaagagaactggttgaatgaatgtttattttcctgaaggtatttttaagataaagcttcctaatggcgtgtaaactttgcatatgtatgtagtttgatacatattgtcacatttgaaaatcttgtgggttgtaactggttttatacaaaatatcgaatagtggaaattgtataattacaatcatgtaattaaaagtattaacccaac

SEQ ID NO: 1112 - DNA, 2184 bp, Homo sapiens
tccagattggaagtggtttttctgactcttattttggttttgtttgctttctgaaagttgttactgacctgaaagtgtagcgtcgtgaactggggaaggagagaagagaggcaggatgagaatcgtggagtgcggaggcaggtagcccgtggggtgcctcctgtgctcggtggagctggaagccgcttaggtgccagagctttttctgtgaccaaattctggcttttgaaataacccagtaacagttctctatcttttcattctgcccgctcctcccacagcctggtccctcagaggaaaggaaggacaaggagtgctttgcagcacgtgcccctggcggcgtcatggtactttcctggccctgctgcccctgcccgtccgtcttttatgatttttatttactcgtattggtttttttaaatttctattttttgcagaactgagcctttttctgccctgcctttctcctgtttgtctttcctttgtggttgatattgtgttgtcttctccaaagtatttgtcattagaaacttacagcaagcgtatactttttagcatgtcagtatttttattatgttgccctccttgtctttgataactgcctgtggacgctgtgtaaactttctggtaaaaatccttttttttccccctgtagtctctccatttcaaggactaaaacagtcttgcgttaagtaaaaacctgtgaccagagctgaaggaagactctaggactgaaaactgcaacagaaattagcacaatttgaaaacaaaacaaaattgcaaaagccttagttgctttttccacctaagaagttgatcaatggagaaaatgtccactggagtttgaataatgaactttgagtttgggtgcaagcaaatgactcagagaagggtccagctctcaagctgaatgacaaacatgctgttgtaaatttagtctcaggtgtaaatacccaagccctctggtacccacggagctggctggtctgtggtgcatgtgtgtccctgtgatggcaatcattgtagttgctggccttcagaagaattgaggatctgatggaggttttttatgtatttattttctgttcaccttgtgaccctgtgtcaaaatttataaagatacaaaaggcattactgaaatggtactttctgtaatttgatactatttggcttaatcatcttcacttgactatttgtaatactgttgtaatgttaactctgttaagtacccaagctgcttgtcttccaccaaagagtgctttattaacaagaatctgtgaaaatcacatttaaacactgttgcatgttgtaagaccaggtggtaccttagtaacctaaaacttgcaagagaatattaatggtagctttagaagactcaggaggagaaactgacttcagagttggaagatgttgcaagtcgttcctttttctgtccttcagggactgaagaactgggaggctgcccattgtttggttgccagtcatacaaattaaaatcatatttccttccatgaatggaagaaacacactattggtttttccccttggaaacagcaatcccaaataatgtcggcttacaaaaaaaaaaagttaccacttttttagagtccttccctgtaacattggattttttttttcccttatgagatccacctaaggccattgacgtggcctgcgatctcagtgacaatgatctgcttctggatctcactgttgcctttggttagggaacacaactagtaactctgcagagtgccttctcccgcagccctactggaacacagcagagtctgtgccatgaagcagttacagaaacagaattgatgtgctgctaaaaaaaaaaaaaaaatggggcccgaaataaaagaatatatagtactcacctcagttccttccataagaagtgggtggtttaatgattgttaagccatttttgcctgtgccgggagcatggagggctgagatgtcgacaggcagtgggaaacaaatgccctcctaagccacaaggcgtgcgccagattagtaggcaactccattttaagaagctgcctttttcacaaaactggaagaaataaaagcggttggaataaacaagttaaaagtctttaatgcaaaaagtaattgaaaggcagtgcctccattttggtgtactttcttggaagagaagtataaaattgaccggca

SEQ ID NO: 1113 - DNA, 3652 bp, Homo sapiens
aatgggctcaagattgttacattatgccaaatgaattgggagtcatacatttagtttagtacacgaagcagtaagtgaaaagagccatgcataacaattctgaagtatgggccgggtgcggtggctcgcgcctgtaatcccagcactttgggaggcggaggcaggtggaccacttgaggtcaggagtttgagaccagcctggccaacatagtgaaaccccgtctctactaaaaatacaaaaattagccaggtgtggtggcaggcacctgtggtcccagctactcgggaggctgaggcaggagaatcgcttaaacatgggaggcggaggtttcagtgagtcatgatcacaccactgtactccagcctgggcgacagagtgagactctgtctcaaaaaagaaaaaaaaaaaattctgaagtatgactctaattttgtaagcgtaagtatactatatatgtatagaaatatagagatgtataaatatttatatacctacaatacatctgtatttatagatgagtaagtttctatatatgcatagaaataagacaggaaaaatatgctatgatactaataaaagttctggttggtgggacagttgggatttttttcttttttatcgtcttattttccaatttttctacaataaatgaagggaaatgggagtgttttaactgacactttttggtgagccaagctattaaaaattcaggctgggcgcggtggctcacgcctgtaatcccaggactttgggaggccgaggcaggtagattatgaggtcaggagttcaagaccagcctggccaagatggtgaaactctgtctctactaaaaatacaaaaattagctgggtgcagtggcgggtgcctgtaatcccagctactcgggaggctgaggctggagaatcacttgaactttggaggcggaggttgcagtgagctgagatcgcgccattgcactctagcctgggcaacagagcaagactctgtctcaaaaaaaaaaaaatcaaataaaaagcctatcgttgatgacagttaattgttaattttgacatgtcttgaaggggcatattctttttaggtagagtgctcaggctttttttttttttttcctccttacatggagttgcacaggctggagagcagtagtgttttctcggctcactgcaaacttcgtcttccaggttcaaaccattctcctgcctcatcctcccgcctcatcctcccaagtagctgggattactacttgtgggtggcatgtgccaccacacctggctaatttttgtatttttagtagagacggggtttcaccattttggccaggctgatcttgaactcctgacctcaagtggtccacctgcctcagccccccaaagtgctgggattacaggcgtgagccacggcgcccggccgctcaggcttttgttaacagcgtagtgtgtcttgcacatttaattctgctgtttgcttttttagattatgctttttaggttacagaagagtagagtccgggagcctggctggcacttgccaggtcatatcgtcttcctgtgaggaaggaagggctggccttgcctctgtttttctatctaggtctcgttgcgttttcatgtcactctagtaacctgaactcctgcctctctggagaagtggttcctggttgcagcaagcatctgcctcaggtccctggcagggatgctttgagggtcctaaggtagatttcagagtcagtaatctggactgaatgttgaaatgacccaaagcagcttccaggaatttgggatagttctgaaaaccaaaaagacttcttttaaattccaaaatggactttcagagatgatgtggagagcaaaaggagtctaacagtgaggattaactgggactcacagtttatttccccaccttcctctaagtgggttctttctttgtgcctcttttgggactttgtcctgtgttcacatcaccctacctgttatccacctacagcttacaaaagaaaggcaaattatgtataggttttaagaattggagttagccaagctgtagcctggagcttttatcctactgaatattattcataatatcatactaaatagtattcatttctgtttggagggcaagagggaattagtatattggtgcacggtctgattctggacaaaatagtatgagctaagattgttgagtaaatttaaagtattgagttgaaatctttaaacagcagtagaaaaaaaaatagagcacccttttggggtcctttcatccctacctgcaacgtagcaggtttaccagttcctactggtttgtcatcatctctgcggcacatgggaacttgaccttccattttcatgttccttggcatccaggatgaagactccacccaaactcgctttgcgcttaattggtgcttttgatttttggttttactgagaggctcttcagctttggggaactttttcaaaaacgtcaaaagagcaattacttggggcagctgaaaaaataggagtgatgtcttaactatttgtctttgggaaaaggtgccactgtttctcacagaagatgactatcccctcgtgtatccatttgaagctgtgccacatcgaaacctaaatctcatgtggccacaggtctgggacggcggccaggcagcctgtgtggccctcggtcctgccagggctctgtgtggcaccttctcattcccttccctgagtctggagagggaggtgagtgggcttctctacctcccacttcctgttagagctataaatccatgctaacctttctcttttaagaattaataaatccagtgaataattggctccgttgaatcggcctgttttcagtgttctcacatgacctctctgaagagctctcttagaacagtcttggaaatttcatcatgccccgagtgagagcctgcagccacctcatttgctcgcattcactcatgtcttcacgcagcccttccgctggtgcgtgtttgttagcttatgctgtttcttttgggcaggctcttctttttttaaaatgataacttcattcattttctaagaaactggcatgtacaagttactttaattctgagttgtatcactaggaaccatcactttctgctgcagctgccaaaccaaacctaaggtccggggctctggagtgctttgtacctaattcttcatattgtgggggctggggagagaaatgctcaggttctttccttagcatcttttttttttttttttaaatgagacagagtctcactctgttacccaggctggagtgctgtggtgcgatcttggctcactacaacctccacctcccaggttgaagtgattctcctgcctcagcctcctgcatagctgggaatacaggcgtgcatcaccacgcctggctaaaaattttcttctgtatttttagtagagatgaggtttcaccatgttggccaggctggtcttgactcctaaccttaggtgatctgcctgcctcggcctctcaaagtgctgggattacaggtgtgagccacggcgcccggcctctttccttagcttctaaaaccacgagtgttttcaggagcccttcagttgggagcagctgcatctaggacctctaacttcttcagtgttctcgggtggctttgctggtgtcacacctgccact

SEQ ID NO: 1114 - DNA, 152 bp, Homo sapiens
attacaggtgtgagccacggcgcccggcctctttccttagcttctaaaaccacgagtgttttcaggagcccttcagttgggagcagctgcatctaggacctctaacttcttcagtgttctcgggtggctttgctggtgtcacacctgccact

SEQ ID NO: 1115 - DNA, 3484 bp, Homo sapiens
cataacaactctgttctttcctcctggcaggtgacagagctgaatgagccactgtcgaatgaggaacgaaaccttctgtctgtggcctacaagaacgttgtgggggcacgccgctcttcctggagggtcatcagtagcattgagcagaagacatctgcagacggcaatgagaagaagattgagatggtccgtgcgtaccgggagaagatagagaaggagttggaggctgtgtgccaggatgtgctgagcctgctggataactacctgatcaagaattgcagcgagacccagtacgagagcaaagtgttctacctgaagatgaaaggggactactaccgctacctggctgaagtggccaccggagagaaaagggcgacggtggtggagtcctccgagaaggcctacagcgaagcccacgagatcagcaaagagcacatgcagcccacccaccccatccgattaggcctggctcttaactactccgtcttctactatgagatccagaacgccccagagcaagcgtgccacttggccaagaccgcgttcgacgacgccatcgccgagcttgacaccctcaacgaggactcctacaaggactccacgctcatcatgcagctcctccgcgacaacctcacgctctggacgagcgaccagcaggacgacgatggcggcgaaggcaacaattaaggccccaggggaactggcagcgcacgcggatgctactactgcagtctttatttttttcccatgagttgggggtcgggtgggggagggaaagggagggatgaccttcccagggagaaacccacgacctgtcctgtctttgatcgcctctttgacatttttgccaaaataccactagtggaaagtcaggctagctgtgctggtattggaatagcagcctcacactggcgtctggactgttctgtagattcatgcaagtggagctgtctgtctctaatttaacttattgctagataatagggttttcagatgaaaagaaaacttaaagaggaatggccctcattcagtaagttctgtggttccagtaaggatttttatgtacatacgctctcgtctctcgttttgggtactttctatctcatctgtctcggctctgcatgttttccagggtgtagcctacagacatggaacagtgtaaatcccagactgacagacttagaacctgaggtctcattcatccttatggtttaggccttgccagttttccgaagtctctgattagttgacagtattaacactaaattgcagtttacagtatttctacattacagccatatgtaacatcaagccatcgattgtgtacttttcctttgctagttgtttgggctttaacatccttattcagccttatccaggttggttttgctgttgatcggtctcctaggctaaatgagaatgaaagcgacttcaggtcaggtggctgtgggattttttttttttggtccttctttcctcttaacgtaaatccaccaccaaaattattaatcctcttgagagaaacgtgaaacgccacaaaaatagagaaaattcaggtctgtatgtcatggatcgtgttggtattttcagagaacatcccgcttctgaagctgctgcagctccctcctcagggatcacactgccgtcacccactctgcactggggcgtttcctactgcgcctcgtgctggcggacgcagctgggtgcagaagctgtggggtcggagaggcgtttggagaaggtctgtggtgcagtgtgtgaaaattcaggtgctagaagcctactggtagaaaaacccaaaaggaagagctatatccttaaccattctgtccaatttcgggagccttgtcagtgtgtcagtttttcctccccgaagacactccttccccaagtaattgtaggaagataaaaaaactgttaccagataacaaacactgaactcctatttgaccagaactttttcctctcgagatagttttttctttttaatgaaaaaagcataggaattggagattggcttgtctcacgcagccagtgcacatttggaattgacggaaacaacgttgctatttccacccatttgttttcggcagccttaaggccctcattctcatttcgggtgaatctgtctatctgtgaacgtggcccgcatgtgcattcttttttttatatatataaagtcagtgacgaggaactcccgagacgtgtaatgacaccacacttgttttctttgtttctttgttttatttaggcaagaagaggtgtgagtaattgaggaaaaactgacagatgcttttgctaataccaaaattgagcttacaattaggaactgagtatgtgtaacaggatacaggtgacagtgaagatagaagaaccacgatgaccacagactcaatgtgctctgtaacatcgcacagtttacccagcatgactttccttaggaggccccctcctcacgctagagtaaaagtcccagttaagtgaagcctaccagaagaactagtagaagaagctttgccgcttttgtgcctctcacaggcgcctaaagtcattgccatgggaggaagacgatttggggggggaggggggggggggcagggtaggtggggctttccctaatttatcttcatgtccagtgagcagtgttgcgtttttccttgtagcatttggaaatgatttactggaattacaaaacctatttttcctttaaatttcagctttggctctggctgctttttagaataatgcaagataaaaatcacacctgagggctgaaaacggagagggaatgggagacttgatatttaagcagcttgaatggtttttcttttctttatttttaaagaaatgcacttgcctatgatactgtctctccagtgaaatgattactcctccattactctattgatacaatattgtgcatgctagtgttgtatttctatacagtagcttgaaattgattaacttatactgtaggtgttatgtattcctatgacaaaaaaaattaagtcttcaaattttttaaaggttttttttttttaatttaatttttccttttgggggtaaagtttgctctaccaaatagtgattgtaacaaattgatctgttttggatgttgctatagtgacatgcagttatatattttgtttttaaaagggggggagcaaaagaaacaccagtgttagcttaatcttaatgtctggtgtttgtcatggtgaaattataactattacagtgttggagaacaacaaatatgttctctgaatgagcctttgtgctttttgtcatgttatgcagtgaactatttttaaggtctaatcagtgattatttttccagctccgtgtttctctaaggaattatttcacacacggaccatctttagcagtttcctcagtgatggaatatcatgaatgtgagtcattatgtagctgtcgtacattgagcaaataaacttacagatctgacgccagtgctccttagctt

SEQ ID NO: 1116 - DNA, 1218 bp, Homo sapiens
catcatgccattgcactccagcctgggcaacagagtgagaccaggtctttttgaaactctgtctccaaaaaaaaaaaaaaaagaaatcagccatgcatggtggtgcacacctgtagtcccaggtactctggagattgaggtgggaggattgcttgagcccagtagtttgaggctgcagtgaggtgtgatcatgcctctgcacttcagcttgggaaacagagtaagaccatgtctcaaaaagaacaaaaaaagactttcttatttgtctgatatacctgtatattaccttatgaaagaagcagaaatccccattttgcagataagaaaaccaaagcccagagaaatgaagcggcttgtccccaagattgcttagcgaatgatggagctgggaaaagcccaatcttccgttatttgtggacacatcagaattcagcatgagtgacagcggtctgctggatgacagatcgtcagtgcagaatgagacacgaggtgcctgtgtttattcatgcaggaggagtgtttgcagaagtgccgggaacaagaggtggtggagcaaagcatctctttcctggtttccttctgctctgaactcaagtagtacccaccccctattcttcccctcttttgagtctgtttcactgagggcacggctggtaggagtaacgttgtccagcattaaaacagagcatcagtaatgtctaggaaaatgttaactttaacaacaccactaatcagtttagagaatatttgagcgtgtagcacttgctgatcattcattcagaaaatgaattgcctgccataaactaataagcatgatttggtttatgttttgatttaattatctctgagtagatgctgcttgaagtaatgactgtaatcacttttgccaagcataccccccgtttataatttaagaaaaaaaatttttttttttttgagatggggccttgttatgttggccaggctggtcttgaactcctggcctcaagcagtcctccccacctggtgtctcaaagcactgggattacaggcatgggccaacatactgaacataatgattcaaacatagaaaaaaaagtctcctggtagttcagttcccccatgccccaggagtttagtacaggggtgtccagtcttttggcttccctgggccacattcccttgggccacacataaaatacactaacactaacaatagttgatgagctaaaaaaaaaa

SEQ ID NO: 1117 - DNA, 158 bp, Homo sapiens
ggcatggtgctgggtgtctgtaggaccagctactcgggaggctgaggcaggagaatcacttgagcccaagaggtggaggttgcagtgagccaagattgcaccactgccttccagcctgggcaacagagtgagactccgtctccaaaaaaaaaaaaaaa

SEQ ID NO: 1118 - DNA, 16347 bp, Homo sapiens
aatctttttctttctttttttttcttttttgagacagagtctggctctgtcgcccaggctggagtgcagtggcgcgatcttggctcactgcaagctccgcctcccgggttcatgcgattctcctgcctcagcctcctgagtagctgggactacaggcgcccaccactacgcctggctaattttttgtatttttagtagagatggggtttcaccgtgttagccaggatggtctcgatctcttgacgtcgtgatgtgccccccttggcctcccaaagtgctgggattacaggcgtgagccaccgcgcctggtcaatcacaatctttttctgaagctagaaaacactgacagtactgagtggatagatgaagtcctgattctccaagtattcgtttaaacacagcccatttctcttactcccatgctttgatggaataatatttatgagtatagtgcaccatggtgatgtacacgttctgtcactagcacgccttaccgtaagattaaagagaagtgcttttctgcttaccaagtatcatttacaaacctaacagatttaaaactttgttctccatagaatgtctactagagtccttttagccactctttccatccctattactcctgagcgtacggatattgctcgacttctggatatggatggcattatagttgaaaaacagcgtcgccttgcaacactactaggtcttcaagccccaccgacacgaattggccttattaatgatatggttagtattaatttgaggatttttgtagctttgggcagaaaactttgtggtcaggtttaataactcatgattaaatactgggaattctgattcagtgccaagggttctgatgtatggacagggaagcactggtgtcaatcactgttcacttgaggcagttccgcgccagtgggtgagcaggggttaaattggtgggagttttgatctagcaggacttgggttggctctgggttataccgtgggccagttagtaagagaagaagtaatgatgggcaagaagagtcatggcttatttcaaggaaggtttaggaaaacttatttagctgtgtgtgggtaaatatgaagaggctaggtgtattagtatgttctcgcactgctatatatacccgaggatgggtgtggtggctcacgtctgtaatcccagcactttgggaggctgaggtaggtggatcacctgaggtcaggaattcaagaccagcctggcaaacatggcgaaacccggtctctcctaaaaataacaaaaaattagctgggcatagtggcacacacctgtaatcccagctacgcaggaggctgagtcaggagaatcgctggaacccgggaggcggaggttgcagtgagctgagatcgtgccgctgcactccagcctgggcgacagagtgagactccttttcaaacaaacaaacaaaaaagaagtacctgacactgggtaatttataaagaaaagaggtttaattggctcatggttccacaggctgtataggaagtatagtggcttctgcatctggggagacctcaggaaaattaccatcatggtggaaggggaacgggaagcaggtatggcttatacggctggagcaggaggaagacagagggggaaggtaccacacacttttaaacaacaccagatcttgggagaactcttatcatgaggatgggcctacggggatggtgctaaatcattagaaattgcccccatgatttagtcacctcccaccaggccacactccaacactggagattacagttgaacatgagatttgggtgggtacacagatccaaaccacatcactaggggagaaggtaaggtagacttaccttcagtgtctgatgttcaatgtctgaagaactaaaatattttcaacttttttctcttttaaactttcatttgatgttactaaatagtatggacttaattagggttattcagtgaaattgtatgtgaaatactttttaaaatgcagatttctaggttttacccagcagatataatacaaaagttttagagtgtggagcctaagacgtgttgttgttgttttttgagacagggtctagctctgttgctcaggctggagtgcagtggtgcgatttcagttcactgtaacccccacctcccaggttcaagtgattctcctacctcagcctcccaagtagctggaattacaggcacgcaccactacagtggttttttgtagttttagtggagacgggattttgccacgttggctaggctggtcgtgaactcctggcctcaagtgaacgatccccctcggcttccctaagtgctgggattacaggtgtgccaccgtgccggccagatttgtgtatctttttagtgtttcgcattgatggaatcttccattcagtggaaatttgttgagtgcctgttatgtgcctagcaagtgaaactgaaggcagaagttgtattctaggggagctgagattctagggattcttatcataatagtctgacttggttattagaatcacctccagtagattactttggggtaagagaaagagggataagtacttggctgtatgtttaccaaaaacggaatttaaatcattaacagtccctaattcatgaatagagcaataaagaaatcaaaaagataatggcaggctctctcagatatttttgaaatgtattctgaggaaacacctatattcactctgataaaagctagataaaaggcctaaattttctgcagtagtcaatttaagaacaaataacttttctagatagtggcatttttcctttgtgacatagtaatgcagattcactttgtagctaacttttgcaaagagttcctgcagagcagctttttttctactttgtattcctccatgtttttttctgctgccactgcccacagagttcaactttctgtttatggggccgatgtaggactcaatgtaataaagcaacagcagtgtcttgagaaagaagtttcattagcaaataaaacatttgctaataaaaaatttgcttctaatttttaaagctgaagaaacgtgccacactggaaggataatccacgtcaccttgttaaaggtgatcttggctaggcgcggtggctcacgtctaatcctagcactttgggaggccaaggcgggtggatcacttcaggtcaggagtttgaaacgagcttggccatcgtggtgaaaccccgtctctactaaaaatacaaaaaaaaaaaaattagctgggcattgtggtgcatgcgtgtaatcccagctaatcgggaggctgaggcaggagaatcgcttgaacccgggaggcataggttgcagtgagctgatatcgtgccactgcactctagcctgggtgacagagcaagactccatctcaaaaaaaaaaaaaaaaaaaaaaggtgatctcttagacttagatttaatatactgcaatatgttgtcccagaagcgaaagacatttacaattggctggaagtagaatttgagccactaaaactctgtgagcaagtcattcggtgatcactgatgggtagcattggaccaacaactagggcatctagattagagtcctcattgtgcccacagagtgtagacttctagaaggataccagttagtgtcaagtgaatggattagctgactgccaagaggcatttgtcaacttcttgagttgaccatatatccaaggtcaatacctgagcgttaggcttccataaccaaatttatgagacagagtgattccattatctcaggaaaagactcaaacattcctaagagtgacttttaaatcggaaagtaaaccaatcatgtattttagtgagaaatataatttagtagattatggcagcctttcacatttccctattcggaaggggactgcatgaagaatctaaaataacttgataggaatgaaattagagctgggaatttttttttttctcttaaaggcagattctaagttagggaattttatttgtatgcatataccacaccttattgcagtaaagatatatggatgcttataaggaggaagtgttagaatgttgtaggatttcagccttgtacccattttacattagagttaaccttagacctgagtgctcccatgtgtgggtgccctccttgcttggggatgcgatctgccaatatttgcctcagttttgtcacccactctctatgggtacacacttctgtgctttgctctatcccagcagttattttgtccttgggttaacagttcctaaaaaaaatgacatattccatggtaaaattgaagtccatataaatggggtaatatgtgaaattcttttctcaccgctatgtttgtgagatttattcatgtgttctatgtagctgttcttttttgagcatttttgtttattttatgaatacaccatatgtgaattctccccagtttggggctattagaaatagtgctgccatgataatttttgtgtgataatttatataaaagtaaaactggtattttccttgttattggtaataaaatattctattggccacagtagttgtctttgtgaatatttaattggttgtagttgtgttttttagagtttcatttcctttttacatacttgtggggcttttcacggtaggttaatgtgcatagtgtggggcaaaagacccagcatagttgtactttggattcatttttggtaaatttagaggaggttgaggcttgatgattttttaaatcattttccagatttccaatgctatcatttatactaagttcagaattttagttggaaaatttcctttggcagttacatcttttgttttgcttactgtaggtcagatttaatgtactacaatatgttgtcccagaagtgaaagacctttacaattggcttgaagtagaatttaacccattaaaactctgtgagcgagtcacaaaggtaagcctttgtatttaagttctggttgttaccacagagttggccttcttgcagttttgggttgtattcatatttgttaagagagaagttttgtcctatgtgttggaattcagtgcacatttcattgtcttttttctttatttcaagagaaaagatatatctgatgtgctcagcaaacctttggaggttaattagcagcatgactaatttagccattgctgccagtcaccttcaaacaagtatcagtagcttcatgatacattttgtatttctttgcattggatgatgtttttgtatattaaaaaaaaaagagttttagatgttttagtatctcttatgtagaaagtgtgattctctttcaatttaatggattttataggttctaaattgggttagggaacaacctgaaaaggaaccggaattgcagcagtatgtgccacaactgcaaaacaacaccatcctccgccttctgcagcaggtaaaaataaaaaaataaaaaaagttttgtgatgttatgtgctcatcatgaaactaaaaactggaaaaatctagaactgcctaggaagtgagaacctccccaagttctgcccctggcaaaaattagtctatttattaatttgaaaatcagaattattatatttacatattttgtaacggacgcttttgttttttggctgaacactgtctttgggcatttttccttgttagtaatgtagggctaccttattccatttaaggtactgtggtgtatttattcagactctcttgatgaaaacctgtattcctagattttttttttccctgttagaaatcttgtagcattgagcatctttcatacatgtatctttgcatacttctattactttctgtggcataagaagtggaattagtcatagggtttatggatttaaagctttaatagctattcagaagcctggattaatagaccccccaccatgagtgaatgagacagccttttcatatattttagtccaggggcttaagtcagtaagtgctcccattttgttttccatttgttgcatttgggaaggagggcgttttattatattttcatctcagtatttgtgcacatttcattgacctgctttcttttatgtgagtagtgttatttcttatgtgctatacaaataattgaaggctaattagcagtataactataaatagtaatgctgccagtctccttcagacaaaaattctataagaagtgtttaaatatattcggtaagtagcaggtttttaggcttttttgttttacaacaactaggatttgaaaagattataggtttgaggaatagtatgataatggttctcaaagcatggagtttagagtcgatggtctgggattagcattctggctttaacaatgtactgctaacataaattctctggcataatttctacttcccatgactgtcatgagattgcacataaaaagtgctgaataaacagtggctagtgttattaaccctttgttttctatgcaggtgtcacagatttatcagagcattgagttttctcgtttgacttctttggttccttttgttgatgctttccaactggaacgggccatagtagatgcagccaggcattgcgacttgcaggtaggtatgtgctgtaaggagacaggagaaggcccttgagggctagaaagacacataccttctgtttctcagcttttggtacagtgataccattttaaagtttactgagtgaacttttccagcttttgtatatgacattcttctgttactttttgacttcatgcttacttgtggatttaaccattgataatttaattttcaaaggttcgtattgatcacacttctcggaccctgagttttggatctgatttgaattatgctactcgagaagatgctccgattggtcctcatttgcaaagcatgccttcagagcagataagaaaccagctgacagccatgtcctcagtacttgcaaaagcacttgaagtcattaaaccagctcatatactggtatgcatcttcccggggaaataaatcccagaagttttgagggactcttaacgccatgccatgtcttttacaaaaaggtttgagacaatatctgagagaagggatttatgatatgtttcctatagaattgtacttggtagttttgttatttgatcaaatacacaaatcattgagctttcttccattgaacaaaatactactctgtgtaggtaatgtaatagggtggattatgttacagaaacaacagagtggacataggattcctcaaatagtgaaatacagtgactggatttttccctcctgcttaagttatttcttttttttcttttttgagatggagtctcactctcacccaggctggagtgcagtgatgccatctcggctcattgcaatctctacctcctgggttcaagcaattcttgtgcctcagcctcctgtgtagctgggactacaggcacgtaccacgtgcacagctaatgttttgtatttttagtagagatggggtttcaccatgttggccatgctggtctcaaagtcctggcctcaagtgatccacccgccttggcctcccaaaagtgatggggttacacgcatgagccactgcctgtaacaagttatttcttgtatgtgagctctgttaatgaacacctaaggtaggtttggtgcagagaaaagttgtcttatctaggagagcttctttagctgcgtcattgctattaaaagactgaataggagcaacaccatagcatttaataccgaaaacaaacagcttggatagtgtcatcttccattatcaaatgcagatacatagaaaggcagtacatcaggattattttgtaatttctttgatgcctaataccagagaatgttaattttggtcatgtaaaaaaattcatttgtttttgaagcaagagaaagaagaacagcatcagttggctgtcactgcataccttaaaaattcacgaaaagagcaccagcggatcctggctcgccgccagacaattgaggagagaaaagagcgccttgagagtctgaatattcagcgtgagaaagaagaattggaacagagggaagctgaactccagaaagtgcggaaggctgaggaagagaggctgcgccaggaagcaaaggagagagagaaggagcgtatcttacaggaacatgaacaaatcaaaaagaaaactgtccgagagcgtttggagcagatcaagaaaacagaactgggtgccaaagcattcaaagatattgatattgaagtacgtagcatcttagttattaaaaaattagttttatccaggtattttgtactcttagaaccacagtcctttaccatttgttggcttactgggttatttcatgcattttggtacagctggtcatgactaaatctgtgagtaagcatatgtttattgctctgtgaagttttgtgttttttttgagacggagtattatcttgtcgcccaggctggagtgcagtgacgtgatctcagctcactgcaacctccgcctcccgggttcaagtgattctcctgcctcagcctcccaactagctgggattacaggcgcctgccaccatacctggctaatttttgtatttttagtagagacagggtttcaccatgttggccaggctggtcttgaactcctgacctcaagtgatctacttgcctcagcctcccaaattgctggggttataggtgtgagccaccacacatgacctgtttcatagacaccttatacacatagcctgaaggtaattttgtacactattttacataattttgtgcatgaaacaaagttttgaatgcattttgactgacctgtcacatgggtcaggtgtggaattttacacttgtggcaccatgttggtgctcagaaagttttaaaattgggagcatttcagattttgggtttttggattaggtttgcttaccctatttagtagagtctgggtagatgtaggttggagtagtgagaaaaggatgtatggatatttttttccttatggtcaaatggaaataaggctattgtataatatttttacatttcctaaattatcacccattgtaacaataaaagcaatgtaggattttattctagaaagcagtgagttatgttaggcattgcttgtttctctttattaacaattgtgcatttgtattacctttcaggaccttgaggaattggatccagattttatcatggctaaacaggttgaacaactggagaaagaaaagaaagaacttcaagaacgcctaaagaatcaagaaaagaaggtaaatgaaagggttggtaaacctttcacataccaagttaagagagattttttaaaactacgtgtgttttcgtgtcattcagattgactattttgaaagagccaaacgtttggaagaaattcctttgataaagagcgcttacgaggaacagagaattaaagacatggatctgtgggagcaacaagaggaagaaagagtaagttttttatttaattgtaatatttttagattgtaataaaatcctctgccagtaatggaaccaaggattcagaattgctttattttgtattcttctgctagaaatggtgctctaatggctgcctatgaacagattggtagaaagagggaaaatttcacaatagagattacaaacgaaacttggaaaacaaaggacaactgaaaagcccattttataaaaaactgctttatatacactttaaatgggtaaattgtatggcatgtttatacatctcatagttttcattttacttgcagaattgtgcagccatctccacaatctaattttaaaacacgtctcaaaaagaagttctaaacccattagcagtagtcatccctattcttccccaccaccccagccctaggcaaccgctaaactactcctttctctagatttgctgattctggacattttatataaatggaattgtgtactgtgttgtctttcgtgactaaacaggtcattccatagttttgttaacttatagtatattttatatttacctaatgatacaaaagcatggtttacaaatgcttacggcaccaaatatgtaataaaagtgagtaagcagatctactttaaaaaagtaaccataagcaggaggcaaacatcggtgtagggtgtgataggagaatgcagccttttcttggtttaatctgattgttgtcccttggagattaatgggcctaggattgccagcccttcccatttttttttctggaaaagttggaatttttgtgataattctcttaacatgtaaataattaaaaactaattagaaaagtgctgcagaccaaattgggttgatttggagccttcagtttttcatgtagggtagaaaagaaatagccatatatcatcttgcattgatttccaggtgtttttaaggatgaaaatgcctttaaaaattaaaccatggtgtttgttgttaccatgtcatatttattattttattttattatatataggcacaccttgttttattgtgcttcactttattgtgcttttgtgttacccaggcaggtctcaaagtcctgggctcaaacgattctcctggctgggcctcccaaagtgctgggattatgggtgtgaatcacacctcccccagccccccatattattattatttttattcttatttcttcttttacatattaaaagtttgtggtaaccttgcattgagcaagtctgttgacaccatttttccagcagcatgtgctcatttcatgtctctgtcacattttggtaattctcaaagtatttaatactttttcattatatttgttgtagtgatcagtgatctttgatgttactgttgtaattattttggggtgccacgaaccacactcatagaaggcggtgaacttaatctgtaaattaagtctcttctgactgttctaccgactggccattcccttactctctgtctctccctgtccttgacccttcctattattccctgagacactaatatgtatatatttatttgagacagagtttcattctgtcgcccaggctggagtgcagtggcgcaatctcggcacactgcaacctctgcccccgccgggttcaagtgattctctggccgcagcctcccaagtagctgggattacaggcgcctgccaccatgcccggctagtttttgtgtttttagtggagatgaggtcaccgtgttggctgggctggtcttgaactcctgacctcaagtgttctgttcgcctcagcctcccaaagtgctgggattataggcgtgagccactgtgcccagctcctgagaggtaatattgaaattaggctaattaacaattccacaatggcttttaagtgttcaactgaatagaagagtcacctgtctcactttaaatcaaatgctagaaatgattaagcttagtgaggaaggcatgttgaaagttaggcctcttgcactaatcaagttgtgaatgcaaaggaaaagctttttttttttttttgagatggagtttcgccgttgttgcccaagctggagtgcaatggcgcaatctcagcccaatgcagcctccgcgtcccagttcaagtgattttcgtgcatcagcctcccgagtagttgagattacaggcatgtgccaccacacccagctaattttgtactttttttttttttttttaattagagacggggtttctctatgttggtcaggatggtctcaaactcctggcctcaggtgatctgctcatctcggcctcccaaagtgctgggattacaggcatgagccaccgtgcctggcccggaagagttcttgaaattaaaaatgctactccagtgaacacataaacagtgagaaagtgaaacagccttattgctgatatggaaaaagtttcattggtctggatcaaaccagccacaacattccctttagccaaagcctgatcgagagcaaggctataactctcaacagttaataatacaaatagctgagagaggttagaaagccgcagaaggccaggcctggtggctcacgtctgtaatataagcactttgggaggccgaggagggcagatcacttgaggtcaggagtttgagaccagcatggccaacatggcaagaacccgtctgtactaaaattacaaaaattagctgggcgtggtggcagatgcctgtaatcccagatactcaggaggctgaggcaggagaattgcatgaacctgggaggcagaggttgcagtgagctgagattgcgccactgcactccaccctgggcaaccatgggagactctgtctcaatcaatcaatcaatcaataaaggaagctgcagaagaaaagtatgaagctagcagaggttggttcataaggtttaaggaaaaccgtctttatgacataacagtacgatgtgaagcagcaagtgctgatggaggagctacagcaagttattcagaagatttggctgagatagttgatgaaggtggctacacttaaacaacagactttcttacttttttgagagacagggtctcactctatcacccaggctggagtgcagtggcgtgatctcagctccctacagtatctaccccctgggctcaagtgcccacttcagcctcctgagtagctgcgaccacaggcatgcaccaccatgcctagctttttttttttttttttttttgtatttttagtggagacaggctctccccaggcttcccaggctggtctcaaactcctgaagtcaagcagtctgcctgcttcagcctcacaaagtgttgggattacaggggtgagccatggtgcccagccaatagattttcagtgtagatgaaacgaccttctgttggaagaagatggccagctaggtctttcatacctagagggaagtcagtgcctagcttgagagcatcaaagggtatgctcactgtttaggggttaatgcagctgctaactggaagttgaagccaattctcgtcattccaaaaatcctagggtccttaagaattatgctgcatctaccctttctgtggtctgtacatgaaagaacaaagcctgaatgacagcatatctgttaatagcatggtttgctgaatattttaagccccctgttgagacctactgctcaaaaaaaaaagttttcagaatattgctgctcattgacaatgcatctgatcgtatgacagctctgacagtgatgtataagagagattaatgtttgttttcatgcctgttaacacagtatgcattctgcagcccgtagatctaggaataattttgtctttcaagtcttattatttaagaaatatatttcataaacctgtagctgccatagtgattcctttggtggatctgggcaaagtacgttgaaaacctgctggaaggaattctttattccagatgccatttgtgattcgtgggaggaggtcaaaatatcagcattagaaagagtttggaagaagttgattccaagcctcatggatgacttggaggggtacatgagtagagtggagaaaataattgcagatgtggtgaaaacagcaagagaagtagagttagatgtataggctgggtggggtggctcacacctctaatcccagctctttgggaggctgaggtgggcagattgcatgagtccaggagtttgagaccagcctgggcaacatggtgaaaccctgtctctacaaaaaaacaggaaaattagccaggcatggtggagtgtgcctgcagttccagctacttgggaggctgactgaggtgggaggatgcagaggttgcagtgagctgagatggtgccattgcactccagtgcttgggtgacagagacagaccctgtcttaaaacacacacacacacacacacacacacacacaaaaccaaaaaagactataacctgaagatgtgactgaattgctgcaatctcatgataaagcttggatgggtgaggagttgcttcttatggatgagcaaagtaagtggtttcttgaaatctcctggtgaaaatgctacgaacattgttgacctgacaacaaaggatttagaatattccataagtgtagttgataaagcagcagcagggtttgagaggattggatcaaattgaaattctactcttgagttaaaaaccgtcaaccagtgccacatgctagatgaatcttttgtaagaggttgcaatcagtgtggcaaacttcattgttacctattttaagaaattataccatagtcaccccatcctttagtatctgccatgctgatcattcagcagtcgtcaacattgaagcaagactccactagcaaaaagattatgactcattgaaggctcaggtgatcattagcattttttagcaataaagtattttttgttttgttttctttgagaacaggagtctcaccatgttgtccaggctgatcttgcactcctgggctcaagtgattctcttgcctcagcgtactactgcatctgacttacagtattttaaaattaaggtttgtacattggtgttttagacatgctattgtatacttaatagactgcaaacttctatatgcatcggataaccaaaaaatctgcgttgcttgctttattgcaatattctttattgtggtggtctagaaccaaacctgcagtgcctccaaggtgtgtccgtgtatcataatttttcctttataaagttcctggtatcatggggctaaatgaaaactgtctctcctaaatgcctcaggattactttgtctacctcttgcccgtaattgccttctggggacctattgacatggatgtagttaacgttttcatttttatggcatgacagaaggggcagtggagcagcttctaatttttcaagagtatttctcagtaatttggggttaatgagtaaaaaaaaaagtgcattgaaatttcacaatatttgtacttgcagattactacaatgcagctagaacgtgaaaaggctcttgaacataagaatcgaatgtcacgaatgcttgaagacagagatttattcgtaatgcgactcaaagctgcacggcagtctgtttatgaggtgagcttgctgatttttgggaaatgtttattcatgagctttctagtattggcctaagggttctcccttaacaaattggtatattctttattgagttactatgtgtaacggtcattcaaataatagaaatttttggatgatatttcataagcaaaacaatcatcaaaattgttctaaaggtgaaagttgaatgcataatttaatacaagttttgtttactgtttttgttagaaatgaaaaaactagatcaaaatgtcctgggcttagattctaatttgaccattgaattattttgtataaagacaaacccactggaggtaggtaatatcaacaatttaaatgttttaaaatttggcctgctgacaagttaatggtcatttggaagttagagtttttgtgctgagaggttgctttcgatgattctgatacacttgagagtcttttgtaaacctaatagctttctgcgagtttgttgctcttgacaaagtgtgccctttttgggttgggggttacttcgattgcaggaaaaacttaaacagtttgaagagcgattagcagaagaaaggcataatcgattggaagaacggaaaaggcagcgtaaagaagaacgcaggataacatactatagagaaaaagaagaggaggagcagagaagggcagaagaacaaatgctaaaaggtacacaggtcaaacaggattggaggggtgctaatgcaaggttggtgttaagatctagtttttagtgatcttatgtagaaaatacaggaatcaaggtaattggccttttagcactgtaattaactggatctcagaacccagtttgctgtatgtgaagttgttacatcgtctgccagcatttccccacacatttgatgttcttctagaaattaatactttttttaatcaccgtattctgtgtattaacatttattgaggaatacattccagatgatggctgttaaatgatgctatatctggaatcccagattgctcagggatgggggagggattctagtatcttattacaaaactatagttgaggggtgtagtacttattttcttgactatgttctgtcctgtagctgattacaaactattttcaaattcttttacttgtacattatgctacctgtttaataccagaaaagtggaactagcactagggggaagatatggctgggaggcacacttagtaacctaatcaatggtctagagcgggaagagagagagcgcgccgaacgagcaaaacgcgaggaagagctacgagagtatcaggagcgggtgaagaaattagaagaagtggaaaggaaaaaacgccaaagggagttggaaattgaagaacgagaacggcgtagagagtaagacagaagtcttgtcgatagttccctttctagaaagg

SEQ ID NO: 1119 - DNA, 2259 bp, Homo sapiens
gcagcagggtttgagaggattggatcaaattgaaattctactcttgagttaaaaaccgtcaaccagtgccacatgctagatgaatcttttgtaagaggttgcaatcagtgtggcaaacttcattgttacctattttaagaaattataccatagtcaccccatcctttagtatctgccatgctgatcattcagcagtcgtcaacattgaagcaagactccactagcaaaaagattatgactcattgaaggctcaggtgatcattagcattttttagcaataaagtattttttgttttgttttctttgagaacaggagtctcaccatgttgtccaggctgatcttgcactcctgggctcaagtgattctcttgcctcagcgtactactgcatctgacttacagtattttaaaattaaggtttgtacattggtgttttagacatgctattgtatacttaatagactgcaaacttctatatgcatcggataaccaaaaaatctgcgttgcttgctttattgcaatattctttattgtggtggtctagaaccaaacctgcagtgcctccaaggtgtgtccgtgtatcataatttttcctttataaagttcctggtatcatggggctaaatgaaaactgtctctcctaaatgcctcaggattactttgtctacctcttgcccgtaattgccttctggggacctattgacatggatgtagttaacgttttcatttttatggcatgacagaaggggcagtggagcagcttctaatttttcaagagtatttctcagtaatttggggttaatgagtaaaaaaaaaagtgcattgaaatttcacaatatttgtacttgcagattactacaatgcagctagaacgtgaaaaggctcttgaacataagaatcgaatgtcacgaatgcttgaagacagagatttattcgtaatgcgactcaaagctgcacggcagtctgtttatgaggtgagcttgctgatttttgggaaatgtttattcatgagctttctagtattggcctaagggttctcccttaacaaattggtatattctttattgagttactatgtgtaacggtcattcaaataatagaaatttttggatgatatttcataagcaaaacaatcatcaaaattgttctaaaggtgaaagttgaatgcataatttaatacaagttttgtttactgtttttgttagaaatgaaaaaactagatcaaaatgtcctgggcttagattctaatttgaccattgaattattttgtataaagacaaacccactggaggtaggtaatatcaacaatttaaatgttttaaaatttggcctgctgacaagttaatggtcatttggaagttagagtttttgtgctgagaggttgctttcgatgattctgatacacttgagagtcttttgtaaacctaatagctttctgcgagtttgttgctcttgacaaagtgtgccctttttgggttgggggttacttcgattgcaggaaaaacttaaacagtttgaagagcgattagcagaagaaaggcataatcgattggaagaacggaaaaggcagcgtaaagaagaacgcaggataacatactatagagaaaaagaagaggaggagcagagaagggcagaagaacaaatgctaaaaggtacacaggtcaaacaggattggaggggtgctaatgcaaggttggtgttaagatctagtttttagtgatcttatgtagaaaatacaggaatcaaggtaattggccttttagcactgtaattaactggatctcagaacccagtttgctgtatgtgaagttgttacatcgtctgccagcatttccccacacatttgatgttcttctagaaattaatactttttttaatcaccgtattctgtgtattaacatttattgaggaatacattccagatgatggctgttaaatgatgctatatctggaatcccagattgctcagggatgggggagggattctagtatcttattacaaaactatagttgaggggtgtagtacttattttcttgactatgttctgtcctgtagctgattacaaactattttcaaattcttttacttgtacattatgctacctgtttaataccagaaaagtggaactagcactagggggaagatatggctgggaggcacacttagtaacctaatcaatggtctagagcgggaagagagagagcgcgccgaacgagcaaaacgcgaggaagagctacgagagtatcaggagcgggtgaa

SEQ ID NO: 1120 - DNA, 2260 bp, Homo sapiens
gcagcagggtttgagaggattggatcaaattgaaattctactcttgagttaaaaaccgtcaaccagtgccacatgctagatgaatcttttgtaagaggttgcaatcagtgtggcaaacttcattgttacctattttaagaaattataccatagtcaccccatcctttagtatctgccatgctgatcattcagcagtcgtcaacattgaagcaagactccactagcaaaaagattatgactcattgaaggctcaggtgatcattagcattttttagcaataaagtattttttgttttgttttctttgagaacaggagtctcaccatgttgtccaggctgatcttgcactcctgggctcaagtgattctcttgcctcagcgtactactgcatctgacttacagtattttaaaattaaggtttgtacattggtgttttagacatgctattgtatacttaatagactgcaaacttctatatgcatcggataaccaaaaaatctgcgttgcttgctttattgcaatattctttattgtggtggtctagaaccaaacctgcagtgcctccaaggtgtgtccgtgtatcataatttttcctttataaagttcctggtgtcatggggctaaatgaaaactgtctctcctaaatgcctcaggattactttgtctacctcttgcccgtaatttgccttctggggacctattgacatggatgtagttaacgttttcatttttatggcatgacagaaggggcagtggagcagcttctaatttttcaagagtatttctcagtaatttggggttaatgagtaaaaaaaaaagtgcattgaaatttcacaatatttgtacttgcagattactacaatgcagctagaacgtgaaaaggctcttgaacataagaatcgaatgtcacgaatgcttgaagacagagatttattcgtaatgcgactcaaagctgcacggcagtctgtttatgaggtgagcttgctgatttttgggaaatgtttattcatgagctttctagtattggcctaagggttctcccttaacaaattggtatattctgtattgagttactatgtgtaacggtcattcaaataatagaaatttttggatgatatttcataagcaaaacaatcatcaaaattgttctaaaggtgaaagttgaatgcataatttaatacaagttttgtttactgtttttgttagaaatgaaaaaactagatcaaaatgtcctgggcttagattctaatttgaccattgaattattttgtataaagacaaacccactggaggtaggtaatatcaacaatttaaatgttttaaaatttggcctgctgacaagttaatggtcatttggaagttagagtttttgtgctgagaggttgctttcgatgattctgatacacttgagagtcttttgtaaacctaatagctttctgcgagtttgttgctcttgacaaagtgtgccctttttgggttgggggttacttcgattgcaggaaaaacttaaacagtttgaagagcgattagcagaagaaaggcataatcgattggaagaacggaaaaggcagcgtaaagaagaacgcaggataacatactatagagaaaaagaagaggaggagcagagaagggcagaagaacaaatgctaaaaggtacacaggtcaaacaggattggaggggtgctaatgcaaggttggtgttaagatctagtttttagtgatcttatgtagaaaatacaggaatcaaggtaattggccttttagcactgtaattaactggatctcagaacccagtttgctgtatgtgaagttgttacatcgtctgccagcatttccccacacatttgatgttcttctagaaattaatactttttttaatcaccgtattctgtgtattaacatttattgaggaatacattccagatgatggctgttaaatgatgctatatctggaatcccagattgctcagggatgggggagggattctagtatcttattacaaaactatagttgaggggtgtagtacttattttcttgactatgttctgtcctgtagctgattacaaactattttcaaattcttttacttgtacattatgctacctgtttaataccagaaaagtggaactagcactagggggaagatatggctgggaggcacacttagtaacctaatcaatggtctagagcgggaagagagagagcgcgccgaacgagcaaaacgcgaggaagagctacgagagtatcaggagcgggtgaa

SEQ ID NO: 1121 - DNA, 7442 bp, Homo sapiens
cagagcatcaccgcagaaacaaaggctccagcctccggacaccatgtctgtgcgcttttcttctacctccaggagacttggctcttgcgggggcactggctctgtgaggctctctagtgggggagcaggctttggggctggaaacacatgcggtgtgccaggcattggaagtggcttctcttgtgcttttgggggcacctcatctgcaggaggctatggcggaggtctgggcgggggaagtgcttcctgtgctgccttcacagggaatgagcacggcctcctctctggcaatgagaaggtgaccatgcagaacctcaacgaccgcttggcctcctacctggagaatgttcgagccctagaggaggccaacgctgacttggagcagaagatcaaggggtggtatgagaaatttggacctggttcttgccgtggccttgatcatgattacagcagatatttcccaattattgacgaacttaagaaccaggtaagaaacgccatggcgtgagtgttagcactcctgagagtgtttagccactcacagatgcacaaatgtataagctatcacaataacagggctttgccctcagcttctaaattttaggagttcattttcaatattaaaaataatttctaataaattctaatatttgaacatggcacgtccatcatgtagtattaggtatatgcttttggtaatattaaaatatcaaaagctgtccagtgtctccagttatatatttataggctttcccatagaaagagctttttttaatgcttggggtgggaaatacaagagaccatacccagccaggcacagtggttcagcctgtaatcccagcactttgggaggccaaggcaggtggatcacttgagattaggggttcaagaccagcctggccaacatggtgaaaccctgtttctactaaaactacaaaagttagccgagcgtggtggcacatgcctgtaatcccagctacttgggaggctgaggcaggagaatcacttgaatctgggaggtggaggttgcagtgagccaagatcgtgccactgcactccagcctgggcaacagagcgagactcggtctcaaaataaaagacagagagagagaccatacttaaattacccatcttcaaaagaatggtctgattattagagacagatgccagaaatattactataatttcatgggtaattttatttcaaggaactttgaaatgcatcttaaatatttcctcaatcttaactaacttttcatttgtcagataatttctgcaactaccagtaatgcccatgttgtcctgcaaaatgataatgcaagactaacagctgatgacttcagactaaagtaagtagagctgaagataaatgggaaaaaaaagttgtctaagcattttttctcctttattcttctaagttatttgacgttgtctcaagcctttgttcttgtttattcatgtatttgttttaaacaaaatgcctgttagaatgagtaactagctgagcaacaaattttacttgggaaatttcgggactaacaaaaacgagtgtcaaagtcatatgagaaagaattttggctattcccattctcttgcttcaatgaaatgtatttattgcatgatagatgacctaactgaaatgtgtttttttaattaattaattaatttatttatttatttattttttggagacggagtctcgctctgtcgcccaggctggagtgcagtggcgcaatctcggctcactgcaagctccgcctcctaggttcacgccattctcccgcctcagcctcccgagtagctgggactacaggcgcccaccactgcgcccggctaattttttgtattttttaatagagacggggtttcaccgtgatctcgatctcctgacctcgtgatccgcccgcctctgcctcccaaagtgctaggattacaggcgtgagccaccgcgcccggcctgaagttttaagtattatcttagtagttttacctcaaagcttagtctgagttgtatgatgatctaaaaagtgatgtgccatgtctaatgactaatgatgaaacttccaaatacttttctaaggtttgaaaacgagctagcgcttcaccagagcgtggaggcggacatcaatggtttgcgaagagtcctggatgagctgaccttgtgcagaacggacctggagatccagctggaaactctcagtgaggagctcgcttacctcaagaagaatcatgaggaggtagaagctccacccggctggctctcacaatcgcctccctaccaaattttaaaactaatttcagatgataaatataatgtcttaaattaacattcaagaaggaacctgtcagtttctccataaggcttagattgtttgagacgcttctattcattcttctcaaaagaaacaaacctcccaaaaagtttctaaccctatagatcttgtccatctgactcctttaaaaatattcaggccagaagcggtggctcatgcctataatcccaacactgtaggagacccagaatggaggatcgcttgaggccaggatttcgaggctgcagtgagtcataattgcaccactgcatttcagcctaggcatcagagcgagaccctaactcaaaaagtgcaataaataaaatattcagatcctaattccgttaaacaaatatctttcaggaaatgaaagctcttcagtgcgcggctggaggcaacgtgaacgtggagatgaacgcggcccccggggtagacctcacggttctgctgaacaatatgcgagctgagtacgaagccctcgcagagcagaaccgcagggacgcggaggcctggttcaacgaaaaggtaaaaccacgcttgggtgcgcccgggcgcggactcagccccagcgccctaacgcggcccctgccgttccagagcgcctcgctgcagcagcagatctctgacgacgctggcgccaccacctcagcccggaatgagcttatcgagatgaaacgcactcttcaaacccttgagattgaacttcagtccctcttagcaacggtaagcgaaaagttacaaaacagatttgctttagaaattgagaaaaaaataatcgaagagaattttcttccaacataattacatattttagtttttaaccattaattacagtgcttgacataagacatatttgcattttgcacatgacaatcctctttgcctacaaagtatagctggatgccaataattatgaaatattagaaattagcaaatacagtcaagatactggaaaaagaaaatcgttttgactttgaatcttctatcataagtcaaaatatcaaaaaccactcatatgtggaggctaaaaaagttgatctcagaagtagagagtgggataagtgcttactagagcctgggaaggggatggggggataggaagaggttggttaaaggatacaaaattacagagaaatagggagaatcagttcaagtgttctatagtactgtagaatgactacagttaagaataatttattctataatttctaatagttcaaggagaggattttgaatgttcccaacacacacaaaaaagataaatgtttgggaccatggatatgctaactgccctgattctatcactacacattgtgtgttttgaaatataattatggaaccccataaatatatacaattcttatgtgtccatttaaaaaaaaagaaaaaaaatcctactgcttaaagagagcaaaaatacatttgcaccactcctagcttcatctagcattccttttggccactcaattaagagcacttacaagttcctttgtaagtggcatagacagaggaaaagtcgaggcatgaaggctgactataaaactaaacatgtgtaatgataatcataactgctttcattaagggtttgcccagcacttccgcccacatgtgagtccacaacaaccccggggcatgggcagggcagacgttataactcatgtcattatttccaaaagaggactctgagattcgaagaagttaagcaattcccacagtcccacagttgggtatgaaggaatccagaagttctctccaaattttctaactcccaagtctatacttttcccactatggctagtaaaccaccagagtttatccacagatgaggctatgaatgtatataaaatcaagactttatataaaaaatacttgcaggtgaaaggataagacactctcatcttcattccatgtaaaattgcagtgagtgttccctctgagtatatctgtaaacccattcagattcacaagccaatgaattgaactactgtatttaaagtctaagaaggtaattattttctgtggtttattctactcatggaacgtttatgcggtttactgcaggatgactttttaatagaagagctacaatcctcataagacaagactgtcacatggctagaaatgagtagcaaagtataggcggacttctagttgtgggtaaagtagcaaattgtgccacactctacaagcataggctatattggtgcaggggagggatctttcagtctgtgccctatgaagagacaatttcatcttttttagcacacctgggcatctgagggacattcagcaccagctgtgtcattctcaaatagaaaagtagtaggacatttaataaaggcaacaattaatattgaagaagtggaatcttttgggtaaatataattatttgcatgatgtaaggataattctcttaattatctcttaaatgctttggcttattctaaaacaccgtgaccttttctattaaaccatgtcttaccaaactacagaaacactccctggagtgctccttgacagagaccgagagtaactactgtgcacagctggcacagatccaggctcagatcggggccctggaggagcagctgcaccaggtcagaaccgagaccgagggccagaagctcgagtatgagcagctccttgacatcaaggtccacctggaaaaagaaattgagacctactgcctcctgatagatggagaagatgggtcagtattgccgccattgagaaaacaattcatttttaaggttactaaagatgatttgaaatcaagtacaaaatatctatgatctagatcacgcatagataatactcttttagtgttatttcagaatgcagtgaattcccaccttaaatcattatttttcagtttcctcagtaaaacagaataattaatataagcgctctatacttttacagctcctgttctaaatcaaaaggctatggaggcccaggaaatcaaacaaaaggtaaacaaaagctgtgttaggcattcagtgtttatttgtatgtgtttcaaatgatgttttatttcctatttatgaatttgataaattctaaacagtttatatgtggcattttagattcatctaaaaccaccattgtcaaaacagttgttgaagagatagatcctcgtggcaaagttctctcatccagagttcacactgtggaagagaaatccaccaaagtcaacaacaagaatgaacagagggtgtcttcctgaactccagcctctgagacagaatggcccccaaattaaaataccaaaatgaagctagtttcctaaataagggtccccttatttttctgcttttcttccaatgaattaagacaagttatttttagaatagtaccatttctttggctttttctctatggtggtgtttcaataaaagttcttcctgttgcaagtcatcttccctggttctggccaatctttgcattttagatataccctcccaaatggaagctgaattttgtctttaatttcttctgtttaattcaacagtcttcacaagttggaagtaagtttaatgtgaaaactagttggagtctttttgacttctctgtaaaattttgtctcctttgtctcagtacgaaaagtacttactgagaacacgctatgtgccagataacgaggataaaacagttaataagatccagtccctgaagtcaatatgctcatagatgtagaaataagaacctgaagaatcagaaacaaacttaaacataaaggaaaggctataagtagtgatatttgaaggtagaaggggaaaaagagagctgtgaggacaagggtaagaggagaattccagcaggcatctaattcataatcttgatcactccaccataacggtaggaattcacaagttctctccttcgtttttgccatccaagactgcagagccatgtggctctcaagtcaaaggtaacttttagtgcaataatttcagcacctaccattaatgaatctatttcaaggctgggagtgggaggaggttaaactcagcagaaaaccctccagaggtttatttgtgggtgagagatttggctccccctcaccaatcccgtaacagaaacagcctgtttttctctggaaccagtgtcctattactgaactctgtagaattggctcagcacagttgaaacacagtcactttcaagctgtctttcctcctctttttcccacacgcatgtaataatacctaagcgaatgtaaggcagataccctctcacttaactttttaattaaccagtcctcacatcatataccctcatatcaaaattaggaaaaggaaacatcctaccacgtaagagttgaaaagttacattcacgcaaaaacctgtgcacagatgtttataacagctttattcgtaattgccaaaacttggaagcaaccaagatgtcctcttggttgacgaatggataaataactgtggtacctctagacaacaaaatattatttagtgctaaaaagctatgagctatcaagccatgaaaagacacagaggaaccttaaatgtatattactaagtgaaagaagccaatctgaaaaggctacatactgtatgaccccaactatatgacattctgtacaaggcgaaactatggagatagtaaaaagataattggctgccagaaattggaggtgagggatgcacaggcagaacacagaggatttttaaggctgtgaaaatactctggataatatcataagaacggatacgtgtcattatacattttccaaacccgtagaatatacaacactaagagtaaacggtaatactaaaaagtctttaatttttttttttttttttttttttttgagacagtctcgctctgtcgcccaggctggagtgcagtggcgccatcttggctcactgcaagctccgcctcctgggttcaagccattctcctgcctcagcctcccgagtagctgggactacaggcgcctgccatcacgcccgtctaatttttttgtattttcagtagagacggggtttcaccgtgttagccaggatggtctcgatttcctgacctcgtgatccacctgcctcggcctcccaaagtgctgggattacaggcgtgagccaccgaatacttagctcagatttcacagtatttga

SEQ ID NO: 1122 - DNA, 155 bp, Homo sapiens
gggcatggtggcaggcacctgtaatcccacctacttgggaggctgaggcaggagaatcacttgaactcgggaggcagaggttgcagtgagccgagatggcaccactgcactccagcctgggcgacagagcgagactccatctcaaaaaaaaaaaa

SEQ ID NO: 1123 - DNA, 9872 bp, Homo sapiens
ccggcccggcgcccgatttccgccttccgacccagctgtgggctgcgccccacgccagcccgcgccccgcatggctgccgccggggccaggcctgtggagctgggcttcgccgagtcggcgccggcgtggcgactgcgcagcgagcagttccccagcaaggtgggcgggcggccggcatggctgggcgcggccgggctgccggggccccaggccctggcctgcgagctgtgcggccgcccgctctccttcctgctgcaggtgtatgcgccgctgcctggccgcccggacgccttccaccgctgcatcttcctcttctgctgccgcgagcagccgtgctgtgccggcctgcgaggtgagccgccaaacggggtcgggacggggccatgcctccgacgcgtgcgcggcgttaattccgggagcgaccagggggacggcggcaagcaccgctgccgccccagcctcagagctccctctccgcgctgccccaggagcaccttctcccgggcccttccaggatgtgctcatttttgctacataagcttctaactgtgcccacgcgcattggtaacccccagcttttaatcagtgggtaccaggtatggtgttaattcagataatagaaattgtcttggaaagatggatcccagtagctttttcgtatttttggcagtcgttcttaacgatcagtcttattaatttgattaactcaaaccacctctaggaggcaactcagttgcgtgtaccggacgaaatctagtttctggattttaaaagcttattcctgaaagcaaaaactttcatttcttttttgttgttgttattttcagttttacgtgcagaggataaaatatgtgaattgctgttttgtttgaagataaaacttttctctgtattcttttttagtttttaggaatcaactacccaggaaaaacgatttttactcatatgagccaccttctgagaatcctcccccagaaacaggagaatcagtgtgtctccagcttaagtctggtgctcatctctgcagggtttgtggctgtttaggccccaaaacgtgctccagatgccacaaagcatattactgcagcaaggagcatcagaccctagactggagattgggacataagcaggcttgtgcacaaccaggtgggtaatcttttttttaagtctcagttcagtttcatcgcctttgtcaacccagatatttccaggacaactttaaaggtaaaattaggaaaggtatagtactttaaaatttttcatgcctggaacacctttgtaaaaaaaaaaaaaaggctgtgaagtctgaatcactgaataatgtcaccatataggcatttaatttatgaccctttatctaaaatgccagaactatagggaatatagtactttagagacagcaaattattagactgtcttcaaaactaaatgattactaatagtgctgtcctttttgtttcagatcatctggaccatataattccagaccacaacttcctttttccagaatttgaaattgtaatagaaacagaagatgagattatgcctgaggttgtggaaaaggaagattactcagagattatagggagcatgggtaagcagtttcaggacttcattcattaagtggttaaacataatacttggaagaaagggctccatgtgcctagaagagaggtactgagaggaagactcactttggaggctgtagcatacaattttcagatattgcctcaggtaaaaatatacttcctggactttgttttctgacacataagaggtgtgttctgctccctgtaaagacaagggtgggtatccagatggtcccatgagtagggctgcacaagatgctggaggcttggtaagttcctctgggtcgcagatcggtttctcgggtcgggatagtgtgagtgcctagcacagtgtcgggcacgcagaagggccccttaaaagtttctctttcatctggccagttttagatacacaattttgtcagtttacttacagtgcatactcttgggtagtacttgtgctgaccaagtatcttagaggcttattttattatagtagccaacatttatccagcacttaccttatataaagggctgtttgtgcatgagctcattaaaatcgtgacagcagaccaatgagtgagaaactgccccattttgaaggtgaggaaattgaggttctgggtataactttctttggtcacataatattaaattttacaatttgagccttgagccatacacaaaaccaccacaaaattagatttatagactcaaaatgaaaacatcagcttactggtttgtagttcataccagtcatacattccaaaacatgttttgagtcttactctgtgcctgaccttgtgcttgataacagggatataatgggaagcaacactccagtggtcagatgctcacagtcttatggaggagcccaaataatatctggggaagttaaagtccatataatgactgataagagtacaatacaggtgccatgggaacacgtgacatcactgaagactgcctggaaggggccgcgcgtgtgttcatgcctatacgataaacatgatacataatgaaaatgcttatctttaggagaaaggagagcctagagtagcaggatcaaggatgaaagctggacttcaaatatgccttgttagtgtaaatgtgactgtggaactgtatgagtattttaagattatggagtaaagtaagttttaaaaagcagtccctaatcatcaaaagtaaaaaactcttgatgtagtcatataaccacactaagaactcttccaggtgacttcaaaacataggacagtacatctctagtagaatatgccctgagaatgaaaagaatgtaacagtgttagtattttgaataaacatgttattactagactgttgcttttattttgagatggttgtgtgtgtattggggggaaaggaaacgagtaattatgttggtgttactgagaactgagatgttgggcgtaggaggaagataatgttgattgtgtctacgtaccatttctctctaaaaggaactccaggctctttggagaggtggttgattccagaactaggtcaggaaacgttcatataatgtgggaacatggtcatatcaaagattaaggataaggattactagggccatgtcagaactcaagcaacatgaaaaggctcctgcttgcaaaagatggacagtttgaacatccacaaggacgctaactgcatcagatatgtttaatgggttcaaaatgatactttaaaaaaactcagtaatcatctttataggatacttgggaacagactcattttcaaattggtaaataaaaggaaagagtttgccttcgaggggtacataacttaattatgaatgaagtgatatgtgtggaatttacttcagagtaatggaggtggaagtggcagagaaaggaaacactggacttgatagtgttgaaactgattaatgatatgtggcggttcattatagtatttccacttttctgtatgtccaaaattttctaaaataaaaggagaattgaatagaaaaatgcttcctggaggtagctgtgtcttacctgagacttggcaggaggcagtagggcctgagggaacagcatttacagtgtcctaacggttatactgaaactttccacgtatacttgatggaacatcaatctgaaggcatcctacacttcctccatcagacctgatggtgcaagtgaacaccatcagtgcctttccagtttcatcaaagcagttattttagcttctctgacccaaggtatatcagttctattttaacgtacattacaaagactaatggttatacttagagacacgggtctgttggggacagcagtggcttagggtggctgtaatcccaggaaggaatgtggagaaggaaatgaacatttttttttttgagacggagtctcactctgtcgcccaggctggagtgcaatgtcaccatctcggttcactgcagcctctgcctcccaggttcaagtgactctcctgcctcagcctcccgagtagctgggattacaggcacctaccaccacgtctggctaatttttatatttttagtagatacgggatttcaccatgttggccaggctggtcttgaactcctgacctcaggtgatctgcccgcctcggcctcccaaagtactgggattacaggcgtgagccactgctccaggccagaaatgaacacttgatgactgagtgagtgagcctaccagctgaggatactaatgataagggctcacatttgttgggtgtcctgtgatgtgctgggcagtcctaagcccttgaccattctgttattttgaagctttaaggagatgcactaaatggaagtccatataatagagttggatggagtacctggaaattcagatggtccaacttgaatgagtgaataaatagggaaagctatctgattaaaagtgggtcccctctccatgtgtgaattgtcaagttgtggggattactcctgtttttcataatagttacgttgatttttcaggtgaagcacttgaggaagaactggattccatggcaaaacatgaatccagggaagataaaatttttcagaagtttaaaactcagatagcccttgaaccagaacaggtaaagtggagctcatagctcctcatcgtgttctcttcaggccatgttttatgagtataatctgtaagaaataacttcatagtaacattagtctgttccttaggagcctataaaagcaggcttttgttatcttgttagaggagttcctcacacagatgggccatgtagaaaggtgttttgcagtgctgatccatttaatagttactaaaagactaaaggttatactgtttatcatacagggttcattttctaaagcaagcatcagggatgggagatgaatgagatgttgcctaaggtacatgaggtttaggcaccattggcccccccgccagaaagaaaaaaggttatttttgcccatttccaacaggtaactttggcttgtaaaatgtgacatgttaacatttttctccttaacctcccctaccataaacgtaaatcacgaaagaaaactaaactcccataaaccagtcactggttcaaataaatacacaggaagaatagatctaggtcttaaacactaaggcagtttttagcaatgcatatgcttttagacaaaatacagaaaaccactcagttgctgtaggaagcttattacagtgaaatttacttatgtttgtagtagttttcaaaacactatgtttcacttggtatttgtccctcctaaaattttttaactatgaaggtaggcacagactctgggcagaattctgcaattagagcagaggctcattcttagtcccttcacaatatattcataggattaagttgccaacattaggtagtaaaagcatcatctgggagatatattttgatgccctctgagtcagataaactgaaataatcactttgaggtgattgagaaggcattagtggcacactggtacagccaggtctgatgggggaactgtgacatgccttttgggtcagtgctacatcaagagtaggaacattcatggagtagatagcatgttaccattggcaacttataggtaaggtattgattatttgaacatgatcttcattgattttagattcttagatatggcagaggtattgcccccatctggatttctggtgaaaatattcctcaagaaaaggatattccagattgcccctgtggtgccaagagaatattggaattccaggtatgaccttaaataaggaccatttagtgtgtaatcaccatgattgtttttaaacattaaaaacttcaccaaggtaatttgtgcacatgggtcaacatggcagtatggaagggtaccctataatgaaaatcatcagtttcctgcctcaccttggggctagttccctggaaggaactgtcttgtttttttctgtttcctagttttcagacacggtctattgactgacttctgtgacaatgaggatatctacactgctctccacctccagtgtggttatgtcattattattagtgcctctgttaacttttgttattttaaataatgtataccttcctttcttgttctagtaattaaagtctttgactatatactttatgagaggagtctttactgtttaatcttggtttgtggatttgttagaaaaaatggatataagcattaaagataaatgtccttccctgcccaaaaggatttgttagcatcaaaatccatttgggtagggtggaaatgctcttgagctatggattcactaaccttaccaaagtcatagctaatattggtttgtttctttgggtaaaaaaggaattatgaggaccatacacaaaactctgcttggttcttagtgccaaagctctcaatgtccaaattgaggtgacaggatttgtataaagtgattccatatcaggtggctattctgcctattcactctttgagttagactacttctaagattcctctctggtctctataactacattgatagatgtcctttctgtattcattactagtaattagtgtttcttgagtcaagagtaacaacatctgcaatgatacaaagtaaaagttgcccaaatagaagcctcagcccttttgagtggcatattagtaatgaaaataattcattaacagccacttgtgaacttctttctcaaatggaaaagaccaaacagaaggtgagaggggctttgaagtcataaggaagttttagattgttaaacatgttaattgtataatgtctataatcctgctttgtagtatgaggattgaaagaccaagatccctataatcatcctggctgagaaggtctcgtgctccctgctgtgaagcagctttctaactgtgtgtcaccctcttctcaggtcatgcctcagctcctaaactacctgaaggctgacagactgggcaagagcattgactggggcatcctggctgtcttcacctgtgctgagagctgcagcttgggtactggctatacagaagaatttgtgtggaagcaggatgtaacagatacaccgtaaaggcatcttaaagccttgaaaaatgttaataatcttttataccttgcaattccatttctgggattttatcctaaggaaatacttataccaaaaatagaggtgcagagatgttgacagattgcttacacagtgtctacttattagtgaaacaaaagtgtccagtgacagggaattaaataaattttggtacatccacagaggaaggctacacagtcttaattataacacctatattgacaacagacataccattataggtggtattcatggtatgatcctattcttgtaaaaatatttgtatgtatgcacagaaatctgcaaagatgtacacttagtgaactggttaccaacgaatggtgggactaactaaaatggtctttttacttatatgtgcatttctttttataataaaaatgggttatatgcctaatgaagtcaaaccatctcactctgagcatttcccaccctaggtttttaaaacacaaaaatacttaggtaaaactcccaacaaacttgtctgatcattagctgattatcacaggctctagtatgtactggaagcccagaatatttgagaaataccaaacctcaggttggtgagtatgatgaacaggaaacccagtaattctgaagcagcagtatcacagttggcaggatgaggaacaacagtggctttgtgatcacagaactggaatttaaagaggctggaccttcagaactgatcttggtcagccagcggccctgcttacagatgagacactgaaaggcaaaaggcgatggtcttccctttccgtgtcagcattgtatacaggttccctatcgcacatacaagggttatggaatgtaagccaaaataagggtctggcctaggaggcagcagcctgaggaaaggaaggccctgaagtcagttttcaaagggctgacccttggcctattatgtttctgatacatctgtttaagcaagcggctcctaagactacactaaggtttcttccatcccctagcagctcacagttgacaattcccagttctctcagcaccagtgatgcctgcccttaagacacattgctgttgatcagtgcttgaatactgacggctaattctgataaatttctcaggcttatttccttaatctacattggctcacattgtcccctaacacatccctgttaactgaaatgcattgccaccataaatcctcacgttttcataggtaacatcacttgctaatgtaattgtctacttggctattttatttgtaatttaaaaagttctgtcctagtagtccatattatataagtatacatatgcaatttgtattaattgtataagatagttatacatagcaccatatgggaaactgcagtatggagtttctcccatggggaggttatcagctacttaagagctagaggatactagtttcgaacctgggatggctaaatctatgaaaatcacctataactatggtgtcacagccctgtggctactggagtaagttgtcatcaactagtgacaagagctggtcgcaacacttagtaggaagcacagtggcataaggaaacctggactagtggggcctttatatctaaaattatgtattattccttataggcagaatctgtaagtacgttatgactgctaatgacttttaaagcaaacatgttaacgatctttctatggtaaaaactgttatttggggacatcaccagatgatgtggacattcttgcaggtattttggcatacccaggcaagctgtcattggtgtatattccagttaacctctggagatgatcgtaacagtttacagggcctttccatttgggatggatatatcaagagggagacaaactggtccaaatcaccagaaagaaaatctcacagcaccgacttggcatctgtgttaaaaaatagcaactatatttaaaataaactgtacaacataaaaaatttaaattaaaaaatgcattaagcaagttgcctttagaaatgtgaagacattttaaaacactacaagataatgagcaagtctcacctacataatcatggctccacagacggtgccagtccatgcatccaccatttctcaacacctacaaagttttaagatctgcttggttcagatactgtccagccacagcagctccctctgctgtagagagcagcatattcagctttgcctttttatttcagatactgaatatcctttggcaatttcagatatcacagcaaaaaaaaaaaaagttccaagtgtttttggcaatcatattggtgatagtgtttttgttactcttaagaatgttatggtggaggtgggaggatggcttgagcctaagagttcaagaacagcctgggcaacagttgagtgactttgtctctacaaaaattaaaaaaaattagctgggtgtgttggtgtgcacccgtagtcctggctagctactccagaggctgaggtggatcacttgagcccaggagtttgagactgcagcaaaccatgattgtgccactgcactccagcctgggcaacagagaccgtgtctcaaaaaaaattgcacatataacagataaagtaatgataaagtaaatacgtaaagtaaatgagtaattatgggacattctaattcctcatcccctatgtctttaagaattaaaaattctcagtgtagaaggaagagtgtaatacagaattggttaaataaaaaccctataagctttgaatttgaattggatatacaattggtaaaataaccctatgagctttgaattggacatattaat

SEQ ID NO: 1124 - DNA, 9878 bp, Homo sapiens
ccggcccggcgcccgatttccgccttccgacccagctgtgggctgcgccccacgccagcccgcgccccgcatggctgccgccggggccaggcctgtggagctgggcttcgccgagtcggcgccggcgtggcgactgcgcagcgagcagttccccagcaaggtgggcgggcggccggcatggctgggcgcggccgggctgccggggccccagccctggcctgcgagctgtgggccgcccgctctccttcctgctgcaggtgtatgcgccgctgcctggccgcccggacgccttccaccgctgcatcttcctcttctgctgccgcgagcagccgtgctgtgccggcctgcgaggtgagccgccaaacggggtcggaacggggccatgcctccgacgcgtgcgcggcgttaattccgggagcgaccagggggacggcggcaagcaccgctgccgccccagcctcagagctccctctccgcgctgccccaggagcaccttctcccgggcccttccaggatgtgctcatttttgctacataagcttctaactgtgcccacgcgcattggtaacccccagcttttaatcagtgggtaccaggtatggtgttaattcagataatagaaattgtcttggaaagatggatcccagtagctttttcgtatttttggcagtcgttcttaacgatcagtcttattaatttgattaactcaaaccacctctaggaggcaactcagttgcgtgtaccggacgaaatctagtttctggattttaaaagcttattcctgaaagcaaaaactttcatttcttttttgttgttgttgagtattttcagttttacgtgcagaggataaaatatgtgaattgctgttttgtttgaagataaaacttttttctgcattcttttttagtttttaggaatcaactacccaggaaaaacgatttttactcatatgagccaccttctgagaatcctcccccagaaacaggagaatcagtgtgtctccagcttaagtctggtgctcatctctgcagggtttgtggctgtttaggccccaaaacgtgctccagatgccacaaagcatattactgcagcaaggagcatcagaccctagactggagattgggacataagcaggcttgtgcacaaccaggtgggtaatcttttttttaagtctcagttcagtttcatcgcctttgtcaacccagatatttccaggacaactttaaaggtaaaattaggaaaggtatagtactttaaaaatttttcatgcctggaacacctttgtaaaaaaaaaaaaaaggctgtgaagtctgaatcactgaataatgtcaccatataggcatttaatttatgaccctttatctaaaatgccagaactatagggaatatagtactttagagacagcaaattattagactgtcttcaaaactaaatgattactaatagtgctgtcctttttgtttcagatcatctggaccatataattccagaccacaacttcctttttccagaatttgaaattgtaatagaaacagaagatgagattatgcctgaggttgtggaaaaggaagattactcagagattatagggagcatgggtaagcagtttcaggacttcattcattaagtggttaaacataatgcttggaagaaagggctccatgtgcctagaagagaggtactgagaggaagactcactttggaggctgtagcatacaattttcagatattgcctcaggtaaaaatatacttcctggactttgttttctgacacataagaggtgtgttctgctccctgtaaagacaagggtgggtatccagatggtcccatgagtagggctgcacaagatgctggaggcttggtaagttcctctgggtcgcagatctgtttctcgggtcgggatagtgtgagtgcctagcacagtgtcgggcacgcagaagggccccttaaaagtttctctttcatctggccagttttagatacacaattttgtcagtttacttacagtgcatactcttgggtagtacttgtgctgaccaagtatcttagaggcttattttattatagtagccaacatttatccagcacttaccttatataaagggctgtttgtgcatgagctcattaaaatcgtgacagcagaccaatgagtgagaaactgccccattttgaaggtgaggaaattgaggttctgggtataactttctttggtcacataatattaaattttacaatttgagccttgagcaatacacaaaaccaccacaaaattagatttatagactcaaaatgaaaacatcagcttactggtttgtagttcataccagtcatacattccaaaacatgttttgagtcttactctgtgcctgaccttgtgcttgataacagggatataatgggaagcaacactccagtggtcagatgctcacagtcttatggaggagcccaaataatatctggggaagttaaagtccatataatgactgataagagtacaatacaggtgccatgggaacacgtgacatcactgaagactgcctggaaggggccgcgcgtgtgttcatgcctatacgataaacatgatacataatgaaaatgcttatctttaggagaaaggagagcctagagtagcaggatcaaggatgaaagctggacttcaaatatgccttgttagtgtaaatgtgactgtggaactgtatgagtattttaagattatggagtaaagtaagttttaaaaagcagtccctaatcatcaaaagtaaaaaactcttgatgtagtcatataaccacactaagaactcttccaggtgacttcaaaacataggacagtacatctctagtagaatatgccctgagaatgaaaagaatgtaacagtgttagtattttgaataaacatgttattactagactgttgcttttattttgagatggttgtgtgtgtattggggggaaaggaaacgagtaattatgttggtgttactgagaactgagatgttgggcgtaggaggaagataatgttgattgtgtctacgtaccatttctctctaaaaggaactccaggctctttggagaggtggttgattccagaactaggtcaggaaacgttcatataatgtgggaacatggtcatatcaaagattaaggataaggattactagggccatgtcagaactcaagcaacatgaaaaggctcctgcttgcaaaagatggacagtttgaacatccacaaggacgctaactgcatcagatatgtttaatgggttcaaaatgatactttaaaaaaactcagtaatcatctttataggatacttgggaacagactcattttcaaattggtaaataaaaggaaagagtttaccttcgaggggtacataacttaattatgaatgaagtgatatgtgtggaatttacttcagagtaatggaggtggaagtggcagagaaaggaaacactggacttgatagtgttgaaactgattaatgatatgtggcggttcattatagtatttccacttttctgtatgtccaaaattttctaaaataaaaggagaattgaatagaaaaatgcttcctggaggtagctgtgtcttacctgagacttggcaggaggcagtagggcctgagggaacagcatttacagtgtcctaacggttatactgaaactttccacgtatacttgatggaacatcaatctgaaggcatcctacacttcctccatcagacctgatggtgcaagtgaacaccatcagtgcctttccagtttcatcaaagcagttattttagcttctctgacccaaggtatatcagttctattttaacgtacattacaaagactaatggttatacttagagacacgggtctgttggggacagcagtggcttagggtggctgtaatcccaggaaggaatgtggagaaggaaatgaacatttttttttttgagacggagtctcactctgtcgcccaggctggagtgcaatgtcaccatctcggttcactgcagcctctgcctcccaggttcaagtgactctcctgcctcagcctcccgagtagctgggattacaggcacctaccaccatgtctggctaatttttatatttttagtagatacgggatttcaccatgttggccaggctggtcttgaactcctgacctcaggtgatctgcccgcctcggcctcccaaagtactgggattacaggcgtgagccactgctccaggccagaaatgaacacttgatgactgagtgagtgagcctaccagctgaggatactaatgataagggctcacatttgttgggtgtcctgtgatgtgctgggcagtcctaagcccttgaccattctgttattttgaagctttaaggagatgcactaaatggaagtccatataatagagttggatggagtacctggaaattcagatggtccaacttgaatgagtgaataaatagggaaagctatctgattaaaagtgggtcccctctccatgtgtgaattgtcaagttgtggggattactcctgtttttcataatagttacgttgatttttcaggtgaagcacttgaggaagaactggattccatggcaaaacatgaatccagggaagataaaatttttcagaagtttaaaactcagatagcccttgaaccagaacaggtaaagtggagctcatagctcctcatcgtgttctcttcaggccatgttttatgagtataatctgtaagaaataacttcatagtaacattagtctgttccttaggagcctataaaagcaggcttttgttatcttgttagaggagttcctcacacagatgggccatgtagaaaggtgttttgcagtgctgatccatttaatagttactaaaagactaaaggttatactgtttatcatacagggttcattttctaaagcaagcatcagggatgggagatgaatgagatgttgcctaaggtacatgaggtttaggcaccattggcccccccgccagaaagaaaaaaggttatttttgcccatttccaacaggtaactttggcttgtaaaatgtgacatgttaacatttttctccttaacctcccctaccataaacgtaaatcacgaaagaaaactaaactcccataaaccagtcactggttcaaataaatacacaggaagaatagatctaggtcttaaacactaaggcagtttttagcaatgcatatgcttttagacaaaatacagaaaaccactcagttgctgtaggaagcttattacagtgaaatttacttatgtttgtagtagttttcaaaacactatgtttcacttggtatttgtccctcctaaaattttttaactatgaaggtaggcacagactctgggcagaattctgcaattagagcagaggccattcttagtcccttcacaatatattcataggattaagttgccaacattaggtagtaaaagcatcatctgggagatatattttgatgccctctgagtcagataaactgaaataatcactttgaggtgattgagaaggcattagtggcacactggcacagccaggtctgatgggggaactgtgacatgccttttgggtcagtgctacatcaagagtaggaacattcatggagtagatagcatgttaccattggcaacttataggtaaggtattgattatttgaacatgatcttcattgattttagattcttagatatggcagaggtattgcccccatctggatttctggtgaaaatattcctcaagaaaaggatattccagattgcccctgtggtgccaagagaatattggaattccaggtatgaccttaaataaggaccatttagtgtgtaatcaccatgattgtttttaaatattaaaaacttcaccaaggtaatttgtgcacatgggtcaacatggcagtatggaagggtaccctataatgaaaatcatcagtttcctgcctcaccttggggctagttccctggaaggaactgtcttgtttttttctgtttcctagttttcagacacggtctattgactgacttctgtgacaatgaggatatctacagtgctctccacctccagtgtggttatgtcattattattagtgcctctgttaacttttgttattttaaataatgtataccttcctttcttgttctagtaattaaagtctttgactatatactttatgagaggagtctttactgtttaatcttggtttgtggatttgttagaaaaaatggatataagcattaaagataaatgtccttccctgcccaaaaggatttgttagcatcaaaatccatttgggtagggtggaaatgctcttgagctatggattcactaaccttaccaaagtcatagctaatattggtttgtttctttgggtaaaaaaggaattatgaggaccatacacaaaactctgcttggttcttagtgccaaagctctcaatgtccaaattgaggtgacaggatttgtataaagtgattccatatcagggtggctattctgcctattcactctttgagtcagactacttctaagattcctctctggtctctataactacattgatagatgtcctttctgtattcattactagtaattagtgtttcttgagtcaagagtaacaacatctgcaatgatacaaagtaaaagttgcccaaatagaagcctcagcccttttgagtggcatattagtaatgaaaataattcattaacagccacttgtgaacttctttctcaaatggaaaagaccaaacagaaggtgagaggggctttgaagtcataaggaagttttagattgttaaacatgttaattgtataatgtctataatcctgctttgtagtatgaggattgaaagaccaagatccctataatcatcctggctgagaaggtctcgtgctccctgctgtgaagcagctttctaactgtgtgtcaccctcttctcaggtcatgcctcagctcctaaactacctgaaggctgacagactgggcaagagcattgactggggcatcctggctgtcttcacctgtgctgagagctgcagcttgggtactggctatacagaagaatttgtgtggaagcaggatgtaacagatacaccgtaaaggcatcttaaagccttgaaaaatgttaataatcttttataccttgcaattccatttctgggattttatcctaaggaaatacttataccaaaaatagaggtgcagagatgttgacggattgcttacacagtgtctacttattagtgaaacaaaagtgtccagtgacagggaattaaataaattttggtacatccacagaggaaggctacacagtcttaattataacacctatattgacaacagacataccattataggtggtattcatggtatgatcctattcttgtaaaaatatttgtatgtatgcacagaaatctgcaaagatgtacacttagtgaactggttaccaacgaatggtgggactaactaaaatggtctttttacttatatgtgcatttctttttataataaaaatgggttatatgcctaatgaagtcaaaccatctcactctgagcatttcccaccctaggtttttaaaacacaaaaatacttaggtaaaactcccaacaaacttgtctgatcattagctgattatcacaggctctagtatgtactggaagcccagaatatttgagaaataccaaacctcaggttggtgagtatgatgaacaggaaacccagtaattctgaagcagcagtatcacagttggcaggatgaggaacaacagtggctttgtgatcacagaactggaatttaaagaggctggaccttcagaactgatcttggtcagccggcggccctgcttacagatgagacactgaaaggcaaaaggcgatggtcttccctttccgtgtcagcattgtatacaggttccctatcgcacatacaagggttatggaatgtaagccaaaataagggtctggcctaggaggcagcagcctgaggaaaggaaggccctgaagtcagttttcaaagggctgacccttggcctattatgtttctgatacatctgtttaagcaagcggctcctaagactacactaaggtttcttccatcccctagcagctcacagttgacaattcccagttctctcagcaccagtgatgcctgcccttaagacacattgctgttgatcagtgcttgaatactgacggctaattctgataaatttctcaggcttatttccttaatctacattggctcacattgtcccctaacacatccctgttaactgaaatgcattgccaccataaatcctcacgttttcataggtaacatcacttgctaatgtaattgtctacttggctattttatttgtaatttaaaaagttctgtcctagtagtccatattatataagtatacatatgcaatttgtattaattgtataagatagttatacatagcaccatatgggaaactgcagtatggagtttctcccatggggaggttatcagctacttaagagctagaggatactagtttcgaacctgggatggctaaatctatgaaaatcacctataactatggtgtcacagccctgtggctactggagtaagttgtcatcaactagtgacaagagctggtcgcaacacttagtaggaagcacagtggcataaggaaacctggactagtggggcctttatatctaaaattatgtattattccttataggcagaatctgtaagtacgttatgactgctaatgacttttaaagcaaacatgttaacgatctttctatggtaaaaactgttatttggggacatcaccagatgatgtggacattcttgcaggtattttggcatacccaggcaagctgtcattggtgtatattccagttaacctctggagatgatcgtaacagtttacagggcctttccatttgggatggatatatcaagagggagacaaactggtccaaatcaccagaaagaaaatctcacagcaccgacttggcatctgtgttaaaaaatagcaactatatttaaaataaactgtacaacataaaaaatttaaattaaaaaatgcattaagcaagttgcctttagaaatgtgaagacattttaaaacactacaagataatgagcaagtctcacctacataatcatggctccacagacggtgccagtccatgcatccaccatttctcaacacctacaaagttttaagatctgcttggttcagatactgtccagccacagcagctccctctgctgtagagagcagcatattcagctttgcctttttatttcagatactgaatatcctttggcaatttcagatatcacagcaaaaaaaaaaaaagttccaagtgtttttggcaatcatattggtgatagtgtttttgttactcttaagaatgttatggtggaggtgggaggatggcttgagcctaagagttcaagaacagcctgggcaacagttgagtgactttgtctctacaaaaattaaaaaaaattagctgggtgtgttggtgtgcacccgtagtcctggctagctactccagaggctgaggtggatcacttgagcccaggagtttgagactgcagcaaaccatgattgtgccactgcactccagcctgggcaacagagaccgtgtctcaaaaaaaattgcacatataacagataaagtaatgataaagtaaatacgtaaagtaaatgagtaattatgggacattctaattcctcatcccctatgtctttaagaattaaaaattctcagtgtagaaggaagagtgtaatacagaattggttaaataaaaaccctataagctttgaatttgaattggatatacaattggtaaaataaaaaccctatgagctttgaattggacatattaat

SEQ ID NO: 1125 - DNA, 426 bp, Homo sapiens
cattaaagccactgtagtagccaagggaaagcttcctttttgtcctctgaaggttcactgaaaagtcaactgacaaaaggcacattaattggagaaagggcatacaaatttattaacatgcacatgggggagaaccagagtgattttgctgaagccccaaatggggttcagaaacttatataccatcttgaggttacagaatgggggtttggattgtggcataacaggttatgcgggtggagacctggctgacaaccacggtcttgttatgtaaatgaaacctcctaagtagaactccttaaagagaacaggtggtacatgtttctttcagacctttgcaaaccaacagtaaaattctaaaccctccaaccgactgatggaccctctgcttgcccaagggcattctgaagttaacctgaaaaacta

SEQ ID NO: 1126 - DNA, 18491 bp, Homo sapiens
ctaacacttttataaactgcatttattgtacagagtactctgaagaaagaaaaaaatatgtacagccattcattttcattaacacatatattctgtcctgcaatactggagaggtggaatgtgtctggcacagaaataacccctaggagttataaattagaaaaacaacacttttaaaaaagatttttacttttctggtagaaatataaaaactgtggttcatggggaaaaacattaaaattaaaaagtccaatcaattatagaggtggctttaacacttaaagttttctccctcaaaccaacttgtcaacagcagtgtttaaaatctacatataaataaatgggcagcgctgcccagatagcagcacggtatgagcaactcacagtcacgctgcgcggtgttctcagtgcacaaataatgccccttcccggcatcccgcggtgggcacttacagaagggcatcacctggtgccacaccctgcaactcaacatccatcttctcacaacaccaccatttaaaggtaccaaaacaaactgatttgtttaaaaaaaaaaaaagaagggggtgggggaggcaagggtacatgagagccattacgtcgtcttcctgaatccctttagaatagggtagatgttttcaaatgcttcataaatttctgctctgactttagcacctaagaagacaagttggagtagagatgagagactgaaatggcacttcttaacatattaagatggtaaaattcttaccttaaagctgcaagcacaattctcaccatacccagtcagattaaggcacaggcatgaaaacattaatagtggaatcccttgtcacaatcttatttttgtttataaaacaatacttttaaaaaatcatcttagtgactccagcgtctcattctatagctcaagaggcatgtattcacacttctctccttggtcctgaaccaggccataaaccaagcaggacggcaatgataacaactgaatcttcttctctgaattgctgccttcaactagactcatttctgaatcttcctttcttgtctcataatcatattgctgaggaatcctaaagcttcagataactaattccaagtgaaaacgccatcttttgttcaatgcaatgctcacctcctcactgtaaatggaagtctgcttgcagagctgtggtcagacttccctgctctcactgtgcctttagtgggcacgtttctcatcagactttgggtgggaggcctttgtacaagaagctagcccactgtccgaacactgaaatttcttttcagcactgagaaaatgccatactcaaaacacttacaaactttcagatactacttcctgttacaacttacctgttaatacaacttttccagaaacaaaaataaggagaacaattctgggtttgatcattctgtagattaaaccaggaaataactctggctcataactagaaggaaaattgcaaaaagtttagaaatcaagagctttgtgtgcttttagataaaatgaggacctgtacaaggaaaaatactgaataaacaaactagtcaagaggtaaaacacagttcttcaagcagcatcaaaggatagaatagaataattaaagcaagtgaggccgacttgtagtcgtcagttgataaccactggatggaaggctatttgtcctcctatcactttaccctatttctattgaatctggattttctgatttaagaaaaagagccctgtagttatgtctgcagtctctatatcattagatataatgatatctaatgcagataataatcctttacttttacagtcctaataattactattacagtcctaataatcatttacttctaagatccaatactgacagtttaacttttaatcatatcttacctccttaaattgaaatattctctagctgacaattgtggtcaggaaatttaatcaaacttatatactagcctgagaattaacctatacctgattaagctgtctgactgaatggactattggtatatattctttttttttttgagacggagtcttgctgtgtcgcccaggctggagtacagtggcacgatcttggctcactgcaacctccatctcctgggttcgaatgattgtcctgcctcagcctcccatgtaactgggattacaggcatgcaccaccatgtccagctaatttttgtatttttagtaaagacgaggtttcaccatgttggccaggctggtcttgaactcctgaactcaactgatctgcctgcctcggcctcccaaaatgctgggattacaggtgtgagccaccaggccaggcctggtacatattcttctaagcctagtaatctcatttttctcagttcggagagactgaaaacaggatgcctctgtttctgtgtgtctgacctaagacaaaattcaggacaggcttctctgaggaagagtggaatgggtagacatatggaactcaagtgggagcttcctaggtgaaaagggaaatgagcatactaggcataaaagtggcaagtgcaaaggcctagggcaggaggaaccaagtgagccccaggggcacacagaactaatgtgcctgtgaacagacaccagaagaccatgagatgaagcagtgaggtgggcagggctgcctgcctgtgagtcttcacctgcaagtagcagggaagataattagaaagttgttcctatcgctcaacttcacactttgctggtagatctgacacaatgttgactaaaagagaagatccaaactgggaaaaaaaattgatacaaggttagggtcaattcatgcattccaagtgtattcagcaataaaacgataaaacatacagaagtagaatcaaattcattccagtaaaggggagttatgggtaccgcaaagtgataagggaagcagaggctggtgagggtgataaatatgactgagaacatcaggaagacaatgcaagaatacatacaactataaccatgtcaactgttctcatatactgaatattttgcatgtgttttattctgaacaatgtttagattataaatgaactgttgccaataacaatcataatacatttcagacttacctactaaattgttggtgggtgagcacaaggccttctaaccttataggaaacttcacatcacagctccccaccatattctgaatcttgaagtccaagaacttagctggaaaacccaacttctgtacaactctagcatattttcttgctgccagtctggactgttcttcactagggaaaggaaaaaagtgagttattcatactcagagccagctaaaatacttatttagactaataacttataaaaagtccaaaacagtaaactaataaagtgtaaactggtcagccttcttgcaataggagaaaagactgacaggcattcacaattccttataaagtattcctggatccttgacagaaaactgtaggcctgccaaaatgacctttcaatccgccaaattattgtagccctagattttatggatgtgaattatcaccatcatcagtcatcactatttctgtattttagcccatgcatttctactgagaggaaaactaacaaacttcattttgatcagaaaatgttgatgagatttattattgaacaatgtattcactaattctatcctcttttataccaagactcatcatgaatagacattcctatgtcatttgttgaataaactacgacttagcagttcagagcttacataagaaaagcagaatgtgggccaggcatggtggctcacgcctctaatcccaagcactttgggaggccaaggcggatagctcacctgaggtcaagagttcgagaccagcttggtcaacatggtgaaaccctatctctactaaaaatacaaaaattagctgggcatggtgccaggcacctgcaatcccagctacttgggaggctgaggcaggagaatcacttgaacctgggaggtggaggttgcagtgagccaagattgtgccactgcactccagcctaggtgactccaccaaaaaaaaaaaaaaaaaaaaaaaaaaagaaaaggaaagaaagaaagaagagaaaaaaagaaaaaataaaagagaaaaaggcaggcaggcaggtcgggcacggtggctcacacctgtaatcccaacactttgggaggctgaggcaggcggatcatgaggtcaggagattgagaccatcctggctaacacagtgaaaccccatctctactaaaaatacaaaaattagccaggcatggtggtgggcacctgtagtctctgctactcgggaggctgaggcaagagaatggcgtgaacccaggaggcggagcttgcagtgagccgagatcatgccactgcactccagcctgggcgcagagcgagactccatctcaaaaacaacaacaacaacaaaaaagaatgtgaaaatattaccataaagagactatcaggtgcaggggatcaggaagaacaaaaatcaagcatatatatatatgctacgcttttaaatttcaggtaaatgtattggtggtttcttgtcttgatgaaatagtcatccaactacatatacaatattcagttttcagatgctctgggacaaaaaggctaaatgctgcatgaaaagcttgccttgataaaccaaaagtttctgatgttccatgcaggggaaaacaagcaaacaaaaacgctcttaattaaagaggttactactgcatgttgtggccaaggggaagtgaaaggcaagaacacatccttgtcctgcattctgaaaaacctcggagatcaggagccagaatgtccacaccaatggcattcccatcactgaaagacaatttcaaacttcagaataagcaaaaatatccacagcccccttctatgtgttgatacctccaagtacatttaatactctttcatttaaaaagttttagtttatttgttcagttcatttatgaagctaatgtcactaattttccccctagtttttgacttctaccaagtatataagctctgtttagaacagtcagggccgcagagtactaaccttcagacaggatcacttcagatggagaatataggcaatgacattttataacaagggtgcattccttaagatctgcacaactcaaacactattaatgaaagctagttccagtgagaaggcaggtttctgcagccaacacatgtgatgctgtcacgctgccaggcccaataaggtctgcaaagcccttacaccattagcttagaagtgttttaattcttgatcaattttttcttccatttcaagatgtatttgtgttatttacaacatttttcacataaagggaattttattaatagttctgatgttgtattacatcttacctaatttttttcttttttctggagaaagtgtcttgttctgtctcccatgctggagtacagtagcatgatctcagctcactgcaacctccacctcccggatttaagcgattctcgtgcttcagcctcccaagtagctgggactacagacatccactaccacgcctggctaatttttgtatttttagtagagatggagtttcaccatgttggtcaggctggtctcgaactcctggcctcaagtgatttgcccgccttggtgagacaccacgcctgcccatatctaatttttaagaaaatgaaatcactgctatctaacattaatagaatcaaataataaataaataaataaaaataattaatagaatcatattaaaatggtttttataagaaagcaataataacatgttaaagtgctaacctaataacctaaaaacaatgagatatcaccttttcattcataacccatagaccagaagaatgaatttcttacggctacctcttggctcctgtgcacaccattttcccagaactgaaaatcagtgccgtggttcgtggctctcttatcctcatgattaccgcagcaaaccgctacaatggtcagagagaatcattagtgaggtcatgccaaactgctcaatgttgttaggcgaaccacccattgacaaaaaaatcacaactggtaggaaggacatagtacatctagttatcaaaatatttgttctgtatttctgtatatctgtaaaggatttgcatacaccacatgtaacaaatattcctttgcataaggagcagaaaataatcaattgtgactaagttataccaaatctgtatgttctttcacatgagcattccatcaagagaaatgtttgcaaaatttggttatgttctcaataaatacaagtgcttctgtttctactttatatttgctgcttatcatgactatagcttctctgatacattttgttttattaatatgaattttgaggcaaataaaccaataaaccttttctaccttaatggaattaataaatcagattacaagcctatcaatacgtaatgaagtaaaatcatgctttcaattggtctttagaaacaatattaatgtattaaacacataaatgcaaattaggaaaaaaacacagttttaacttttattttctgctttttatgcttgaaacatgttaattctttcagaaaattttcttgctaaggtggtaactcaaggggaaaatatttcaactgtgggttgaattaatggcctcagttattaggtacatgataaaaagcaaataattactttgaaacaacttaaatattttaatacatttaattatacaataaaaacctacatgtttctaattaagacgactctttgacaaactagattgctttaacaattttatttttttattttattaatttttttttttagagacaagagtctcactttgttgcccagactggagtgcagtggtgcaatcatggctcactgcagcctcgaattcctgagctcaagagatccttctgtcttggcctcccaagtagctgggattataggtgtgtgccaccaaccccagataattttttaaattttctgatgaaacaaggccttgctatgttgcccaggctcgtcttgaactgttggcctcaagtgatcctcccaccttggcctcccaaagtgctggaattacaggtctgagtcaccatgcctggcttttaacaattttagtttaaaacctgctctatgtcttccctgtgattttatcaacatctaaaaaagctagcagtatatagtagtttatatacgtcccaggaaaagcctagctattttgaatttccagaatttcctctactatttttattggttaaatatcacttaagaacgtaaagtaataaaattatgtattcaactaaatgtgattataatagatgaaagattaattcttagaatgctacatgtcatacagactcattatgagtggttaaaaggtgattttcagacccttagctgtctttcagatctcaggcattatgtttcagggattttaaaatgcaccctaagtccattacttaacatttctctcaacccagctaatgtttatccaaattactttgcctactatagctggctaacatcatccctatacatatacaaaattcttcacatgatcccaatacaatacatatataacttagcttattttatagactgctgtactcccagggattcttatatcacagacactcaataaaagatacaaaacaatgcacattttactttagatcttcattttattggtgtcaaggaataagcataacacaaactctttgatatacagattttttttttgaggcggagtctcgctctgttgccaggctggaatgcaatggcgcaatctccgctcactgcaacctctgcctcccaggatcaagtgattctcctgcctcagcctcccaagtagccgggattacaggcgcatgccaccactcccggcaaatttttgtatttttagtagagacggggtttcactatgttggccaggatggtcttgaactcctgacctcagatgatccgcccacctcggcctcccaaagtgctgggattacacgtgtgagccaccaagcccggccaattttttttttttttttaagagacagggtcttgccatgttgcctgggctggtggtgaactcctaggttcaagaaattctccttcctcagcctcccaaagtgctgggattacaggcattagccactgtgcctggcctgatctacagacatttgttttatagcgtgaaatacattaaaatatagagacacggcagaggagacaaaaaagaaaaaaaaaagaaatacattaaaatagatctaaccttgggattatattcggcgtttcgggcacgaagtgcaatggtctttaggtcaagtttacaaccaagattcactgtggatacaatatttctgtaagagatttaaaaagaaaacacgactatttaaattacttaagtttcattggatgaggcgttagaaattatgcagacatctgattatttcaaccaggctttacttttttttaattgctcacatttattgtttaacaagtatcatgcacatgttgagcattttatatagattattccatttaatacatataacgcactgaggtagaagttaccagtattcccacatttggataaataagctgaggcttaaaggtagagtgcaacttgctcaggacgcaatggctcccaagtggaggagccaggatttgagtctgtctgtctccagagcctgcccttagccttctcacagacaaactcaattctcatctgtgagctctgaaaagctaccaccaccaccctattcctaagtaactatttataatgaaaacaagcaggcatgaactgcccagttctctcaaagtaagtatcttttgaaaaacaagagctaagtgtctttagcaaaaaaaaaaggcaaaaccctgctttctcttctaattaactctcagtaaataaggataaatggagccatctgggtccactgacccttttcatttctcagtgttcttaaatcacttaacgaataacttatacaaggataaagatatactaaaaagcaactctattagaaattttaataaaaatttaaacaacaaacccacattttcattatacatttttctgcttatgaaagtatatatagttgaaatgggcaatgccctttgaatgcaattaactgctcaacaactgtctcgcatggacctggaaatcaccatcccaagaatatcgagtccagatttcaaatacataggttcaaatacaataggtttcagctcattgttgcttctggttctttttcttgtacagtctatgatacacaactgtaaagccaattaggttgatccacacaatgaatgttttcatttccatatcatctatttccttccaatcacccttgtatacacacctgcctttagcatttgtccacttatgaactataccaagtagattttagtatatctatcacaactttagtcacataattgttaaatgtattcttatatattttcattaattaaatatttaccttaatccctcttaagcctacaagatggagagggcactgaactaccacccgggagggttcttagtagatagtggaaattcaggaatgtggatgactggatgctctggggagtatcagaacagcaaaggcactcgcaagaaacaaacacctgactgtactgtttataatttattatttaaatcagaaatgcaaacttaaatattcctgggagtcagacaagcatgctggacacatgggagtggtatagacaagggtgagctaaaaagggctctctctaaaatcactaaaattactttgtttttaaaattgtgtgtggggtcaaacaaaattgtggaggcaagatttaggtctttgggtgaaagtcagcatccacgattacacaccacttagttccaaaaatgatgagagatagcttataaacaacaaccatatatgtaacaaggtgaataaatgcaaataggaaatactagatctaaagggagtatgaaggaggaaggtatctgtacaagaaaactgaggagatgcagagactgcaagtaaccttttaatttggtcataagctttctaaaatgaaaagctatacacttcttattgactggaattatttggaaatatttgctggtttttcaggaagatgaaattatttcctacccctactacactgttacatatagaacccacttcatttaggtagaaaaatccatttatgacaaaaacagtcgtcttcattttgtgggaaggacacagaccttcaaagatttatatgcagcacccatagtaaaaacaaaaaacaagaactaccagaaattatactgatattgtgactaaagacctaaaatagcataagggaaagagactacctaacattgtgatttagcgatatcagatacagggaaatgtctataatataataataacgacagtgaaagtcagattaaattttattggctcaggtatgtaaacacaaatgaccacatttctaaacctgttaagagccttttactgaggacactgactaagatagctttgcttccctttcccaaatgtgagataaagcaaattttgatacacaattaccgttagtgccactccctcccttaataaaaggatccatctgaaaacagagcaggaacataactcaaagggactcctaagtgggaggaaacataaaacacgaagtactcactgcagctgcggtacaatcccagaactctccgaagctggcgtggcaggagtgatgggggtcatgggagtcatgggggagggatacagtggagtggtgcccggcaagggtgcagttgtgagagtctgtgagtggaagagctgtggtgcctggcctgaggttccctgtgttgcctgctgggacgttgactgctgaacggctgcagctgccactgcctgttgctgctgctgctgctgctgctgctgctgctgctgctgctgctgctgctgctgctgctgttgctgttgctgctgctgctgctgctgctgctgttgttgttgctgctgctgcctttgttgctcttccaaaatagacagactattggtgttctgaataggctgtggggtcagtccagtgccataaggcatcattggactaaagatagggattccgggagtcatggcaccctgtggaaagcaaggagaaaaacaggttaggctggctgctgctaagtgtttgtggaactttcttggtggaacagcaggtcaggtgtgcaaagacagatgccttcggagaataatggggttattaaacattaattacggaagaaccagctattcttatacacattgctttcttctttaataccacacagtggataaacatgaagaaaaatggataaactgaacttcggaaaaattaaaaacttctgttctttgaaagacaccattgagaaaattaaaaggcaggccagactgggaaaaaaataactataatacatacatctgagaaaggactggtaaacagaataataaagagctctgacaactccataaaagaagatcaacaaataaaataataaaaaagggcaaaagatgtgaaggacatattacaaatgaagatacaggcatacctcggagatactacaggttaggttccagaccatctcaataaagcaagcggcatcaattttttggtttcccagtgcctacaaaagttatgttagcactaaagtctattaagtgtgcaatagcattatgtctaataatatgtatataacttaatttaaaaatgctttattgctaaaaatgctaacaatcatgtgagcctgcagcaaatcataatctttttgctgacagaggatcttgcctcgatgttgatggctgctgactgatcagggtggtagctgtggcaatttcttaaaataagactgacgaagtttgccacactgactgactcttcctttcactgaagatgtctctgtagcatatgatactatttgacagcattttacccacactagaacttatttcaaaattggagtcaatcctctcaaaccctgctgctgctttatcaactaagtttatgtaatattctaaagtcatcagttcttcaccaggagtcaattctatctcaagaaaccactttctttgcttactcacaagaagcaactcctcatctgttcaggttttatcaaaaaattgcagcaattcagtcacatcttcaggttcacttctaattctagttcacttgctatttccactacacctgcagtaacttccagcactgaagtctagaacctctcaaagtcatccacgagggttggaatcaacctcttccaaactcttattcatgttgatatttcaccctcctcccatgaatcatgaacattcttaatggcatctagaatggtgaatctttttcagaaggttttcaattcactttgcccagattcatcagaggaatcactatctatggcagctacagcatatgtccctccctgcttcctttctttgagacagggtctccattgtagcctttaacttctggactcaagtgaccctcccgcctcagcctcccaagtagctgggactacaggcacatgccaccatgaccagctaattaaaaaaaaatttttttttgtagcaacagggacttgttttgttacccaggttggtcttgagctcctagctttgagtgatccttccaccttggcctcccaaagtactgagattacaagcatgagccaccatgccctgctgtatttcttaaatagtaagaattgaaagttgaaattactccttgatccatgggctgaagaatggatatattatttaagcaggcatgaaaacaatattaatctccttgttcttctccatcagagcttgtggacaactagttacactgtcagtgagtaatattttgaaattaaactttttttctgagcagatctcaaagagcttaaaatatccagtaaatcatgctgtaaacagacgtgctctcatcaggttttgttgttctgtttactgaggacaggcagagtagatttagcgtaattcttaaggctctatggttttagagcagaacatgagcattggcttcaatttaaactcaccagctctattagcccctaactagtcagccagtcctctgaagctttgaggctaggcactgatttctcctctctagctataaaagtcctagatagcatcttcttccagtagaaggctgtttcatctacattaaaaatctattatttagtatagtcaccttcatcaattatctcagctagatcttccagataacttgctgcttcatgttgcatttttatgttgtggagaaggcctctctccttaaagctctgaataaacctctgctagtttcaaaactttcttctacagcttcctctccgctctcagcctttacagaattgaagagagttaaggccttgctctgtattacactttggcttaaggggatgtgtgggtggtatgatcttctatccagaccattcaaactttctccatataagcaataaggctgttttgctttcttatcacttgtgggtttactggagtagcacttctaatttcctttaagaacttttcccttgcattcacaacttggctaactatttggtgcaagaggcctagcttttagcctgtctcagctttcaacatgccttcttcactaagtataatcatttatagcttttggtttcaaatgagagatgtgcagctcttcccttcatctgaacacttaattaaaagtcactgtaaggttattaattagcctaatttccatattgttgtgtctcaaggaatagggaagaccaagcagagggagagagatgggggaatggttggtcacgctgcagacatttatcaattaagttcctgtattatacaggtgcagtttatggcattcaataataattacaatagtaacatcaaagatcactgatcacaataacagataataatgaaaaggtttgactaggcacagtggctcatgcctgtaatcccaacactttgggaggccaaggcggatggatcacttgcagccagtagtttgacaccagcatggtgaaactccgtctccactaaaaatacaaaatttagctgggtgtggtggcgcatgcctgtaatcccagctacttgggaggctgaggcaggagaatcgcttgaacacgggagatggagtttgcagtgagccaagactgcaccactgcactccagcctgggcaacagagtgactgaaaaaaaaaattaaaaaaaaaatacaaaaaaaaagaaaaaaaaaagtttgataacaataacggataataatgaaaaagtttgaaatcctgcaaaaattaccaaaatctaaccccaagacatgaagtgagtacacacttttggaaaaataatgccaacagacttgctgggtacaggtttaccacaaccttcaatttgtcaaacatgcagtaaagtgaagtgcagtaaagtgaggtgggcctgtgtatgagtggctgacaagcacttgccaaggtgctcagaaacattagtaatcaggcaaataaaaatcaaaaccacaataagatactactaagcaatcactagagtgaaagtaaaaagactgacagcagaaagtgttggtgaggatgtggagcaacttaaatctcttatgctgcaaaacaatacagccacttcaaaaaacagtttggcagtttcttataaagttatacatataccaatataggacctagcaatcctactcctaagtatttacccatgagaagtaaaaacagtgcattcaaagtctacacaaatgtttacagtgcttttattcgcaatagctccaaactggaaagaccccaaatgtgagcaactggagaatggatgaactgtggaacatccaaacaatggagtgatacttagctatacaatggattaactactgatatacaaacagtacactgggctaagaagtcagacatacacaaaaaagcatacactctgattccatctatatgaaattctagaatagacaaaactaatcttcagcattgaaaagcagatgcagtagttacctggggccagcagagtgactataaaggggaagaagggactttttaaggtaactgaaatgttctgtaatttatacattatatataattatcaaaacagacacttaaaatgagtttttttgtatgtatatttcaacaaaagttattgatttttttttttttttttttttttttgagacagagtctcgctctgtctcccaggctggagtgcagtggcacgacctctgctcactgcaacctccacctcccgggttcaagcaattctccttgcctcagcctcccgagtagctgggattacaggcacccgccacaacacctggctaatttttgtatattttgtagagatgaggtttcaccacgttggccaggctggtctcgaactcctgacctcaggtgatccgcccaccttggcctcccaaagtgctgggattacaggcgtgagccactgcacccaggctgaaaaatttttaaagtagatgggtggttgagagcttgaaatgtaaaaggggaaaaataaaactagaaaataatttggtgagggtgattttcaaaatcaaagaccctatatagtcatttggaacattctcataagtgtttatcaaaagattaggtgtttcataaatatataacttagcttccagacttcccaaataaacaccattgtgcctattcaaagcctaatagaacttctcaacaaaataaggcttaaaaaacatattaaaccattttcaaaaacagatcattaaatgcccttccttgccttttgataccatctcttgcagttcagatttccgccctccctattctctccctcctgctatattacctgaggggaggccaagccctgagcgtaaggtggcaggctgttgttctgatccatgatgttcactttcttcttggcaaaccagaaacccttgcgctggaactcgtctcactattcaattttttcctagagcatctccagcacactcttctcagcaacttcctcaattccttgggttatcttcacacgccaagaaacagtgatgctgctttggaaaaaagtctaaagtttaatttaaggatccaggtaacctgtacagtcctataagccagttctatggctatacaaaacacaaacatgaaaaccaatgaagctattttggaatacatttgtttttaccttataatcctaaagttttattccttccatgtttccggcgattgcatgtaaaatcgccaacaaaacaaaaatcattttgttacatgtttaaataatcggaaaatgctcaaaatcgagctgtcataaccagcattaaaaacttttgaggaaaaacacctagagaaaaataattcctaagcaaaatgtaatatcagagcagaatattcactaagcactgtatacacagcactgttaggcaaagtttagatctttaaatattccaattttacatcctctacaatgtcttgggcaaaaaattaagtaaatatcaaattcaatccaatatacttcagagtgatcatttatcaagctcctactgtaatgaaactgttaaaaaaaaaaaagccgcacaaagataaagccctgaatttttataaatgtaataaccttacctctttagaacacattaatgcaaactgtgcctgttatctgacttttcttaaatcatcatcgctttactcactacacatctgaaatgagtttataacaacatattctcacatagaacttagaggtctcaaagttacaaattatatgtccaaagatccttcaggcatatgcacttcaagcatgtgctggtacagaacagacactcagatatttgctgaatgtatgaaagactctgacgatcactttgaaagggcaaaggcccccaaagactatctatcctacatactcatcactgaaaaacagaccaaaaaagaaagcaagctctgcttctggaaataaatatatcagagatattttttaaaatatactttttttttgacagttatcctataataacaataacagaagtcctgcagatgaggatataaagataggaggatatagtccttggcatcaaagtgttcaatatgaagggtatgcaaataactactgtaaaacatagtattataacagcaggtatggtctaagctaagttccttgaatgcagaaaccagcctacatgtctttgtgatctctgcatctagcactatgcctggaatacagtatgtgatcatgaatgagcccatatacacccctggaagagaagacaatatagactaacagccaatcactgtgaagagagcgcagtgttttcacaaagcagggaccatctaacttgggtctcacaaggtgagtaggaatttacacatcagggcttcagacaaaagagaaatcaagcagaaagagacagattgaaaaagcatgcagtatgcaggcaacaagcttagtatgactgtatagaaggtcactgcagcagatgagacagcacatattggtgggctcatactatcaggagttttcaatgttattgcataggcaataataacagttatggaatttcggaagtgcagtatgaacagatctaatttggcaagactagatgaatttgagaggagtaaaactggaggacggaagtttcgtttcaggaatctaaggttgaggcaagagataatgacggcaggatttaaagccattataagtatgattagagatttatccaggaccttcggtggcttcaggccactttttgcaagtaagtctacagaagaaaccgcacagtgattactgcactaatttatcctcagaaaagagttgtttgctgggtatcttcatctcctggaaattgaaacatcaaatccgatattttttggaggcaatcaaattaattctgcatagccttctagtgtctgtataactaaatgaagcacagtcttttcacagaaaagtctacctagagatttggaaaaccatgatggcctgaaccgagagacgggagaccctgcaaataaagtggtgtgtattatatcttaagcgctaccgtgcccgctgtctcaggcttctgacaaaatatttaagtctcaatgttggcagcaaaacaggcgggcacagatctgggtgaatctgcttctaacatggagaagaagcggatggcaggacagggcagggtaaacttagggtcttcgatgcaagggactgtcctgtcccgcctgccgccgcccagccagccagtagtaccctgagccccacaatcgtacgatgggaagctgcctgcgaaacacagcagagtagggcaccaggcgggagtggcggccgagtggccgttacaggccggaacggcggcagcacgaaagggaggaacgtcccccgaggggcctgcacgcgcgccaattcctagtctcttccccaccattgcccccaggcctcagtgcagtggtggccttcgcccgaaccgtcagaaaagagtacaatctgttacctgggtcactgcaaagatcactatgggccagcggaagcgaagttaaacagccggcggcccaggcgcccgccacagcgaacctgcccgacctcac

SEQ ID NO: 1127 - DNA, 18495 bp, Homo sapiens
ctaacacttttataaactgcatttattgtacagagtactctgaagaaagaaaaaaatatgtacagccattcattttcattaacacatatattctgtcctgcaatactggagaggtggaatgtgtctggcacagaaataacccctaggagttataaattagaaaaacaacacttttaaaaaagatttttacttttctggtagaaatataaaaactgtggttcatggggaaaaacattaaaattaaaaagtccaatcaattatagaggtggctttaacacttaaagttttctccctcaaaccaacttgtcaacagcagtgtttaaaatctacatataaataaatgggcagcgctgcccagatagcagcacggtatgagcaactcacagtcacgctgcgcggtgttctcagtgcacaaataatgccccttcccggcatcccgcggtgggcacttacagaagggcatcacctggtgccacaccctgcaactcaacatccatcttctcacaacaccaccatttaaaggtaccaaaacaaactgatttgtttaaaaaaaaaaaaagaagggggtgggggaggcaagggtacatgagagccattacgtcgtcttcctgaatccctttagaatagggtagatgttttcaaatgcttcataaatttctgctctgactttagcacctaagaagacaagttggagtagagatgagagactgaaatggcacttcttaacatattaagatggtaaaattcttaccttaaagctgcaagcacaattctcaccatacccagtcagattaaggcacaggcatgaaaacattaatggtggaatcccttgtcacaatcttatttttgtttataaaacaatacttttaaaaaatcatcttagtgactccagcgtctcattctatagctcaagaggcatgtattcacacttctctccttggtcctgaaccaggccataaaccaagcaggacggcaatgataacaactgaatcttcttctctgaattgctgccttcaactagactcatttctgaatcttcctttcttgtctcataatcatattgctgaggaatcctaaagcttcagataactaattccaagtgaaaacgccatcttttgttcaatgcaatgctcacctcctcactgtaaatggaagtctgcttgcagagctgtggtcagacttccctgctctcactgtgcctttagtgggcacgtttctcatcagactttgggtgggaggcctttgtacaagaagctagcccactgtccgaacactgaaatttcttttcagcactgagaaaatgccatactcaaaacacttacaaactttcagatactacttcctgttacaacttacctgttaatacaacttttccagaaacaaaaataaggagaacaattctgggtttgatcattctgtagattaaaccaggaaataactctggctcataactagaaggaaaattgcaaaaagtttagaaatcaagagctttgtgtgcttttagataaaatgaggacctgtacaaggaaaaatactgaataaacaaactagtcaagaggtaaaacacagttcttcaagcagcatcaaaggatagaatagaataattaaagcaagtgaggccgacttgtagtcgtcagttgataaccactggatggaaggctatttgtcctcctatcactttaccctatttctattgaatctggattttctgatttaagaaaaagagccctgtagttatgtctgcagtctctatatcattagatataatgatatctaatgcagataataatcctttacttttacagtcctaataattactattacagtcctaataatcatttacttctaagatccaatactgacagtttaacttttaatcatatcttacctccttaaattgaaatattctctagctgacaattgtggtcaggaaatttaatcaaacttatatactagcctgagaattaacctatacctgattaagctgtctgactgaatggactattggtatatattctttttttttttgagacggagtcttgctgtgtcgcccaggctggagtacagtggcacgatcttggctcactgcaacctccatctcctgggttcgaatgattgtcctgcctcagcctcccatgtaactgggattacaggcatgcaccaccatgtccagctaatttttgtatttttagtaaagacgaggtttcaccatgttggccaggctggtcttgaactcctgaactcaactgatctgcctgcctcggcctcccaaaatgctgggattacaggtgtgagccaccaggccaggcctggtacatattcttctaagcctagtaatctcatttttctcagttcggagagactgaaaacaggatgcctctgtttctgtgtgtctgacctaagacaaaattcaggacaggcttctctgaggaagagtggaatgggtagacatatggaactcaagtgggagcttcctaggtgaaaagggaaatgagcatactaggcataaaagtggcaagtgcaaaggcctagggcaggaggaaccaagtgagccccaggggcacacagaactaatgtgcctgtgaacagacaccagaagaccatgagatgaagcagtgaggtgggcagggctgcctgcctgtgagtcttcacctgcaagtagcagggaagataattagaaagttgttcctatcgctcaacttcacactttgctggtagatctgacacaatgttgactaaaagagaagatccaaactgggaaaaaaaattgatacaagaggttagggtcaattcatgcattccaagtgtattcagcaataaaacgataaaacatacagaagtagaatcaaattcattccagtaaaggggagttatgggtaccgcaaagtgataagggaagcagaggctggtgagggtgataaatatgactgagaacatcaggaagacaatgcaagaatacatacaactataaccatgtcaactgttctcatatactgaatattttgcatgtgttttattctgaacaatgtttagattataaatgaactgttgccaataacaatcataatacatttcagacttacctactaaattgttggtgggtgagcacaaggccttctaaccttataggaaacttcacatcacagctccccaccatgttctgaatcttgaagtccaagaacttagctggaaaacccaacttctgtacaactctagcatattttcttgctgccagtctggactgttcttcactagggaaaggaaaaaagtgagttattcatactcagagccagctaaaatacttatttagactaataacttataaaaagtccaaaacagtaaactaataaagtgtaaactggtcagccttcttgcaataggagaaaagactgacaggcattcacaattccttataaagtattcctggatccttgacagaaaactgtaggcctgccaaaatgacctttcaatccgccaaattattgtagccctagattttatggatgtgaattatcaccatcatcaatcatcactatttctgtattttagcccatgcatttctactgagaggaaaactaacaaacttcattttgatcagaaaatgttgatgagatttattattgaacaatgtattcactaattctatcctcttttataccaagactcatcatgaatagacattcctatgtcatttgttgaataaactacgacttagcagttcagagcttacataagaaaagcagaatgtgggccaggcatggtggctcacgcctctaatcccaagcactttgggaggccaaggcggatagctcacctgaggtcaagagttcgagaccagcttggtcaacatggtgaaaccctatctctactaaaaatacaaaaattagctgggcatggtgccaggcacctgcaatcccagctacttgggaggctgaggcaggagaatcacttgaacctgggaggtggaggttgcagtgagccaagattgtgccactgcactccagcctaggtgactccaccaaaaaaaaaaaaaaaaaaaaaaaaaaagaaaagaaaagaaagaaagaaagaagagaaaaaaagaaaaaataaaagagaaaaaggcaggcaggcaggcaggtcgggcacggtggctcacacctgtaatcccaacactttgggaggctgaggcaggcggatcatgaggtcaggagattgagaccatcctggctaacatagtgaaaccccatctctactaaaaatacaaaaattagccaggcatggtggtgggcacctgtagtctcagctactcgggaggctgaggcaagagaatggcgtgaacccaggaggcggagcttgcagtgagccgagatcatgccactgcactccagcctgggcgcagagcgagactccatctcaaaaacaacaacaacaaaaaagaatgtgaaaatattaccataaagagactatcaggtgcaggggatcaggaagaacaaaaatcaagcatatatatatatgctacgcttttaaatctcaggtaaatgtattggtggtttcttgtcttgatgaaatagtcatccaactagatatacaatattcagttttcagatgctctgggacaaaaaggctaaatgctgcatgaaaagcttgccttgataaaccaaaagtttctgatgttccatgcaggggaaaacaagcaaacaaaaacgctcttaattaaagaggttactactgcatgttgtggccaaggggaagtgaaaggcaagaacacatccttgtcctgcattctgaaaaacctcggagatcaggagccagaatgtccacaccaatggcattcccatcactgaaagacaatttcaaacttcagaataagcaaaaatatccacagcccccttctatgtgttgatacctccaagtacatttaatactctttcatttaaaaagttttagtttatttgttcagttcatttatgaagctaatgtcactaattttccccctagtttttgacttctaccaagtatataagctctgtttagaacagtcagggccgcagagtactaaccttcagacaggatcacttcagatggagaatataggcaatgacattttataacaagggtgcattccttaagatctgcacaactcaaacactattaatgaaagctagttccagtgagaaggcaggtttctgcagccaacacatgtgatgctgtcacgctgccaggcccaataaggtctgcaaagcccttacaccattagcttagaagtgttttaattcttgatcaattttttcttccatttcaagatgtatttgtgttatttacaacatttttcacataaagggaattttattaatagttctgatgttgtattacatcttacctaatttttttcttttttctggagaaagtgtcttgttctgtctcccatgctggagtacagtagcatgatctcagctcactgcaacctccacctcccggatttaagcgattctcgtgcttcagcctcccaagtagctgggactacagacatccactaccacgcctggctaatttttgtatttttagtagagatggagtttcaccatgttggtcaggctggtctcgaactcctggcctcaagtgatttgcccgccttggtgagacaccacgcctgcccatatctaatttttaagaaaatgaaatcactgctatctaacattaatagaatcaaataataaataaataaataaaaataattaatagaatcatattaaaatggtttttataagaaagcaataataacatgttaaagtgctaacctaataacctaaaaacaatgagatatcaccttttcattcataacccatagaccagaagaatgaatttcttacggctacctcttggctcctgtgcacaccattttcccagaactgaaaatcagtgccgtggttcgtggctctcttatcctcatgattaccgcagcaaaccgctacaatggtcagagagaatcattagtgaggtcatgccaaactgctcaatgttgttaggcgaaccacccattgacaaaaaaatcacaactggtaggaaggacatagtacatctagttatcaaaatatttgttctgtatttctgtatatctgtaaaggatttgcatacaccacatgtaacaaatattcctttgcataaggagcagaaaataatcaattgtgactaagttataccaaatctgtatgttctttcacatgagcattccatcaagagaaatgtttgcaaaatttggttatgttctcaataaatacaagtgcttctgtttctactttatatttgctgcttatcatgactatagcttctctaatgatacattttgttttattaatatgaattttgaggcaaataaaccaataaaccttttctaccttaatggaattaataaatcagattacaagcctatcaatacgtaatgaagtaaaatcatgctttcaattggtctttagaaacaatattaatgtattaaacacataaatgcaaattaggaaaaaaacacagttttaacttttattttctgctttttatgcttgaaacatgttaattctttcagaaaattttcttgctaaggtggtaactcaaggggaaaatatttcaactgtgggttgaattaatggcctcagttattaggtacatgataaaaagcaaataattactttgaaacaacttaaatattttaatacatttaattatacaataaaaacctacatgtttctaattaagacgactctttgacaaactagattgctttaacaattttatttttttattttattaatttttttttttagagacaagagtctcactttgttgcccagactggagtgcagtggtgcaatcatggctcactgcagcctcgaattcctgagctcaagagatccttctgtcttggcctcccaagtagctgggattataggtgtgtgccaccaaccccagataattttttaaattttctgatgaaacaaggccttgctatgttgcccaggctcgtcttgaactgttggcctcaagcgatcctcccaccttggcctcccaaagtgctggaattacaggtctgagtcaccatgcctggcttttaacaattttagtttaaaacctgctctatgtcttccctgtgattttatcaacatctaaaaaagctagcagtatatagtagtttatatacgtcccaggaaaagcctagctattttgaatttccagaatttcctctactatttttattggttaaatatcacttaagatcgtaaagtaataaaattatgtattcaactaaatgtgattataatagatgaaagattaattcttagaatgctacatgtcatacagactcattatgagtggttaaaaggtgattttcagacccttagctgtctttcagatctcaggcattatgtttcagggattttaaaatgcaccctaagtccattacttaacatttctctcaacccagctaatgtttatccaaattactttgcctactatagctggctaacatcatccctatacatatacaaaattcttcacatgatcccaatacaatacatatataacttagcttattttatagactgctgtactcccagggattcttatatcacagacactcaataaaagatacaaaacaatgcacattttactttagatcttcattttattggtgtcaaggaataagcataacacaaactctttgatatacagattttttttttgaggcggagtctcgctctgttgccaggctggaatgcaatggcgcaatctccgctcactgcaacctctgcctcccaggatcaagtgattctcctgcctcagcctcccaggcgcatgccaccactcccggcaaatttttgtatttttagtagagacggggtttcactatgttggccaggatggtcttgaactcctgacctcagatgatccgcccacctcggcctcccaaagtgctgggattacacgtgtgagccaccaagcccggccaattttttttttttttttaagagacagggtcttgccatgttgcctgggctggtggtgaactcctaggttcaagaaattctccttcctcagcctcccaaagtgctgggattacaggcattagccactgtgcctggcctgatctacagacatttgttttatagcgtgaaatacattaaaatatagagacacggcagaggagacaaaaaagaaaaaaaaaagaaatacattaaaatagatctaaccttgggattatattcggcgtttcgggcacgaagtgcaatggtctttaggtcaagtttacaaccaagattcactgtggatacaatatttctgtaagagatttaaaaagaaaacacgactatttaaattacttaagtttcattggatgaggcgttagaaattatgcagacatctgattatttcaaccaggctttacttttttttaattgctcacatttattgtttaacaagtatcatgcacatgttgagcattttatatagattattccatttaatacatataacgcactgaggtagaagttaccagtattcccacatttggataaataagctgaggcttaaaggtagagtgcaacttgctcaggacgcaatggctcccaagtggaggagccaggatttgagtctgtctgtctccagagcctgcccttagccttctcacagacaaactcaattctcatctgtgagctctgaaaagctaccaccaccaccctattcctaagtaactatttataatgaaaacaagcaggcatgaactgcccagttctctcaaagtaagtatcttttgaaaaacaagagctaagtgtctttagcaaaaaaaaaaggcaaaaccctgctttctcttctaattaactctcagtaaataaggataaatggagccatctgggtccactgacccttttcatttctcagtgttcttaaatcacttaacgaataacttatacaaggataaagatatactaaaaagcaactctattagaaattttaataaaaatttaaacaacaaacccacattttcattatacatttttctgcttatgaaagtatatatagttgaaatgggcaatgccctttgaatgcaattaactgctcaacaactgtctcgcatggacctggaaatcaccatcccaagaatatcgagtccagatttcaaatacataggttcaaatacaataggtttcagctcattgttgcttctggttctttttcttgtacagtctatgatacacaactgtaaagccaattaggttgatccacacaatgaatgttttcatttccatatcatctatttccttccaatcacccttgtatacacacctgcctttagcatttgtccacttatgaactataccaagtagattttagtatatctatcacaactttagtcacataattgttaaatgtattcttatatattttcattaattaaatatttaccttaatccctcttaagcctacaagatggagagggcactgaactaccacccgggagggttcttagtagatagtggaaattcaggaatgtggatgactggatgctctggggagtatcagaacagcaaaggcactcgcaagaaacaaacacctgactgtactgtttataatttattatttaaatcagaaatgcaaacttaaatattcctgggagtcagacaagcatgctggacacatgggagtggtatagacaagggtgagctaaaaagggctctctctaaaatcactaaaattactttgtttttaaaattgtgtgtggggtcaaacaaaattgtggaggcaagatttaggtctttgggtgaaagtcagcatccacgattacacaccacttagttccaaaaatgatgagagatagcttataaacaacaaccatatatgtaacaaggtgaataaatgcaaataggaaatactagatctaaagggagtatgaaggaggaaggtatctgtacaagaaaactgaggagatgcagagactgcaagtaaccttttaatttggtcataagctttctaaaatgaaaagctatacacttcttattgactggaattatttggaaatatttgctggtttttcaggaagatgaaattatttcctacccctactacactgttacatatagaacccacttcatttaggtagaaaaatccatttatgacaaaaacagtcgtcttcattttgtgggaaggacacagaccttcaaagatttatatgcagcacccatagtaaaaacaaaaaacaagaactaccagaaattatactgatattgtgactaaagacctaaaatagcataagggaaagagactacctaacattgtgatttagcgatatcagatacagggaaatgtctataatataataacaacgacagtgaaagtcagattaaattttattggctcaggtatgtaaacacaaatgaccacatttctaaacctgttaagagccttttactgaggacactgactaagatagctttgcttccctttcccaaatgtgagataaagcaaattttgatacacaattaccgttagtgccactccctcccttaataaaaggatccatctgaaaacagagcaggaacataactcaaagggactcctaagtgggaggaaacataaaacacgaagtactcactgcagctgcggtacaatcccagaactctccgaagctggcgtggcaggagtgatgggggtcatgggagtcatgggggagggatacagtggagtggtgcccggcaagggtgcagttgtgagagtctgtgagtggaagagctgtggtgcctggcctgaggttccctgtgttgcctgctgggacgttgactgctgaacggctgcagctgccactgcctgttgctgctgctgctgctgctgctgctgctgctgctgctgctgctgttgctgctgctgctgctgctgctgctgctgctgctgttgttgttgctgctgctgcctttgttgctcttccaaaatagacagactattggtgttctgaataggctgtggggtcagtccagtgccataaggcatcattggactaaagatagggattccgggagtcatggcaccctgtggaaagcaaggagaaaaacaggttaggctggctgctgctaagtgtttgtggaactttcttggtggaacagcaggtcaggtgtgcaaagacagatgccttcggagaataatggggttattaaacattaattacggaagaaccagctattcttatacacattgctttcttctttaataccacacagtggataaacatgaagaaaaatggataaactgaacttcggaaaaattaaaaacttctgttctttgaaagacaccattgagaaaattaaaaggcaggccagactgggaaaaaaatacctataatacatacatctgagaaaggactggtaaacagaataataaagagctctgacaactccataaaagaagatcaacaaataaaataataaaaaagggcaaaagatgtgaaggacatattacaaatgaagatacaggcatacctcggagatactacaggttaggttccagaccatctcaataaagcaagcggcatgaattttttggtttcccagtgcctacaaaagttatgttagcactaaagtctattaagtgtgcaatagcattatgtctaataatatgtatataacttaatttaaaaatgctttattgctaaaaatgctaacaatcatgtgagcctgcagcaaatcataatctttttgctgacagaggatcttgcctcgatgttgatggctgctgactgatcagggtggtagctgtggcaatttcttaaaataagactgacgaagtttgccacactgactgactcttcctttcactgaagatgtctctgtagcatatgatactatttgacagcattttacccacactagaacttatttcaaaattggagtcaatcctctcaaaccctgctgctgctttatcaactaagtttatgtaatattctaaagtcatcagttcttcaccaggagtcaattctatctcaagaaaccactttctttgcttactcacaagaagcaactcctcatctgttcaggttttatcaaaaaattgcagcaattcagtcacatcttcaggttcacttctaattctagttcatttgctatttccactacacctgcagtaacttccagcactgaagtctagaacctctcaaagtcatccacgagggttggaatcaacctcttccaaactcttattcatgttgatatttcaccctcctcccatgaatcatgaacattcttaatggcatctagaatggtgaatctttttcagaaggttttcaattcactttgcccagattcatcagaggaatcactatctatggcagctacagcatatgtccctccctgcttcctttctttgagacagggtctccattgtagcctttaacttctggactcaagtgaccctcccgcctcagcctcccaagtagctgggactacaggcacatgccaccatgaccagctaattaaaaaaaattttttttttgtagcaacagggacttgttttgttacccaggttggtcttgagctcctagctttgagtgatccttccaccttggcctcccagtgagattacaagcatgagccaccatgccctgctgtatttcttaaatagtaagaattgaaagttgaaattactccttgatccatgggctgaagaatggatatattatttaagcaggcatgaaaacaatattaatctccttgttcttctccatcagagcttgtggacaactagttacactgtcagtgagtaatattttgaaattaaactttttttctgagcagatctcaaagagcttaaaatatccagtaaatcatgctgtaaacagacgtgctctcatcaggttttgttgttctgtttactgaggacaggcagagtagatttagcgtaattcttaaggctctatggttttagagcagaacatgagcattggcttcaatttaaactcaccagctctattagcccctaactagtcagccagtcctctgaagctttgaggctaggcactgatttctcctctctagctataaaagtcctagatagcatcttcttccagtagaaggctgtttcatctacattaaaaatctattatttagtatagtcaccttcatcaattatctcagctagatcttccagataacttgctgcttcatgttgcatttttatgttgtggagaaggcctctctccttaaagctctgaataaacctctgctagtttcaaaactttcttctacagcttcctctccgctctcagcctttacagaattgaagagagttaaggccttgctctgtattacactttggcttaaggggatgtgtgggtggtatgatcttctatccagaccattcaaactttctccatataagcaataaggctgttttgctttcttatcacttgtgggtttactggagtagcacttctaatttcctttaagaacttttcccttgcattcacaacttggctaactatttggtgcaagaggcctagcttttagcctgtctcagctttcaacatgccttcttcactaagtataatcatttatagcttttggtttcaaatgagagatgtgcagctcttcccttcatctgaacacttaattaaaagtcactgtaaggttattaattagcctaatttccatattgttgtgtctcaaggaatagggaagaccaagcagagggagagagatgggggaatggttggtcacgctgcagacatttatcaattaagttcctgtattatacaggtgcagtttatggcattcaataataattacaatagtaacatcaaagatcactgatcacaataacagataataatgaaaaggtttgactaggcacagtggctcatgcctgtaatcccaacactttgggaggccaaggcggatggatcacttgcagccagtagtttgacaccagcatggtgaaactccgtctccactaaaaatacaaaatttagctgggtgtggtggcgcatgcctgtaatcccagctacttgggaggctgaggcaggagaatcgcttgaacacgggagatggaggttgcagtgagccaagactgcaccactgcactccagcctgggcaacagagtgactgaaaaaaaaaattaaaaaaaaaatacaaaaaaaaagaaaaaaaaaagtttgataacaataacggataataatgaaaaagtttgaaatcctgcaaaaattaccaaaatctaaccccaagacatgaagtgagtacacacttttggaaaaataatgccaacagacttgctgggtacaggtttaccacaaccttcaatttgtcaaacatgcagtaaagtgaagtgcagtaaagtgaagtgggcctgtgtatgagtggctgacaagcacttgccaaggtgctcagaaacattagtaatcaggcaaataaaaatcaaaaccacaataagatactactaagcaatcactagagtgaaagtaaaaagactgacagcagaaagtgttggtgaggatgtggagcaacttaaatctcttatgctgcaaaacaatacagccacttcaaaaaacagtttggcagtttcttataaagttatacatataccaatataggacctagcaatcctactcctaagtatttacccatgagaagtaaaaacagtgcattcaaagtctacacatatgtttacagtgcttttattcgcaatagctccaaactggaaagaccccaaatgtgagcaactggagaatggatgaactgtggaacatccaaacaatggagtgatacttagctatacaatggattaactactgatatacaaacagtatactgggctaagaagtcagacatacacaaaaaagcatacactctgattccatctatatgaaattctagaatagacaaaactaatcttcagcattgaaaagcagatgcagtagttacctggggccagcagagtgactataaaggggaagaagggactttttaaggtaactgaaatgttctgtaatttatacattatatataattatcaaaacagacacttaaaatgagtttttttgtatgtatatttcaacaaaagttattgatttttttttttttttttttttttttttgagacagagtctcgctctgtctcccaggctggagtgcagtggcacgacctctgctcactgcaacctccacctcccgggttcaagcaattctccttgcctcagcctcccgagtagctgggattacaggcacccgccacaacacctggctaatttttgtatattttgtagagatgaggtttcaccacgttggccaggctggtctcgaactcctgacctcaggtgatccgcccaccttggcctcccaaagtgctgggattacaggcgtgagccactgcacccaggctgaaaaatttttaaagtagatgggtggttgagagcttgaaatgtaaaaggggaaaaataaaactagaaaataatttggtgagggtgattttcaaaatcaaagaccctatatagtcatttggaacattctcataagtgtttatcaaaagattaggtgtttcataaatatataacttagcttccagacttcccaaataaacaccattgtgcctattcaaagcctaatagaacttctcaacaaaataaggcttaaaaaacatattaaaccattttcaaaaacagatcattaaatgcccttccttgccttttgataccatctcttgcagttcagatttccgccctccctattctctccctcctgctatattacctgaggggaggccaagccctgagcgtaaggtggcaggctgttgttctgatccatgatgttcactttcttcttggcaaaccagaaacccttgcgctggaactcgtctcactattcaattttttcctagagcatctccagcacactcttctcagcaacttcctcaattccttgggttatcttcacacgccaagaaacagtgatgctgctttggaaaaaagtctaaagtttaatttaaggatccaggtaacctgtacagtcctataagccagttctatggctatacaaaacacaaacatgaaaaccaatgaagctattttggaatacatttgtttttaccttataatcctaaagttttattccttccatgtttccggcgattgcatgtaaaatcgccaacaaaacaaaaatcattttgttacatgtttaaataatcggaaaatgctcaaaatcgagctgtcataaccagcattaaaaacttttgaggaaaaacacctagagaaaaataattcctaagcaaaatgtaatatcagagcagaatattcactaagcactgtatacacagcactgttaggcaaagtttagatctttaaatattccaattttacatcctctacaatgtcttgggcaaaaaattaagtaaatatcaaattcaatccaatatacttcagagtgatcatttatcaagctcctactgtaatgaaactgtaaaaaaaaaaagccgcacaaagataaagccctgaatttttataaatgtaataaccttacctctttagaacacattaatgcaaactgtgcctgttatctgacttttcttaaatcatcatcgctttactcactacacatctgaaatgagtttataacaacatattctcacatagaacttagaggtctcaaagttacaaattatatgtccaaagatccttcaggcatatgcacttcaagcatgtgctggtacagaacagacactcagatatttgctgaatgtatgaaagactctgacgatcactttgaaagggcaaatgcccccaaagactatctatcctacatactcatcactgaaaaacagaccaaaaaagaaagcaagctctgcttctggaaataaatatatcagagatattttttaaaatatactttttttttgacagttatcctataataacaataacagaagtcctgcagatgaggatataaagataggaggatatagtccttggcatcaaagtgttcaatatgaagggtatgcaaataactactgtaaaacatagtattataacagcaggtatggtctaagctaagttccttgaatgcagaaaccagcctacatgtctttgtgatctctgcatctagcactatgcctggaatacagtatgtgatcatgaatgagcccatatacacccctggaagagaagacaatatagactaacagccaatcactgtgaagagagcgcagtgttttcacaaagcagggaccatctaacttgggtctcacaaggtgagtaggaatttacacatcagggcttcagacaaaagagaaatcaagcagaaagagacagattgaaaaagcatgcagtatgcaggcgacaagcttagtatgactgtatagaaggtcactgcagcagatgagacagcacatattggtgggctcatactatcaggagttttcaatgttattgcataggcaataataacagttatggaattttggaagtgcagtatgaacagatctaatttggcaagactagatgaatttgagaggagtaaaactggaggacggaagtttcgtttcaggaatctaaggttgaggcaagagataatgacggcaggatttaaagccattataagtatgattagagatttatccaggaccttcggtggcttcaggccactttttgcaagtaagtctacagaagaaaccgcacagtgattactgcactaatttatcctcagaaaagagttgtttgctgggtatcttcatctcctggaaattgaaacatcaaatccgatattttttggaggcaatcaaattaattctgcatagccttctagtgtctgtataactaaatgaagcacagtcttttcacagaaaagtctacctagagatttggaaaaccatgatggcctgaaccgagagacgggagaccctgcaaataaagtggtgtgtattatatcttaagcgctaccgtgcccgctgtctcaggcttctgacaaaatatttaagtctcaatgttggcagcaaaacaggcgggcacagatctgggtgaatctgcttctaacatggagaagaagcggatggcaggacagggcagggtaaacttagggtcttcgatgcaagggactgtcctgtcccgcctgccgccgcccagccagccagtagtaccctgagccccacaatcgtacgatgggaagctgcctgcgaaacacagcagagtagggcaccaggcgggagtggcggccgagtggccgttacaggccggaacggcggcagcacgaaagggaggaacgtcccccgaggggcctgcacgcgcgccaattcctagtctcttccccaccattgcccccaggcctcagtgcagtggtggccttcgcccgaaccgtcagaaaagagtacaatctgttacctgggtcactgcaaagatcactatgggccagcggaagcgaagttaaacagccggcggcccaggcgcccgccacagcgaacctgcccgacctcactgaacccctggcgcgcgttgataatgt

SEQ ID NO: 1128 - DNA, 426 bp, Homo sapiens; identical to SEQ ID NO: 1125

SEQ ID NO: 1129 - DNA, 127 bp, Homo sapiens
tgaggcaggagaatcgcttgaacccgggaggcagaggttgcagtgagccaagatcacgccactgcactccagcctgggcgacagaatgagactccatctcaaaaaaaaaaaaaaaaaaaaaaaaaag

SEQ ID NO: 1130 - DNA, 1026 bp, Homo sapiens
cacagcatgagcatgagctgtccctggttgggcacctgggcagtggtctgtgcttcacctagacaaagaaatgacagtcaaggaacagatgctaggggaggaaacagagctgaccagaggttacctgggcacaagaggaatctggaagagcgcacacctgctgagcaaacctaaggcagtgacatcagggtggaaaaaagaatacatatgcttattgttagtgttcaccaaaaaaggttcacagtgcgttgctctaaagctcagttagcttctctaacacaaggtagatacagtgtgaagtgccaaaactcagtttccataaaactttttacaagcatgtaagttccttattgactttttcaaaagaaattcatgtaggaaatgcatcctaactcattctatgatgccagcattaccctgatactaaagccagccaaagacactaaaagtaaagaaaactgtagagcaatatcccttatgaaggttgatgccaaaatcatcaacaaaatactagcaaatcaaattcagtagcaggctgaaaggattatacaccctgaccaagtacagtttgttcctggaatgcaaggatggttcgacacatgaaaactgatcagtgtaaacagaatgaagggggaaaaacacatgatcatctcaattgatgccaaaaaaaaagcatttgacaaaattcaacatctttcatgatgaaagcactcaatatactagaaatagaaggaaactacctcaacataataaaagttatatgaaaaatctacagcaaatatcatactcaatggcaaaaaaactgaaatcttctcatctaaaatcaggaacaaggcaataatgcccacttctattcaacatattactggaagttctagctagagcaattggacaagaaaaagtggggggtgggggagaagaggcatccaaactggaaaggaagaagtaaaattatctctattcccagatgatgtgatcttatatgcagaaaaccctaacagttccacaaaaaaaaaaaaataaata

SEQ ID NO: 1131 - DNA, 1026 bp, Homo sapiens
cacagcatgagcatgagctgtccctggttgggcacctgggcagtggtctgtgcttcacctagacaaagaaatgacagtcaaggaacagatgctaggggaggaaacagagctgaccagaggttacctgggcacaagaggaatctggaagagcgcacacctgctgagcaaacctaaggcagtgacatcagggtggaaaaaagaatacatatgcttattgttagtgttcaccaaaaaaggttcacagtgcgttgctctaaagctcagttagcttctctaacacaaggtagatacagtgtgaagtgccaaaactcagtttccataaaactttttacaagcatgtaagttccttattgactttttcaaaagaaattcatgtaggaaatgcatcctaactcattctatgatgccagcattaccctgatactaaagccagccaaagacactaaaagtaaagaaaactgtagagcaatatcccttatgaaggttgatgccaaaatcatcaacaaaatactagcaaatcaaattcagtagcaggctgaaaggattatacaccctgaccaagtacagtttgttcctggaatgcaaggatggttcgacacatgaaaactgatcagtgtaaacagaatgaagggggaaaaacacatgatcatctcaattgatgccaaaaaaaaagcatttgacaaaattcaacatctttcatgatgaaagcactcaatatactagaaatagaaggaaactacctcaacataataaaagttatatgaaaaatctacagcaaatatcatactcaatggcaaaaaaactgaaatcttctcatctaaaatcaggaacaaggcaataatgcccacttctattcaacatattactggaagttctagctagagcaattggacaagaaaaagtggggggtgggggagaagaggcatccaaactggaaaggaagaagtaaaattatctctattcccagatgatgtgatcttatatgcagaaaaccctaacagttccacaaaaaaaaaaaaaaaaata

SEQ ID NO: 1132 - DNA, 1026 bp, Homo sapiens; identical to SEQ ID NO: 1131

SEQ ID NO: 1133 - DNA, 263 bp, Homo sapiens
gaggggacggggacagaaccagggtgccctctcccatgccccacctgcactccacgaagctaaacccatttcgcccttgctgtccctgctgaagacggaggcagaggctcctatactcactgaggaatctcaagtttagggacaccaggtggcaggttgtgccaggaaagacatcagtcagggacagcactggcagagctcaccacaccatggagtcctccttccactccccttccatggtcctccctcctctccccctccat

SEQ ID NO: 1134 - DNA, 870 bp, Homo sapiens
aaaactttgtgtagcatgcctggttgtacgataagagctgagtgaaagatgcagtatcccttttccacacggaaaagccaaatagcatcagcaacaacaaatagaataatgcagtggtttctatcatgctaatttattttgctttggagcaggtacctttcctctatggcattattttcttgcatttctcataaaggggaggatgcatcccaactgaatggctcactggcatgtcttttatgtgttcagttgccattcctagctttggaaagtttctatctgtccatgtgtatacaagtcaatgccccatttttgtttttcttttaaccgaggtgtagataggaaaaggacatttttaattacttaataaccggaaatgcagatgtgtaaggagaatgagaggaatgagttaaagtggttatgcatttttctatagatgagccattacagcaaggaattttacagttgacttctctgaacctagctttaccacagtgattaaatcctatttagaaaggggaatctgatttaaatgtgtgattccttgtatttgctcctatcacaaaagatatattaaaggaggtatgccattaatgaaatccactgtcctgagtattatctttcctcctgttgtactttctcagagactatggcagaatatctggatcttccttggattttgtacacatattgtagtgaaatgtgtcctacatctgaaattgcatgggactcatgcccagcaatctggttctaggcctttgacacctgataatatgagagcaattggccagccaatagccataagcccagaggattttagagcttcatgtgtggcttttaagagcaggtttgaaaaaaaaaaaaaaagac

SEQ ID NO: 1135 - DNA, 868 bp, Homo sapiens
aaaactttgtgtagcatgcctggttgtacgataagagctgagtgaaagatgcagtatcccttttccacacggaaaagccaaatagcatcagcaacaacaaatagaataatgcagtggtttctatcatgctaatttattttgctttggagcaggtacctttcctctatggcattattttcttgcatttctcataaaggggaggatgcatcccaactgaatggctcactggcatgtcttttatgtgttcagttgccattcctagctttggaaagtttctatctgtccatgtgtatacaagtcaatgccccatttttgtttttcttttaaccgaggtgtagataggaaaaggacatttttaattacttaataaccggaaatgcagatgtgtaaggagaatgagaggaatgagttaaagtggttatgcatttttctatagatgagccattacagcaaggaattttacagttgacttctctgaacctagctttaccacagtgattaaatcctatttagaaaggggaatctgatttaaatgtgtgattccttgtatttgctcctatcacaaaagatatattaaaggaggtatgccattaatgaaatccactgtcctgagtattatctttcctcctgttgtactttctcagagactatggcagaatatctggatcttccttggattttgtacacatattgtagtgaaatgtgtcctacatctgaaattgcatgggactcatgcccagcaatctggttctaggcctttgacacctgataatatgagagcaattggccagccaatagccataagcccagaggattttagagcttcatgtgtggcttttaagagcaggtttgaaaaaaaaaaaaaaaa

SEQ ID NO: 1136 - DNA, 868 bp, Homo sapiens; identical to SEQ ID NO: 1135

SEQ ID NO: 1137 - DNA, 750 bp, Homo sapiens
cttcaaagcaaggaaataagatgctgtatatgcacacataaatgcattgataatgtaaatatcctattcacgctaatgaattactagatattaaaagtggggggtggaaatcattgtagccctttattgatgacacccattcattctggcttcagaccttgcagaggttggccatatctttttaaaagtgtcattgatgataaaagggactacccaaggctaaagcgtcaacatttttcagaacaattgcttttctcattatttacaacctatataattcaactttgaaataacccttattttgaaaaaaactgttctaggtatggcatgttttgttttttccctcaggtatattcaatacattcttcatatttgggggaactgcttttgaaaaagggatactgcatcttaacagttatcttcagtgtgcatccagtaaagtctgcgtgttgagtatttgagctacattccatatattttggccaccctcataccagaggacagccgtagttcaggaggctctgttttcaaaagcaagttcaaaagcacatgcacattgagggaagatgaaagaaaacaaaaaccaaccatgcccatttaacttcagattacagagcacaaaatgtggagtgccattaacccattgattgattgtggctgtagaatttaaaaagcaaacatggggggggtggggaatcatctgtatccagggtaagaatgaccaatattttcacatgggatcatcctaat

SEQ ID NO: 1138 - DNA, 750 bp, Homo sapiens; identical to SEQ ID NO: 1137

SEQ ID NO: 1139 - DNA, 750 bp, Homo sapiens; identical to SEQ ID NO: 1137

SEQ ID NO: 1140 - DNA, 2651 bp, Homo sapiens
agtaacaactttaatccacataataaccctatgggatagataactgaggaacagagaggttaggtaatttgtctaagatcacagagctagggaatgatggcaccagagtttgaactgcatactgactccagcaacttctggggaaaatcacactcagtgttttgtagtaagatttggatttagggggtaaacagtactaacagagagttacagaactttgtacttctctcatctgctatttagttcattggacttgaactatgggctaggagagtgagaatggatcttggagattatctagttagcagcccttatagttcatggaactaagacccaggctgtgcagtagcctgttcagggatatgcatatgggaaaagctcaagccagaatggagtgcttttttactgaagaattctaaaatgtttctgcttcatataatatcctctctctgtcctttttccccttctttctccttgtcttctctccctttttatttatggtgctatcagtgttagaacaacaataatagaaagtacatggaaaagatcacttaaaatcctaccacaccatgttttaaactattttcatgtattgctgatttctgaatctgttatcttgttagattatgacattgatttaagtttcatagctcaaatatggaacctctataaagaagttccagggagtggaaagggaagggaaaggaattgctgttatttattaagagcctactgtctgtcagtcactctgcctacctgctgtctctgatgtctcaaacttccttcccactttatgggattctgtaggaggaccagcacaataccctgcacaaagtgagcattctgcaaacctaaagaacgaggaaatgaatgaaaggaagtgctttgaattcagcagaagaaagagataacaatcatgtgcgaactactcccagctattgcctattgactgttagctttcagttcatttttgtacaatttaaccattgaggcaaatgtgtatacaggataccatggaatgctgtttacaggtatagattttggttcttgtacttttgaagcagctgaatactgataaggcctgtgtccagaaactatttttttccttcatttaatcaggtttctttacttccttgaccacaaatattatttgctaaggaaatttcttctttggggtggtatttaaccatgcaagtggggaaaattgtgctacgatactgttctgacagcctgtggacttgagggaaaaaactgcaggagcagagtttcctttcagcagtcaactataggctcagtcacttcttgacaaaacataagttaaaatagtgctgatttctttttgaacataatcaattctaatggaaactgttccagctgagtttggaaacacacagaagcagccttcagttaccattgaggctattattgccctagtaataccaaagagactctttcagcctacttatttgtattggatgcttgtagggctatttcatggggacctggtgttgactctcagtgacttccactttgactctgagatttatcttcaaatgctgatgcattctaagatttatagaagtacaaacttatcttattattgctaatttgtcccattactagactatgccccttagagttataattatgactagcccaattacattttattgtcgtgcccttttttggcaaaaaataaaatttctttgttaaactcaaggatttaaaatttagcacaagttcataaacttactttgatacttcttcatttcctttttaaaaatacatcagtagactcaaaatgtaaaagtggcttagggctcacttgacctctgaaaggtggctgactgacttttagttaaaaacaatatttggctatatatctctgtcatctatttgtggctactatgtgtgcaaactttgtggaacagatatctttctcccttcttcttccctcctctctgcccaaaagacacacacacaaacacacacatgtacacacagagacttgaaggcttttgtgtacatttaccaactactacaacaacaagaaatgaagaacaatacagctcaactctgtaaatctagaatggggaatctatttcccaaaggctgtatgcagtatcttttcagcgagtcatggtagcctccaacaactagtagcactctttgtgcatgaggatatttctgactaaaaatccacctttgttgataatgtttgttcactgtaaaggaattgagtggataaaagaggtattacactttcctttctatatcaaggaaggtggaatattcaaacagaacactctatgtgtgcacacgtgcacatggacgtgagtgagagatgatttatagatatagaagagtcctactgtattcttttaagaggtattcagcaactatttgttgaataccttctgtgtgtttatcactatgctgagttcctggtgagaggggaatgagtgtaaagcagggatgttatcactatgctgagttcctggtgagaggggaatgagtgtaaagcagggatgtccaatcttttggcttccctgggccacactggaagaagaaatctcttgtaccatacataaaatacacttaacactaatgatacctgatgagaaaaaaaaaaatcggaaaaaaaaaatctc

SEQ ID NO: 1141 - DNA, 3965 bp, Homo sapiens
tttttttttttttttgataaatacaaagatacatgtaaagttttacttacctgattttaaaaacaggctaccaaaatttatccaaatatattaaaaaatgagactgttttaaaaacctttcgtttccatattgtgactccactaagcgggtaaaaagttcaggacagagatggaaaggaaagaaggaaacaggaagaagtgaaactaggaaggtggtgccagtggcacatggatgaagaaagagagatcatcagccatggagaattttgtaatgtaagtagagagagagattgggtaggaagacaggcttcacagtttgtaaagtgtaagggaactacccatcgtaccctgtcattgactagggctgtgagttatgtagttctgtctcctcttgcaaaagacttaccacttctggcaagtgattaaccacttctggcaactcttcatttcttcttatccttgaatattcatctacatcactctaaacagcacagccccagaagcatggaaaggggagttattagtatggaaaggggagttactcttctggtgtagtggtccgattgagtccatggcttcccagccttaccagaggtgataaaaatgtcaattcctttggggccaatcttgctcctccagtgtgttttagccctaatgaggtcatggttatttctagacttctgagacttactgtggctttgaattgacacaaacactaattttctgtcaaaggctagagtgatggatgttatatgcctgaattttctttgaacattttattttaaaagagatactttgggcttttcatgaaactaaaattctggaaccctagagcagtctattatatctgtcaccacaaggactttccttaaaaagctccctccataagcacttggatgtgtaaacaagatcctttcacagatctttttctcttcctctccatatcccaacttgtcttggagactactttttgaattataaatccctttctgcatttctattattaatttttatttgtaaaattgctaaaatagctaaatttggccatttaacctgcatttaaaatctaggaatgtggggtgatcatctttgtacataaattacctaatgaccctgtccatgctgtgctacgtgtttaggtggaataacactcccatggatgaagcactgcactttggacaccatgatgtatttaaaattctccaagaataccaagtccagtacacacctcaaggagattctgacaacgggaaggaaaatcaaaccgtccataagaatcttgatggattgttgtaatggtctcaaatcccaagatttaaatcacttacctatttaattgtggaaaatgattatgaagaacatgtgtatttctatctggtagtgatgtatattttacatttgtcatttcagtgttactggagttttcttcattgtgcacacaggacaaatctgatctctttgggaaaaaatagaaataaaacaatctccctccataatgtgagcaatattacctcgtgcattgtataatttgatgtaaaagaaatagttaccaatgctagcttgtgtggtcttccatgatttatttgtgttttgtgaattttcaatttatggtgatgatctgctgatatgcatttataaagtaagctctgttgtacagtctgtccaaatgggtcaaggttgcctttagaagcaaatagtgtgattttcaagacttcaaatacaaatttagtttaagtgtttgaacaactatatgcacttacggttgtgtgtttaaaatgtctctctcaccccctagcttcatgatgtgactcttaaaaaactataatagttaacaactgttagtaagatagaccaattctgattagactttatcagggaatctgtttaagatatgtttggtgaccaaaacgtatgtgtgaatgtagttataatgcttttgaaaaattttcctttttctatatccccttagtccagcctctcttctcagacatttagctatctgcctctttcctttagctgggaaagtgagagctggcatactatgcagtttttatgttttccatagtaagtcagaaaatgcctcctatttctggcatcagaactttgccatttgtctacagaagacgaaccagagacaaaattactaagtataaattagtcaagtttatcagtctaaaaaacgaagggatgtgcaactgcagctctttaagaagttttttttttttagcttctagggtaaagataaattcagaaatgctctaagctaccaaagttattctgaaagtatgggaactgctacaactaacaaacatttgtttccaagcctgtcattaagagtctgcatcaagagatttgtcctccttgggggaccactggatcattccagatttcttgtgatttttctattgtgtaattcttggtgggctctgtagtttaataataagaaaaaggccatttcattttaaattgtgacctataattctttgtcttgggttggtaattcaggattcatttggaaagtgggtaaaaggggcttcaaaaaacggatagaacaggattttctaggagttacacatacattttatcctgtcatacctcgagataaagtggcatgttagtgaggagttctgatattaagcacacacacacatgcacacaaatggacttctctgaagctgtgtttagtgaaatgagctcaagtacatgaatgttagttgttatcacatacagcaaattcctttttttttctttttctatgagcacactctgctgcttctaaactttacatgcctgatggcaccttactccagcagcctccaggtgctttcattttcacttccagtctaagccagtggctcctgccactgccctcccattacctagatggcacctcctttggtgaaaccacggccaatgttccttagctgcaccaggcccgaagctgttcccatgcttgagcttccatggggaggatgctgagtgagcagtttcctaccccgtggatctagcaagccatggagacaggtagcatttgtaagatgctgcacaggagcagcattatccccaaagatattacagggtagacacgttttaactgaaatcaatcaagataactttattcaaagagcagcccgctttgtgtgactaaaatgaaacaagacagttgaattgtgtgacttgaagattaccaatgattttgaggcttttctataataaaaagaggttctaaccattatttgggaacaaagagagttttcatcttttttcagatcaaaaccattctgtaaaatctttgttgtttaattaaatgtgccgttatttacccctgatgttatttatgactatgtgccgattcctgctcgggctgtttgctgttggctggtaataatatatttgatttaaatgctgttgactgtgctattaactgctgccgtcagtaaactccaaagatctttttgttttggctttagtatcatatgtgctttttctgtatcctgagcgctctatatgatcatgttaatttaaagctttatacacattgttgtttttgctggtctcatctttggtaatatgctataccccactgctgcccgacactgccctttagctgcagagctggattagctgttgaccatttgatgctgttgtctgtctggcagggactgaatgacctgatgtcagatttagattcttcctggggattacacagctatgaatgtatttgcttctaaaacctcccaaagtgaatctaatcttaaaactacaagttgtaagtattctgaaattgggaaacatttattttaaatgcaatcaggtagtgttgctttttacagcataataaatatatgtatcaaaaaaaaaactgtgtggaaaaaatgaattttcttaaaacaattaagagccaggaactccactgagcatacagaccatctctggttaggttccaatccatttctaatgcctgc

SEQ ID NO: 1142 - DNA, 814 bp, Homo sapiens
gggttgccacaatgactaggacaagaatcctgtgtagagttcacctttgaaggtgagggatgtgcaggcatgtctctagtcctctagatgcaaacactatccttttacagttaggaagtgctcagtaaatatttgttgaatggaaccagtaaacatacccttgaatgagaagagaggttattttcacaaagccttgaaatttatttagagagttgaagctagtactgccacactagaatctgagtgtcaccagccagtacacctcagctcctaatttattctgcgtgggaatagcattcgcttccaatgccagaaatccctggtcttcagagcactctttcctttcaggccaggggttagtgtatagttttccaaccatagagaaagtacatgaacaccatgactgttacattttcatttatcaaagttatctgtcacaaagtaagttactttgctagaagagtcactgcattactggcattgtagaactgtgatgagccaggtactatgcaaggtgacaagtggggttaccacaatgattagaagagacatcagaaattctctaatctaactcactcttcttttatagatgaagctgagacccaagagtgggctgtgatacagaactcttagtcctgcgctgttgttctacgtcctacaacactgattatgcccagtatggatagaatatacatattagcttattcatatgcactatctcctattagctaaggcctcttctctgctgagttttaggcagaggcctaagtgctacaacagaaagtcctgcaacatatagtcaacttcagctata

SEQ ID NO: 1143 - DNA, 743 bp, Homo sapiens
ccaggtttctaaagcaaaaaattgaagagcattttcctcctgtgtttataatcccaactaaaacactatgtaatacatgttggaaatattactgtgctttgtatatgtattaattttttttgccctaaattggcctctaggaatgtgaaagtagatgtacccacctgataagaaaaagtgagctaagtaactaacttgataactaggcattcaacaagtctttttctctatttcatagaatcagtgtcaccttaaattataataggtttgcacagaattcgtgaattcttgagatagagtcttgctctgttgcccaggctggagtgcagtggcgtgatctcgttcactgcaacctctgcctcccaggttcaggcaattctcctgcctcagccacctgagtagctgggattacaggtgtgttccaccacgcccagctaatttttgtatttttagtagagaggggtttcgccatgttggtcattctggtcttgaactcctggcctcaagtggtgcacccaccttggcctcccaaagtgataggattacaggcatcactgtatctggctgaaattagtgtattctttaaagttcatatttttcattaattcacagaagaattgtaaaaaaggtaacacgcagttgacattccatttttccagaaagacagataattacatactgtagaggatgactcaaaagtctgtttcaagccactgacttcctaaactaatgaaggcctattc

SEQ ID NO: 1144 - DNA, 13862 bp, Homo sapiens
ttcagaaccaggagaggaagcacaggacgtatgtctatgtgctcattgtcactgaagtgctggaagactgggaagattcagttaacattggtaagccatctccagacagcctggaaagggttcctcacaaccagcccttgccatgccacaggtcatgaccagaaccagaaacaagagcgtaccaggctcagtggctcacacctataaccccagtactttggaaggccaacacaggaggatcacctgagcccagagttctagaccagtcttggcaacctagtaagacctcatctctacaaaaatcagaagacttagctcggcgtggtggcacatgcctgtggtcgcagcttctcaggaggctgaagcaggaagatcatttgtgcttgggagtttgaggtcacattgagccataatcatgccactgcactccagcctaggcaacagagtgagactctgtctcaaaaacaaacaaaaaaacagaacaacaagagctggataaagaatagaaataattgaaggatgtgtataataaaacaagcatgtacattttgaacctgatagtattttgaaatgtttaaatggaatctgaagtgagtacatggtccacaaatagaagcatgacccctaaaaataagaaatgttgcttctaaaatcaaactgggtccttgccaaaagggctatacttctgcacctcctgagcagatactgattgagggcctccgccatgccaggctcactgctggccatggggaccataagtgagagcaggaccctggtcttgttcctcatgacatttatattgttgagaaaactgttggtttggtggtgtgagtccctccagaaatcatttagtagatacagaatagtgcaggtggtttctagttttattcttataaaatatgaatatatctataatatatatttttatattttttcatattttatatgaatataaaaatgataaaatttatgaacttttacaaaaggtgctgtgtgtaccctttaggtacacccaactttctcccaaaggagccattttctttgatctcagatggctgttacgtttacatctttggaactataaactgtggtggtacaaaggttggttcatggtttgattgtttacttctgaaggaaagtatattctagaaaggagaacactaatttccattacaaattggcagacagataaaatttatttgccaacattctcactttaatgttagtgtttgccttgccgccatgcccctcacattgttactctgggcagttcgtagccctttggctcttgatggctttgtgtctagtaataatgcagggtgctcaaggaaataaattcagtgtggatatactgaaaacagactccctaacaggtgtgctagagcttgaaaaggagactgcggtggatgtgtggtgtggccctatcctcagagcactctctgtcaggcaggagtcatacacttgtgatactaatttttttaggtaccattgctctattaatattcaaacaagcctttcaccttgtactcccacttctgagaattgaccctaatgaaataatctaaaatatgacaagctatggagccttccttcagatgatcttactaccattattcttactggttaaaatttgcatcttaaatatataactcaatgaatgacaaatcaatgaatgacatgtgtccgatggaatgttatacagctgttaaacaccatagtttaacaccaccctgttaaactgcagttgcagtggctcacgcctgtaatcccagcgctttgggaggctgaggcaggcgaatcacttgaggtcaggagttcgagaccagcctggccaacatggtgaaaccccatctctactaaaaatacaaaaattagccaggcatggtggcacacacctgtaatttcagctactcaggaagctgaggcaggagaataacttgaacctaggaggtggaggttgcagtgagccaagaatacaccaatgcactccagcctgggcaacagataagactgtttcaaaaaaaaaaatttttgtcaatgttaaagaaaagctaatattggcaggaatgtggtgagactgacatcctgacatacacaagcaggactggggatcagtgtcgcctttctgtaaagcacttttgcagtataaatcaggagcccttgaaagttcagaagctctatttttgtagttcttgtgctagatatctttccctagaaggttaaaaagaaagaaaaaacggggaacgttttaaaaaaatagcattatttataataattaaaatcactgggcatggtggatcacgtttgtaatcccagcactttgggaggccaaggcgggtgaatcacttgaggtcaggagttcgagaccagcctgtccaacatgctgaaaccccatctctactaaaaatacaaaaattagctgggcgtggtggtgtgcacctgtagtcccagctacttgggggctgaggcaggagaattgcttgaacccgggaggcggagattgcagtgagctaagataacgccactgcactccagcctgcatgacggagtgagcctccgtctcaataaataaacaaaaattagctgggtgtggttgtgggcgcctgtaatcccagctacttgagaggctgagccatgagaattgcttgagcctgggaggcagaggttgcagtgagccgggatcacatcgctgtactccagcctgggtgacagactgagactctgtctcaataataataataataataatcacagacaattgatgtccagtgatatggaaatgcttaagtgaatgataatacatccatactagatactatgacataatgcagccataaatgtcttaaaaaaaaagacagtctcactctgttgtccagactggagtacagtggcatgatcacagctcactgcagcctcaacctcctgggttcaagcagtcctcctgccttagcctttctagcaatggcaatgtctcatatttttttcataatatagattgcttaagaaatagtgtgacataggacaggtgtggtggctcatgcctgtaattccaagtactttgggaggctaaggcaggaggatcacttgaggccaggaatttgagacctcatttataccaaaaaaaaaaaaaaaaaaaagaagcagcagcaggtgtggcacgtgcttgtagtcctagctacttggaaggctggggcaggaagatccctcgtgttcgggagcttgagtttgcagtgaactatgatcataccactgcaatccagcctgtgagatcctatctctggaaaaaaaaaaaagagagaaagaaaaagaaaagaaaaaataacatgaagtaaaaaccagtaacaaaaattaaaaagcaaattcagcagcacattcttttagcagccagttactcttcaggtgctttccatactaatagtcataacagacttgtgagataggccctatttattgtctgttttatagatgaggaaaatggagcaggaacacagctacctgaggctgcacagctcattggagccatttatgtgattggagcccagcactttggcttcagagtccttgttcctgaccataacactctagcagagctggtcaggattcagagtacctgaaagcatgatccaattttggttgtctcaagattgtttctttttcaagtatatgaaaaaagggcagttgtgctagggtattgagagtggttttttctggtttataagattatgggtagttattacttttataagataaaaaatataaaggattttaaagcatggactagaaaagagtaagaaaatagactgaaaaataaaagtgtgattgtattgagattatttttacttcttttaagaaatattttctattatgtagataaattcactcttataagaaaacttttaaatgaattactgattacaaaccagccatcctagtaattctggaagctgatgctcgtgttgatttttccccccttgggacagggtctcactctgtcaccctgctggagtgcagtggcgcgatgacagctcactgcagccgcgaccttccgggctcaggtgatcctcccacctcagcctcctgggtagctgggagtacaggcacatgctaccatgcccagctaatttttgtattttttgtagagacagagttttgccatgttgctcaggccagtctcaaactcctgggctcaagcgatccgcccaccttagcctcctaaagtgctgggattgtaggcgtgagccacctcatccggccctcatgtcagtttttacaggagatggggatgctgctgggctttgatccctatgtatgtgcaagcaaggaaagctcagagacgcaggagggcaggaggaaaacactagccgtagttctctctggagggcaggttttacacaattactcttagctctttggttttcaggtttctcacctttctgcattagacattgatataatatttgaagcatatgaagtgtgcttgagttatttttgtaaggaaaaaaagtgttaagaaacattgctttaatgttttctatattttctcaaaagttctaggctcagaaaccttattactcttgtactagtttcttttctctctgcctccacaggaaggaagagggaatggtttaaaatagaagacgccataaaagtgctgcagtatcacaaacccgtgcaggcatcatattttgaaacattgaggcaaggctactcagccaacaatggcaccccagtcgtggccaccacatactcggtttctgctcagagctcgatgtcaggcatcagatgactgaagacttcctgtaagagaaatggaaattggaaactagactgaagtgcaaatcttccctctcaccctggctctttccacttctcacaggcctcctctttcaaataaggcatggtgggcagcaaagaaagggtgtattgataatgttgctgtttggtgttaagtgatggggctttttcttctgtttttattgagggtgggggttgggtgtgtaatttgtaagtacttttgtgcatgatctgtccctccctcttcccacccctgcagtcctctgaagagaggccaacagccttcccctgccttggattctgaagtgttcctgtttgtcttatcctggccctggccagacgttttctttgatttttaattttttttttttattaaaagataccagtatgagatgaaaacttccaataatttgtcctataatgtgctgtacagttcagtagagtggtcactttcactgcagtatacatttatctacacattatatatcggacatataatatgtaaataaatgacttctagaaagagaaatttgtttaatttttcaaggtttttttctcttttaatttgggcatttctagaattgagagcctcacaattaacatacctttttgttttcgatgctagtggctgggcaggttgccctgtcctttctctatttcccagtcattgactgtagatatgggaagagtttagctaccttcatagtgctcccaggactcatggcctttccttctttaagctgtatttccctgcccagaaagaaacaggaagaaacctttttttatttttttatttttttttaaccaagcaaggagcaaatggcctcagcccagatctgtaaaaacaatgatagaaattgaattctgccccacatgttgacagtagagttggaactggattcttgggattacttatctaaaaaactggagcatcaggtccatttctgttctgctggtttggaatcttttccgtaatgctatttattgccaacaatggcctctctttgtgtccatatatgccttacaccgtgctgacctgggtatcgtccatgtgctctgaagcatccaactttactttgcaggtgcatcaatgtagtcctgtccctgaactgagtaaccgtgttcctgaaaagtacactagggaaattcacctgcttgcttgtctttgtattggcatggcacttgtgattgcaccatggagcatgctcagagctattaaattggtctcccatctcccaccaggatatgaaaggtccatatgggaggccacgtaatcacttattacagtggttacataatacactggctcactgcagactctcttgttttttgatacagtttcgtgctggcttcatttgccaattgtgttgtttagttcggaagtaagagggtcttgagattgaggggtagggagggctacactgactgatccgtggcttaagacaggagattatctctgtactccagtggcatctccttagccaagatgtgaaattaaaatcatagttcgcctcatttaaaaattctaataaagcactcaaactttgaaaagcttttacttttccctcctactaaaagaaatgtatgtacctcatagccctgtgtcatttagtgttcagcacttttgggaacatcagttggtgaactttaaattttgctgtctactcactgggcacggtggctcacacctgtaatcccagcactttgggaggctgaggcaggtggatcacctgaggtcaggagtttgagaccagcctgaccaacatggtgaaaccccgtctctactaaaaatgcagaaattaggtgggcgcctgtaatcccagctacttgggaggctgaggcgagataatcgcttgaacctgggaggcagaggttgcagtgagccgagattgcaccactgtcgtccagcctgggtgataagagtgaaactccatctcaaaaaaaaaaaaaaaaaattttttttttttttttgctatatactcttagtttacatcctctcccccaatcttcacacacagagccaaagagcagttatattcttgggataccatgatacctctgggaaaggaattatattcccaaggagaggtcccattggataagaacaataccatgggacttgagtctgaatgccaacttactattcacacatccttcttaaaaacgaacacactgtttcttttcctgacctagagcattctaaagttctgttcaaataaataaagggcaaaataaagtagatttaaccaagtgccaggtggaattcaaaaaacacattcttccagataaattctacctttatggtatggatttgaaagtactttgcaggaaaacagtcagtactctttaaaaagggactgcagggctgggtgtagtggctcacacctgtaatcccagcactttgggaggccaaggcaggtgggtcacttgaggccaggagtttgagaccagcctgaccaacatggcaaaaccccatctctactaaaatacaaaaattagctgggcatgatggtgcactcctgtaatcccagctacttggtaggctgaagcatgagaattgcttaaacctgggaggcagaggttgcagtaagccaagatcatgccactgcactccagcctgggcaacagagtaagactctgtcttaataaataaataagaaaataaaacggaactgcagtgctaacagtaatttatacatttttaaatgttctgagtatgttttgactgggctagtgtaacaatatactaccctgaaagtgcagttttgattgttgttggtgtctttgggtcaggaaagtgaactgtgccaagaagtatttttcagtgacatgaatggattcctgttaatgcaattgactgagagattgtgcttacgctttcttaactgacaaaaagaggctttgtccaacatcagaattgttgaaactggtgctgttttctgttgcactgggattctgatgatctgggattttccctccttggcacagtaaacaccatgactgtctttattgagaatgtcgtcacagtcctttagtgatagattagttagacccatggttgcaatacctttatctccccaaagaaaataatcaaaagaaagcacaaaagctaccctgtttgcagaatatttcactgacattgatttgtcattaattctaccagagctgacctcattcaggcttgatagaaacaggttcctatgtttagggcagatccctagcctctcgctcacagtgagtctgcatgtcctagattctggttattgctggagcatccattaaagtctaccaaactcaggacagaagaagatagcagtggatttgtaaaaatttttagtttataaattacagtcattggggaaacactagtaaggtcatgtgatcttttggaccaggattttctctctgtcttctctctgggtgtgtgtgtgtgtgtatgtacagaagggctaccaggaagtgtcaaccatgttagattttctgtagtcttccagaaacagtgcagcccatacaacaggaatcttaattttcctcacagcaaatataacaggatggaacagttagtgttttgttttcacaagtgtccaccactccatctgccctgcatggagagggctctctcactgctagatctaggctgagccatctggaaggatcaaagggtgtgggagtatcaccccctctcaggctgcagaaggtctcgagggtggcgtcacagcaggatttccgccttctgcattgcactgcacagccccatggaacatgaggcacttgaggccttgcttcttggagcctctggggagcagagtaggtcactgccctctgggagtgttttgcagtagttttgtaaatgtgttgctacatagtcaagttcctttgtggcaaagaaatattttgttttgatattaggagccagcccatgtaatgcctctcaggcttgcttgcttagaagaaaaaagtcaccctttgtggtttttaagaaaaaaattctgtgcagatctgttcctcctcctgctccttcccttttctctacatacagtgctcattggaggctcctgctaaaccttcttaaccagagaaataataggtatttgttagacctgagtgtacatttcacatgttatccttcacatatttctcattttcatctagtactttcttaatgcctttgttggagtccgcatcctcatctttaaaaaaaaaaaaaaaaaaacagcttagcctaagccacattcactttttttagttcacaaaaaggatttaatagccacaatgtgatttttgccacaactgtgtgattttaatattctctaatatcaagggcggatttagaattgcaggaaatacctggagaaatcacagtggaatgaatttttgctttaagagaaatgagagttggctgtctctgtaattgataatacagcttcatcctagtcccatctgcatttcagaaaataaccctcatctttacaaaacacaggacacttgtgggacagttaactcaagcagctatggggagggaggagattattgaatggtgattaaataatgcaaatggctcttctgtttcttaaagactgtggaagaggtcagactgcccagttgaggtgggcagttcatactgctcagttgaggtggcagtcatttattctgagtcctgttggatagagcctatctcctcaaggctacagaggcttccaggatatggagctgtgcatgttaatggctcagccttgcctccatcagggcacctgcctaacttggagcaagtgggagagcaccctagagtcatcctctgtgctgtttcgtgagttttgcagcggagacttcaccatccggaggagctgtgtttctgtgtcacttgggatatcacctaaaaatgaaacatttgatattttaaggtataaaaaaaaagtaaattggggaacattggctgcagtccctaaaagatactgttgtctgtgcatcaggttagcttgaggtcaccacaggtcctgggagcccagagagtttaggcatactctcctttggaggccagcagcctttcacaaaccctgcctctaaaagggcggtttcacatttgaccatgtttttgcattagcctcagaaactcttgtctttagctgataacctttgagggatgtgagaagcctagttggagcatctgagaaaatgatacctctcaccttcaaattaatcaaatagtttgtccttctagtccccttataaattaataaatggagggctggtcatggtggctcacgcctgtaatcccagcactttgggaggccgaggcgggtggatcacaaggtcaggagttcaagaccagcctgaccaatatggtgaaaccccatctctactaaaaatacaaaaattagccaggtgtagtggcacgctcctgtagtcccagctactcgggaggctgaggcaggagaatcgcttgaacccaggaggtggatgttgcagtgagccgagatcccgccactgcactgcagcctaggcgacagagcaagactccgtctcaaaaaaaaaaaaaaaaaaaagaaaagggaagggaatcccattttgtgatgatttgggcacactacttgagctgaggctagcagtcacatgattttggctgtctctgacctgaagcttttgaagtaaggttatgtctcttccctgaagctttgtttatagtggtaatttggtgagtttgagctttgagcttgtcttagaaaataagactgtccacctggggaggggagcttatagggaacccgtgttaactcagaatgctgaagaaagtgcttttagccaacaaaagtaagattactatctagaaggtggaaagaagtcattgcttctgttcctccagcagtcagttgactctaggtttcctttggtttatatccccagttcttaatactaaaacttatttgacttcctatcaggaagcacacaaaaaaagcgtcatttaaaaccctggatataggctttaaaggatacaaaaacagcagcattgtcgttttgccaggttcatcaccattttgatgtgctacccatccttccaccctccctttcctgcccccaagcctcccagccaggccagatgtgaagattctattaatcactgtttcagagaacattaattcttgtatagaataattatctactaaattgcttattatctgtgactaccttgcagagaacatctcaacagtgcagtaaaatagctctcctagacttgagcttccagccaggcatttagatcactcttaagcctttgtggaattctgaggaaaaaaagcaagatgcctcaatgccaatgctgggccataagattctactcccctccctgtagggtggggcgcgtggctcagctttggaaaatcattttgccagtaatattgcctgtgaatccctttaagaagtcgtcctgatctgagcctgtctttctgagcactttggtgctgaattgaaaatggtaagctaaagcagtgacagatccacgtagcctctttaacctctttattatcttgccaaaaaaaaagtttctcaggttaaacctttgtctttaacctccctttgttgtggagaaaatgtgtcactaatcagtggtccaagggatatctagctttggttactcagttcctgcagcataacagatatgacttatgccagggaaggtagaggctgattatggagacacccaggaacaggaataagaagggataggtctgctccacgtagaacctccccagatcggaagttaagtcttggagagtttccaaagtgctgaagtaaaaaggagacttggagggcctttgcttaatgagcaagaggcttgtgtcctcccaagaacatgagggagttcagaagggagctatagctcacagacagaaacctgcccgctcaccccatccctcgtgactgggagcatgtttgctcagaattttctaagaggactctcccttcaaaaatccaatttgctcccagaatgttgtttagcctctgagaatctcactctttcatttccatctgtgaatggacatagatgtgttgctcagggatcagaaacatcagagtccagggcccagtggcatggtgttgcattagtagttagaaaagtaattggtcagctctactgtaaaagaaataagtatgtagtacagttttgtaaatgtcaggtctgttctattgttttgtgatctgaagactgtcaaactggttgataatcaaagaaaaggttggtggttagaataagtaaaatttcagttagaaagatatagcttaccagttttccatgtgcttaaggaagtcaagaatatttcaggttgttgagaactgttgtaaaatggaattgaagctagtgtctctcaccttcttaggtgtatcagagagaggaagtggaaggccagtagtagcatcttcatacttacttttgccagcccagcctccatttcaaagactttgtcttccatcctatccaatgacatggtcagggatgggctctgaggaggcagtgaggccccaccttggtttgctccactgtggtgtgtagtctccaaacagcttaagggtttttaagttttctcacgattacctccactccactcatctactatcagcatcagaaaggttaacatccctgggaccattctacttataaaagagatgaactagtgtgctttctccccttttccaggtgtgccatccatatacaatctcctcttggccaagttcaacaaatgtttccagggaaccccgtgggttgaggcaaagtagccaagatgtattgagttaagtttttctagaggacaaaagtatttcttgtcccttttccctcatgctcatatgttttagctgaggcgtaaatggccaagttgagtaatatctgtggaactgagacagagagccagggacccatgtacccagggaccagtcccctggggaatcacacagtggctcagactagactgctctatcccaccagaactctgctgctgttcatttccatcaggaccacccaggaaagcaaataagttagccttctcatcattaggtcacctaatctcttgggttgcaggatgagagcatatatagatctcctgtttagagagtgtgttcataattgtagaaagggatagaaaatggaataaccaagaggctgtgtcattttttaagaggatggcaaggatgacctcaaatgagctcaacaaaactgggaatccaaggaatggtgcttgtagggaaagagaggtcagttgtggtccttaaacctcttggcaccttgtgcgggttataaaacaaggagctggagtaaaattgcccttacccccaatccaaatgctgtccaggatttaggagctacccaacctgtggttatatggtgttggtttccattttttgtttgtttgcttgtttccaaaatagccttgcttggtactgcatggaaagttcaagcttttcttcttgcccgctcagggctggcctcttccccgtgtcttcacagcgtccctaaggaagatttttgcagcactctctggagctgaggggagtgaaatttggtccagagaaggcggaaggaaatagttttcctgtttccttttctcgaggtggatgtcctcaggcttccttcacacctccttctcatgggtgcggctggcagtacagtcaggctgtggaggagggctgagaagaaaggggcactggtccagccccaggtttggtctgagacaggtacacagcagataccatcccaccttcctctctaaagaacaggccagccacacatataaccctttccctactttactaatgtatcccttatgtggtaccagcaatggaggacaggcagacttaccccctgccatctagagagaatgttgttattacccgtaaaacttgaccacccccatatcccactcctttttgtaaaaacaaatgcttaaacctgtgagcctgccgttcctttctatgtgttaatcagtttccttccatttgagctgtgtgggagggaagggcattgaaattgtaggttgtaatcttgtgccaaccaataaaaaccagtatttcacacacat

SEQ ID NO: 1145 - DNA, 13186 bp, Homo sapiens
aggctggagtaaaagggacattgggaagattagttggaatttttgaggtaagtctgttaaaatctttggtacaaatgatatgtattaataaccacacagatattaacataggaaaaatgccatttctgtttcagcgagtttttttttttttagttatttttaactttttgagacaaggtctcactctcgcccaggctggagtgcagtggcacagtcatagctcactgcagccttgaactcctgggctcaagcagtcttctgcatcagcctcccaggtaggtgagactacatggatacaccaccatccttctaaatttttaaattttttgtagagacagggtcttgccatgttgcccaggctggtctcaaactcctgcgtttaagcgatcctcctgcctcagcctcccaaaatgccaggattacaggcttcagccaccatgcccaacctcggtgagttttttaaagaaagcaacaccaacagagaataacatgctttaaaaaaaaaagaaagaaagaaggaaatcccatagtcttgtcccctaaactactagaattatttttaaatattattttaccccattcctacttttctttgtctcctaccaaggtaggaggaaaggtagctaagtgtagagagagagaagaaaaatagaagataagtaactataacaaagagaggaaaaacaaggaaataagctgtgatacaaatttgaaagaaggcagggaaaagtgagaaatcaggagaaatcaagatgagcagatgctgggcgtggtggctcacacctataatcccagcgttttgggaagctgacacaggaagatctcttgagggtagaagttcaagaccaacctgagcaacagagtgagactctatctctacaaaaagtttacaaaataaaaatgtcagaagaaaggtctctgatgaaaaaatagatatgtaaataaatcttttttttttttttgagacagagtcttgctctgtcacccaggctggagtgcaatggtgcgatgtcggctcaccacaacctccgcctcccaggttcaagtgattctcctgcctcagtctcccaagtagctgagattacaagtgcccgccaccacatctggccagtttttgtatttttagtagagacaggtttcaccatgttggccaggctggtctggaactcctgacctcaggtgatccacccaccttggcctcccatagtgctggaattacaagcatgagccaccgcccctggcaataaataaatttttttaaaaggtggctgggcactgtggctcatgcctgtaatcccagcattttgggaggccaaagtgggaggatcacttgagcctaggagtttaagaccagcctgggcaacatggtgaaatcctgtctctacaaaaaaatacaaaaattggctgggtgtggtggctcacatatgtaatcccagcactttcccaggcctaggcatgcggatcacttgaggtcaggagtttgagaccagcctggccaacatggtgaaaccctgtctctactaaaaatacaaaaattagcagggcatggtgatgtgcacctgtaccagctactcaagaagctgaggtgagaagatcacctaagctcaggaaggtcaaggctgtggtgagccatgatcatgccactgcgctctaccgtaggtgacaaagtaaggctctctctcaaaaaataaggtaagtggggttagtgggaaaaggggtgtgggtgggaagaggggtgtgggtgggtgtgtgtgtgtgtcacactcagcttgtttgccttgctggggtcactgaagtttgagacctctgtggtagcccacccatccacagtcctctccctggtggtctagctagttaaatttacatgatgcctttttcttctcatagtattcctgttaagttgtatttaggggaaggggaggaaaaaccaatataattacttggttttagaagtccagccaaagagcacaccctcaaattcaagtgtggcctgctttaaatcatgtagctataactgtaggaccataaaaagtaaaagtttagaatctttgtgtctgagctctctggacatatgcataagagtgtgtttcatttaagtaattccagctttctaaggaaaaactctctctatccttctctctttgcccttcagaaccaggagaggaagcacaggacgtatgtctatgtgctcattgtcactgaagtgctggaagactgggaagattcagttaacattggtaagccatctccagacagcctggaaagggttcctcacaaccagcccttgccatgccacaggtcatgaccagaaccagaaacaagagcgtaccaggctcagtggctcacacctataaccccagtactttggaaggccaacacaggaggatcacctgagcccagagttctagaccagtcttggcaacctagtaagacctcatctctacaaaaatcagaagacttagctcggcgtggtggcacatgcctgtggtcgcagcttctcaggaggctgaagcaggaagatcatttgtgcttgggagtttgaggtcacattgagccataatcatgccactgcactccagcctaggcaacagagtgagactctgtctcaaaaacaaacaaaaaaacagaacaacaagagctggataaagaatagaaataattgaaggatgtgtataataaaacaagcatgtacattttgaacctgatagtattttgaaatgtttaaatggaatctgaagtgagtacatggtccacaaatagaagcatgacccctaaaaataagaaatgttgcttctaaaatcaaactgggtccttgccaaaagggctatacttctgcacctcctgagcagatactgattgagggcctccgccatgccaggctcactgctggccatggggaccataagtgagagcaggaccctggtcttgttcctcatgacatttatattgttgagaaaactgttggtttggtggtgtgagtccctccagaaatcatttagtagatacagaatagtgcaggtggtttctagttttattcttataaaatatgaatatatctataatatatatttttatattttttcatattttatatgaatataaaaatgataaaatttatgaacttttacaaaaggtgctgtgtgtaccctttaggtacacccaactttctcccaaaggagccattttctttgatctcagatggctgttacgtttacatctttggaactataaactgtggtggtacaaaggttggttcatggtttgattgtttacttctgaaggaaagtgtattctagaaaggagaacactaatttccattacaaattggcagacagataaaatttatttgccaacattctcactttaatgttagtgtttgccttgccgccatgcccctcacattgttactctgggcagttcgtagccctttggctcttgatggctttgtgtctagtaataatgcagggtgctcaaggaaataaattcagtgtggatatactgaaaacagactccctaacaggtgtgctagagcttgaaaaggagactgcggtggatgtgtggtgtggccctatcctcagagcactctctgtcaggcaggagtcatacacttgtgatactaatttttttaggtaccattgctctattaatattcaaacaagcctttcaccttgtactcccacttctgagaattgaccctaatgaaataatctaaaatatgacaagctatggagccttccttcagatgatcttactaccattattcttactggttaaaatttgcatcttaaatgtataactcaatgaatgacaaatcaatgaatgacatgtgtccgatggaatgttatacagctgttaaacaccatagtttaacaccaccctgttaaactgcagttgcagtggctcacgcctgtaatcccagcgctttgggaggctgaggcaggcgaatcacttgaggtcaggagttcgagaccagcctggccaacatggtgaaaccccatctctactaaaaatacaaaaattagccaggcatggtggcacacacctgtaatttcagctactcaggaagctgaggcaggagaataacttgaacctaggaggtggaggttgcagtgagccaagaatacaccaatgcactccagcctgggcaacagataagactgtttcaaaaaaaaaaatttttgtcaatgttaaagaaaagctaatattggcaggaatgtggtgagactgacatcctgacatacacaagcaggactggggatcagtgtcgcctttctgtaaagcacttttgcagtataaatcaggagcccttgaaagttcagaagctctatttttgtagttcttgtgctagatatctttccctagaaggttaaaaagaaagaaaaaacggggaacgttttaaaaaaatagcattatttataataattaaaatcactgggcatggtggatcacgtttgtaatcccagcactttgggaggccaaggcgggtgaatcacttgaggtcaggagttcgagaccagcctgtccaacatgctgaaaccccatctctactaaaaatacaaaaattagctgggcgtggtggtgtgcacctgtagtcccagctacttgggggctgaggcaggagaattgcttgaacccgggaggcggagattgcagtgagctaagataacgccactgcactccagcctgcatgacggagtgagcctccgtctcaataaataaacaaaaattagctgggtgtggttgtgggcgcctgtaatcccagctacttgagaggctgagccatgagaattgcttgagcctgggaggcagaggttgcagtgagccgggatcacatcgctgtactccagcctgggtgacagactgagactctgtctcaataataataataataataatcacagacaattgatgtccagtgatatggaaatgcttaagtgaatgataatacatccatactagatactatgacataatgcagccataaatgtcttaaaaaaaaagacagtctcactctgttgtccagactggagtacagtggcatgatcacagctcactgcagcctcaacctcctgggttcaagcagtcctcctgccttagcctttctagcaatggcaatgtctcatatttttttcataatatagattgcttaagaaatagtgtgacataggacaggtgtggtggctcatgcctgtaattccaagtactttgggaggctaaggcaggaggatcacttgaggccaggaatttgagacctcatttataccaaaaaaaaaaaaaaaaaaaaaagaagcagcagcaggtgtggcacgtgcttgtagtcctagctacttggaaggctggggcaggaagatccctcgtgttcgggagcttgagtttgcagtgaactatgatcataccactgcaatccagcctgtgagatcctatctctggaaaaaaaaaaaagagagaaagaaaaagaaaagaaaaaataacatgaagtaaaaaccagtaacaaaaattaaaaagcaaattcagcagcacattcttttagcagccagttactcttcaggtgctttccatactaatagtcataacagacttgtgagataggccctatttattgtctgttttatagatgaggaaaatggagcaggaacacagctacctgaggctgcacagctcattggagccatttatgtgattggagcccagcactttggcttcagagtccttgttcctgaccataacactctagcagagctggtcaggattcagagtacctgaaagcatgatccaattttggttgtctcaagattgtttctttttcaagtatatgaaaaaagggcagttgtgctagggtattgagagtggttttttctggtttataagattatgggtagttattacttttataagataaaaaatataaaggattttaaagcatggactagaaaagagtaagaaaatagactgaaaaataaaagtgtgattgtattgagattatttttacttcttttaagaaatattttctattatgtagataaattcactcttataagaaaacttttaaatgaattactgattacaaaccagccatcctagtaattctggaagctgatgctcgtgttgatttttccccccttgggacagggtctcactctgtcaccctgctggagtgcagtggcgcgatgacagctcactgcagccgcgaccttccgggctcaggtgatcctcccacctcagcctcctgggtagctgggagtacaggcacatgctaccatgcccagctaatttttgtattttttgtagagacagagttttgccatgttgctcaggccagtctcaaactcctgggctcaagcgatccgcccaccttagcctcctaaagtgctgggattgtaggcgtgagccacctcatccggccctcatgtcagtttttacaggagatggggatgctgctgggctttgatccctatgtatgtgcaagcaaggaaagctcagagacgcaggagggcaggaggaaaacactagccgtagttctctctggagggcaggttttacacaattactcttagctctttggttttcaggtttctcacctttctgcattagacattgatataatatttgaagcatatgaagtgtgcttgagttatttttgtaaggaaaaaaagtgttaagaaacattgctttaatgttttctatattttctcaaaagttctaggctcagaaaccttattactcttgtactagtttcttttctctctgcctccacaggaaggaagagggaatggtttaaaatagaagacgccataaaagtgctgcagtatcacaaacccgtgcaggcatcatattttgaaacattgaggcaaggctactcagccaacaatggcaccccagtcgtggccaccacatactcggtttctgctcagagctcgatgtcaggcatcagatgactgaagacttcctgtaagagaaatggaaattggaaactagactgaagtgcaaatcttccctctcaccctggctctttccacttctcacaggcctcctctttcaaataaggcatggtgggcagcaaagaaagggtgtattgataatgttgctgtttggtgttaagtgatggggctttttcttctgtttttattgagggtgggggttgggtgtgtaatttgtaagtacttttgtgcatgatctgtccctccctcttcccacccctgcagtcctctgaagagaggccaacagccttcccctgccttggattctgaagtgttcctgtttgtcttatcctggccctggccagacgttttctttgatttttaattttttttttttattaaaagataccagtatgagatgaaaacttccaataatttgtcctataatgtgctgtacagttcagtagagtggtcactttcactgcagtatacatttatctacacattatatatcggacatataatatgtaaataaatgacttctagaaagagaaatttgtttaatttttcaaggtttttttctcttttaatttgggcatttctagaattgagagcctcacaattaacatacctttttgttttcgatgctagtggctgggcaggttgccctgtcctttctctatttcccagtcattgactgtagatatgggaagagtttagctaccttcatagtgctcccaggactcatggcctttccttctttaagctgtatttccctgcccagaaagaaacaggaagaaacctttttttatttttttatttttttttaaccaagcaaggagcaaatggcctcagcccagatctgtaaaaacaatgatagaaattgaattctgccccacatgttgacagtagagttggaactggattcttgggattacttatctaaaaaactggagcatcaggtccatttctgttctgctggtttggaatcttttccgtaatgctatttattgccaacaatggcctctctttgtgtccatatatgccttacaccgtgctgacctgggtatcatccatgtgctctgaagcatccaactttactttgcaggtgcatcaatgtagtcctgtccctgaactgagtaaccgtgttcctgaaaagtacactagggaaattcacctgcttgcttgtctttgtattggcatggcacttgtgattgcaccatggagcatgctcagagctattaaattggtctcccatctcccaccaggatatgaaaggtccatatgggaggccacgtaatcacttattacagtggttacataatacactggctcactgcagactctcttgttttttgatacagtttcgtgctggcttcatttgccaattgtgttgtttagttcggaagtaagagggtcttgagattgaggggtagggagggctacactgactgatccgtggcttaagacaggagattatctctgtactccagtggcatctccttagccaagatgtgaaattaaaatcatagttcgcctcatttaaaaattctaataaagcactcaaactttgaaaagcttttacttttccctcctactaaaagaaatgtatgtacctcatagccctgtgtcatttagtgttcagcacttttgggaacatcagttggtgaactttaaattttgctgtctactcactgggcacggtggctcacacctgtaatcccagcactttgggaggctgaggcaggtggatcacctgaggtcaggagtttgagaccagcctgaccaacatggtgaaaccccgtctctactaaaaatgcagaaattaggtgggcgcctgtaatcccagctacttgggaggctgaggcgagataatcgcttgaacctgggaggcagaggttgcagtgagccgagattgcaccactgtcgtccagcctgggtgataagagtgaaactccatctcaaaaaaaaaaaaaaaaaatttttttttttttttttgctatatactcttagtttacatcctctcccccaatcttcacacacagagccaaagagcagttatattcttgggataccatgatacctctgggaaaggaattatattcccaaggagaggtcccattggataagaacaataccatgggacttgagtctgaatgccaacttactattcacacatccttcttaaaaacgaacacactgtttcttttcctgacctagagcattctaaagttctgttcaaataaataaagggcaaaataaagtagatttaaccaagtgccaggtggaattcaaaaaacacattcttccagataaattctacctttatggtatggatttgaaagtactttgcaggaaaacagtcagtactctttaaaaagggactgcagggctgggtgtagtggctcacacctgtaatcccagcactttgggaggccaaggcaggtgggtcacttgaggccaggagtttgagaccagcctgaccaacatggcaaaaccccatctctactaaaatacaaaaattagctgggcatgatggtgcactcctgtaatcccagctacttggtaggctgaagcatgagaattgcttaaacctgggaggcagaggttgcagtaagccaagatcatgccactgcactccagcctgggcaacagagtaagactctgtcttaataaataaataagaaaataaaacggaactgcagtgctaacagtaatttatacatttttaaatgttctgagtatgttttgactgggctagtgtaacaatatactaccctgaaagtgcagttttgattgttgttggtgtctttgggtcaggaaagtgaactgtgccaagaagtatttttcagtgacatgaatggattcctgttaatgcaattgactgagagattgtgcttacgctttcttaactgacaaaaagaggctttgtccaacatcagaattgttgaaactggtgctgttttctgttgcactgggattctgatgatctgggattttccctccttggcacagtaaacaccatgactgtctttattgagaatgtcgtcacagtcctttagtgatagattagttagacccatggttgcaatacctttatctccccaaagaaaataatcaaaagaaagcacaaaagctaccctgtttgcagaatatttcactgacattgatttgtcattaattctaccagagctgacctcattcaggcttgatagaaacaggttcctatgtttagggcagatccctagcctctcgctcacagtgagtctgcatgtcctagattctggttattgctggagcatccattaaagtctaccaaactcaggacagaagaagatagcagtggatttgtaaaaatttttagtttataaattacagtcattggggaaacactagtaaggtcatgtgatcttttggaccaggattttctctctgtcttctctctgggtgtgtgtgtgtgtgtatgtacagaagggctaccaggaagtgtcaaccatgttagattttctgtagtcttccagaaacagtgcagcccatacaacaggaatcttaattttcctcacagcaaatataacaggatggaacagttagtgttttgttttcacaagtgtccaccactccatctgccctgcatggagagggctctctcactgctagatctaggctgagccatctggaaggatcaaagggtgtgggagtatcaccccctctcaggctgcagaaggtctcgagggtggcgtcacagcaggatttccgccttctgcattgcactgcacagccccatggaacatgaggcacttgaggccttgcttcttggagcctctggggagcagagtaggtcactgccctctgggagtgttttgcagtagttttgtaaatgtgttgctacatagtcaagttcctttgtggcaaagaaatattttgttttgatattaggagccagcccatgtaatgcctctcaggcttgcttgcttagaagaaaaaagtcaccctttgtggtttttaagaaaaaaattctgtgcagatctgttcctcctcctgctccttcccttttctctacatacagtgctcattggaggctcctgctaaaccttcttaaccagagaaataataggtatttgttagacctgagtgtacatttcacatgttatccttcacatatttctcattttcatctagtactttcttaatgcctttgttggagtccgcatcctcatctttaaaaaaaaaaaaaaaaaaacagcttagcctaagccacattcactttttttagttcacaaaaaggatttaatagccacaatgtgatttttgccacaactgtgtgattttaatattctctaatatcaagggcggatttagaattgcaggaaatacctggagaaatcacagtggaatgaatttttgctttaagagaaatgagagttggctgtctctgtaattgataatacagcttcatcctagtcccatctgcatttcagaaaataaccctcatctttacaaaacacaggacacttgtgggacagttaactcaagcagctatggggagggaggagattattgaatggtgattaaataatgcaaatggctcttctgtttcttaaagactgtggaagaggtcagactgcccagttgaggtgggcagttcatactgctcagttgaggtggcagtcatttattctgagtcctgttggatagagcctatctcctcaaggctacagaggcttccaggatatggagctgtgcatgttaatggctcagccttgcctccatcagggcacctgcctaacttggagcaagtgggagagcaccctagagtcatcctctgtgctgtttcgtgagttttgcagcggagacttcaccatccggaggagctgtgtttctgtgtcacttgggatatcacctaaaaatgaaacatttgatattttaaggtataaaaaaaaagtaaattggggaacattggctgcagtccctaaaagatactgttgtctgtgcatcaggttagcttgaggtcaccacaggtcctgggagcccagagagtttaggcatactctcctttggaggccagcagcctttcacaaaccctgcctctaaaagggcggtttcacatttgaccatgtttttgcattagcctcagaaactcttgtctttagctgataacctttgagggatgtgagaagcctagttggagcatctgagaaaatgatacctctcaccttcaaattaatcaaatagtttgtccttctagtccccttataaattaataaatggagggctggtcatggtggctcacgcctgtaatcccagcactttgggaggccgaggcgggtggatcacaaggtcaggagttcaagaccagcctgaccaatatggtgaaaccccatctctactaaaaatacaaaaattagccaggtgtagtggcacgctcctgtagtcccagctactcgggaggctgaggcaggagaatcgcttgaacccaggaggtggatgttgcagtgagccgagatcccgccactgcactgcagcctaggcgacagagcaagactccgtctcaaaaaaaaaaaaaaaaaaaagaaaagggaagggaatcccattttgtgatgatttgggcacactacttgagctgaggctagcagtcacatgattttggctgtctctgacctgaagcttttgaagtaaggttatgtctcttccctgaagctttgtttatagtggtaatttggtgagtttgagctttgagcttgtcttagaaaataagactgtccacctggggaggggagcttatagggaacccgtgttaactcagaatgctgaagaaagtgcttttagccaacaaaagtaagattactatctagaaggtggaaagaagtcattgcttctgttcctccagcagtcagttgactctaggtttcctttggtttatatccccagttcttaatactaaaacttatttgacttcctatcaggaagcacacaaaaaaagcgtcatttaaaaccctggatataggctttaaaggatacaaaaacagcagcattgtcgttttgccaggttcatcaccattttgatgtgctacccatccttccaccctccctttcctgcccccaagcctcccagccaggccagatgtgaagattctattaatcactgtttcagagaacattaattcttgtatagaataattatctactaaattgcttattatctgtgactaccttgcagagaacatctcaacagtgcagtaaaatagctctcctagacttgagcttccagc

SEQ ID NO: 1146 - DNA, 187 bp, Homo sapiens
cacgcctgtaatcccagcactttgggagactgagatgggcggatcacgaggtcaggagatcgagaccatcctggctaacatggtgaaaccctgtctctactaaaaaatagaaaaaattagccgggcgtggtggcgggcacctgtagtcccagctacttgggaggctgaggtgggagaatcgcttgaa

SEQ ID NO: 1147 - DNA, 4515 bp, Homo sapiens
ctctttttcaaatgcgatttattgtacataaaataaattaattacagtttaagccaaagcatgagtggctttttaaagtgcatctgtggaggggatgtggcaggtagcccctgttcacttgctgtaagataagtgttttagtatttcagccacccttaggcacaactcagccaggcctaggaagcaacccaacgtcattgccatgaaccatttacacaagtcacaccaaaatcaactgacacatttttttcctgatggaacagttaaaaaaacaaaaaactatacagtcaaagtctggggttgaagagcgtgaagttcacagctcctccacacacgcccaactgagcatgctcatcctgtgagggggaaccagagccttcctgtaaaccatgagagcttaccaatgtctggtatacaaaatattctggcccataaactcaacctgtttttgaggggtaggggattttccatcttgtacataaagaaagaaatctgggtatccttcaggttagaaaggcattctgtaagaatagtgttccagagttacaaatcatactggtaagagaaaagcaattcttcctcttggggaaaaagaggaaaagaaagaagaaaagagaaaaaagaaaaaagggggaaaaaagaaagcctatcaatgcttaatctgttctttcattcccactgtaaatcacatcaatacatttggtgaaactgcaacggaccaccatttacaaggtagttgaatgcagaaaccgaaacgattatgccccctccccactctaaaggaaaagacacagagtacatttcacatattcagagagtggctcagtgggctctttcaagcctcatcaatcctgtccccctgctcagaacaacacttccttttctgtagcagttccacaggccctcttggcccttctgctccagccctttctggaaccaggaatcattgccaatattcaacgttcctgcactaggagaacctcaggccctcttcctgggaagaccaaacccccttgagtgctcctcctgcttcagacggaggtgacagtcctcactttggcagagagggcttgcttaaacctcctcttcaggtcctgcatgttgggtgacttgggcctgggaatgagggaggttcttcgcttctcgggtgtactgctaggctgctgtttgtgactgacctctttacagaggacgtggaaggcgctgtagacatcattataattttcactgacagacacttcatagaatgagcagcctagcatgctggctagctgcagtccaagctgagggtcaacctgtttgatgtgcaacaggtcagctttgttggccacgaccaccacaggcagccgggtgcccaggtgtagctgctgcacgtgctggtggagctggctgatgagttcatagctcttgtagtcagtgatggagaaaacgatcaccacagcatctgcccagcgaatgcacctattcagctgttcactgcagctcaggctgttctcatggacctgaaagagaggagtgatggcaaggtgaatgctggccagttgtacaaagagcctgggcttgggtagatttcaaattcaaaagagcccttcatagtagtgccaggttgagggccataaacaacttatatcccacacacttcagctttcttgacaatatgttgatccagctgcacagagtgggaataaataacagtgcagcttaccacactcaagtggaaaattgacctgcagagaactccatgcagagcgactttgtagttgcacaaaatgggaaattaactggctagacagtaagtctggggaagtaaagataggagctggaagcatttaaacctggataactgcccagttcaggaggcggggggaaaaaccctagcatggcgcttttgtctatagagcaactttccagtacaaaagcgattccaagtatttgcagactatacccagaagcttggtttttcatgccaaagacacacatattaaaactggacttttaaaccacagcaaggaaaacaccaattccaactgcattcggtttgggctttccggctgtgttgaatccttctaaaggaagatttctgccccctagccaaatctcccaaactaaaccatgctaagatcgaccaacagccagatacaattgaattgtcagacatgtaaaagtctagatgtgactccccaaatttctctgatcctgcagcatgaggaactttgagaagaagtgagtgattccacagccaagtaggttcccctttcacccagagtctcagagcttctcacctgaatacctggagtgtcttgaacctgaagagccagggtttcaccttctatctgaacttgtctagtatagagattacctatgaaggcaaataaaagagattatgttcttccttcttgtacaacttttaaaacattgtgagttttaagctagaaaaaaaatgcacaatgcataaatgcacacaaaacagcgatagtttatttctatttggtgggcttacttcagattttttttaaaaaacaacagcaattttaaccctatgttagatttattaaaaccagggcaaagtttgcaagtttttgaaaacttatttatctagttttaaacaaagtttccatttttagagtactcccttgatgcaaattatcttgctcagcctatgtgaggtttctgttttcttgagtacttgattcattctttgactgtaactttgtattttggccgttagatataatggcttgctagacaaatactgttagtaaacacacagccaatgttatcagttggaataaaaatgtgatataattataatcaactctacatcaaatcagaaggctgccatgtcttatcttgggatagcttatacagctcatttcaaataatcccctataggtactcatatggtctacagagttaagcaatttgctaacagagcataggcagaaagctcttaagcctccccagtggctattcttaatcataaggattgaaaaatgtgtcctctcatttattcgggaattctcctcctaaaattctaccatccagttgtttgtctttgttaagaaggaggaactttaggtttacaactgctctcctttggcctttgctttaaaaggtcacctctgaaaggcagccagcagagaaggagaggggtgggggaaggagctagggactccttttttttttttttacgacttttgcaggagtgttttgaagggagaggttcttgactacaaagggtgcttccaactggggtcactatagttaaaacataccaaggggaatactttcaggcacttgataaaatgatgaatgggcttggaatggaatgaggccagatggtagttatgggaggggggcgccatggagggctggggactggggaaagttttaagtggcgggatcctcaggctcggactgtcactgaaagaacctccctgggaagcgctggaaaatgggaaccgcagtcctcctgcaatgggacagaatttttctcaaatgcattgtctcacctgcatttctttcatagtcaccgatgaatcgtttggtgaggaaccggaccaccagtgctgcacgtcagaaaaaagaacgtcaaagtgttaaccttggaagttagattgttctccaccccaccccctgcctggaaaacagttctcccaaagaaagccatagatggccaccaagtgaaattcctaccctgtagctccttgacccttctttccagacaaaaaggagggggctagaaggcatcgtgaattatggctctgtgcagctggaaggctcactgggcccaccccctcctctgagcccggctgagccacacctaagccttccagtagacccatgtcttcctaaccttcaagacctcccaggggggctagcttcactaactcccctttctgtgccaggcattgccagaggctcaaacaccccaaagttctgatggcggcggtgccggtggtccccagaaagctgcctggccattcttgatccttgtttcccccgtctgtggaagcaggcgggtggcgtagacaacggctaagcccactcccaaggggcagcggctccctgcgcggggacggagagcggtcgggctgcagctcccaccgctccccacgccttgttcagcctcaactcccgtcaggggtcgtccaagaccagacccagggctaagcgcgacgactcaccggtcttgcccacgccgctggccccaccacggcgatcttgaccaggcggcggcggcggcgcccacacagcagtcggaggccgcggcgttgccggcgcggggtactcggcgatggtgcacatgttctgaatgaggcgcatcgcctcggctgcggcgcaccgcgggaagggactgagggactggagaatgctagcgctgcgcgggagcgggcgggaggacccgactgcggggctccgcggtaagaaataacaacaataaataagtgcaggtacgggcggggtggggccgagcgccgaggttccgcagggctcaggctccagacccagact

SEQ ID NO: 1148 - DNA, 8968 bp, Homo sapiens
ttgaaacaattagaaatattcctcatttagctgcaaatctaaagaaaatggtgagtattaatatagcaatcttcagttattttttactagaaacttagaggtgtgctctcccagtttagctttttaatagctaatattacgagctagttaatttttaaatcaagaagtattttcttggcctggcatggtagttcacacctgtaatccctgcactttgggaggccacaacgggtggatcacttgaggtcaggagttggagaccagcctggccaacatggtgaaactccatctctactgaaaatacaaaaattagctgggcatggtggtgcgtgcctgtaattccagctacccgggaggctgaggcaggagaactgcttgaacctgggaggcagaagttgcagtgagctgagatcgtgccagtgcactccatcctgggcgacagcaagactccatctcccattaaaaaaaaaaaaaaaaaagaagaagaagtgtttatttatttagaccttggatttaacattttcttttttatataatttttatttagaagccattttaaattattttattccaacatttaataaacatgtgttggcttcattgtgccgtggctatgctacatgtattgtgaaagatagatatgaccaatccctgccttcaaattctcaacgtttggtgagacagctgtaaaatatacattttctacttataggattatatttgcataataaatgcagcaaagaattacaaagagatgccatctattgagcatagaaaagggaggaattacttccagtttaggaggattctgagtaggatagggataggaagacttcaataaagtttttgttttgttttttaaatagagacgagttctcactatgttacctaggctggtttcgaactcctaagctcaagtgaggcacccgcctcggcctcttaaagtgctgagatcacaggcatgagccaccatgtccagctttgcaataaagatttatttaggtgttagcagtaagctgaatctttatttatttatttattttctgatatggagtttcactcttgttgcccaggctggagtgcaatggcacaatctcggctcagtgcaacctccgcctcttgggttcaagcgattctcctgcctcagcctcccaagtagctgggattacaggtgcccaccaccacacctggctaatagtttgtatttttagtagagacggggttttgccatgttggccaggctggtctccaactcctgacctcaggtgatccacctgcctcagcctcccaaagtgttgggattaaaggcctgagccaccgcacttgccaaagtaagctgaatcttaaggaataagtgaaattcggacatgcatcagaaagaatagtttggccaaaaggagcaatgtgaggaaagacataaaagtcaaagaacccagagagtatgggggaaaagtgatactccactttggctgatgcgtaaaggtattgaggagattagctcagggttagtttatgcagtgccttaaaaaccagactaataaccttagactttactgtctgagtattggggagccattgaatgtgtgtgtgtgtgtgtgtgtgtgtgtgtgtgtgtgtgtgtgtgttttctttttttagtgaagggtgcagaggagtgacttgattagaactgccttaatcatggagaaaatattggatagagcagactgagccttgctactcttgagtatgggcagagagtatcaacatcacttggaagcttgttataaatacaaaactacagacatcatgcaccctagaacttcagaatcagaatctacgttttaacaagttcctcaggtgattcctgtgcacattaaagtttgatcagctctggattagaagactaggcagagaaaccaaaggcagaaaaacctggagactaattaccgtcattcagataaaagatttaaagcataggaatacagaagataatttttatagattatggaggtcacatttttagaacttggctatgaattggacaagggacacatcaaaaataatgaagtttctagtctgggtgacttgaaggtgagtagtatcaagtgtgggttaaagaagttagtaagtgggctgggcgcaatggctcacacctgtaatcccagcactttgggaggctgaggtgggtggatcacgaggtgaggagatcacgaccatcctggctaacatggtgaaaccccgtctctactaaaaatacaaaaaattagctgggcgtggtggcacgtgcctgtagtcccacctacctgggaggatgaggcagaagaatcgcttgaacccaggagacggaggttgcagtgagctgagattgctccattgcactccagtctggcaacagagtgagacaccatctcaaaaaaaaaaaaaagaggttagtaagtatattttttgacacatcttgcacatgtagtaaatggtcaatcatttttgaactgtagttagactgagtttgagatattgaaggtacatccagatagagattaccagtagtcttaaatgtgggcctgaattttaggaaggaagttaggtttagcaatataaattgagggtcatctgcattgagtgattattgaagacaaaagagttgaactcacaaagagtaggtttgtactgtaagaagtgggaaagcacagttttaaggagcttttgaagtaaggggctggaaaaagatcatgtgttaacctttggtatcagttactgatgatataatgaattaataagagacataatttctcctgtttcccttttcaaatgttacagaaccaggctttagcaaagatggatatattggtgactgagacagaagaactggcagagaatatactcaagtggcgtaaacaacaaaacgaagtttcgtcttgtatccccaaaatattagctgaagaaagttatctttataaacatgatattataatgcctcctttaccttttacttctaaagttcatgtccaaactattaatgccaagtagtcatcaactttatttttgcttaattatgtgtagtcatatgaagtctatttctagttgactgtaacatgggtattaatagtctttgctgctggtaatactgaaagaacctgctttatattggagtatcaagatctcaggttcattaagaccaaactgacttttcctttgtttttcatatatttttattctacctttcagtaaaactagagaagctaaaaaatagccatgacaatttattaatataagtgaattaaccatttctcaggtgggaaattctctttttttaaaaatgtgtgtttatcgtctggtgtggtggctcacacctgtaatcctaacacttggggaggctgaggcgggcagatcacttaaacccaggagttcaagaccagcctgggtaacatggtgaaatcccatatctacaaaataaacaaaaaattagccgaccatggtggtgcatgcctgtagtcccagctattcgggaggctgaggtaagaggatcacctaagcctgtgaggtcatggttgcaatgagtcatgatcacgccactgcgctacagcctgggcgacacagtaagaccctgtctcaaaaaaaagaagtgtgtttctggccaggcacggtggctcacgcctgtaatcccagcactttgggaggcctaggtgggcagatcatgaggtcaggagttcgagaccagcctggccaacatggcgaaacacctgtctctactaaaaatacaaaaattaggccgggcgcagtggctcacacctgtaatcccaacactttgggaggccgacccagatgggtggatcacctgaggtcaggagtttgagaccagccttgacaacatggtgaaaccccatctctggtagaaatataaaaaattaaccgggcatggtggtggacgcctgtaatcccagctacttgggaggctgaggcagaataatcgcttgaacccaggaggcagaggttgcagtaagccaagatcgtgcctctgcactccaacctgggtgatggagcaagactccatctccaaaaaaataaaaaatacaaaaattagccaggcatggtagcatgtgcctgtaatcccagctactcaggaggctgaggcaggagaatcacttgaacccaggaggcagaggttgcagtgagcccagatcgtgccaccgcactctagcctgggcaacagagcaagactctgtcttaaaaaaaaaaaaaaaaggtgtttctgaattagaagggtcttcttgaatctgaaaatgtctatgatgattattcctgtgggaatgtcactaagtatgcagaaaagagtaacacagccagcctgacttatcctttgaaaggcctgattataaggtttgtcctcagctgttgcatctgggaacttagatatcagaaggtatcttagtctgttctgctgtcataacagaattacacaaactaagtattttataatgaacagaagtttatttggttgacaggtgtggaggctaggcagtccaagaacatggtgccagcatctagtgagggtcttgccatggcagaaggcaccacatggcaagtgagcatgagaaagatatatgggtctaaacttagccttttatcatgagcccactcccaagatagcagcactaattcattaatgagggcaaagccctccttacctaattactttttaaaggtctcataacacttttacaatgtcaattaaatttccaacacttgaactttgggggacatatttaaaccttaacaggagggctccactcactgaaaagagtcgttcatggtagctaacctgtggtttgtgctgaaaacctgctttcttcctgggagtctagaattttggtacatggtaggtagaaggtacctacgtgaccagcccccagtaaaaaccctgggcactgtatctctaacaagtttccctggtaaacaacatttctcacatgttgtcacaattcagttgctggtggaatgaaacaacagatatgtgtgactccactgttagaggactctggaagcttatacctggtttcccccagactttgcctctgtaccttttctctttgctgttttgcttcatatgcttttgctgtaataaatcatagctgtgtgatgatatgctgagtcttgtgaattctcctagcaaatcatggaacctggaggtagtcttggagaccctggcatacaaagcagttcctaagtgtttactggtagctgtaggaataggcaaagaagaaacagcaaagaaaaaggcacactgtggtataactttggaggtttaccttgcaaaatgctcagatattttacctatcagaggttattgtgcatataatagagagtgatatactaacaactgcctcaggatatactctttttaatcagtattgtaactaaccttggcttattttacttttagacttggggttctattttgctttaaaacatgtacatcagttttgttttttgttttgttcttttctttcctttttttttttttttttttaaagacaggatctcactctgtcacccaggttgctgagagtgtggtgtggcccaatcttgacctcactgcagccttgacctctcaggctcaagtgatcctcccacctcagcctcccaagtagctgggactataggcacgcgccaccacgcctggctaatttttgtattttctgtagagacagagttttgccatgttgttgaggctggtcttgaactcctgggttcaaacgaccctcccgcctcagcctccgaaagtgctgggagtacaggtgttagccactgcgcctggcctcattgtactccttaacacaagaagacttcaacaatgataagtagttgtttataaggaagcaggatcattaccaaaataaatcctgctaaaacaacaggaatcatgttttaaagcctagtttgctaatttttgctagtaggataagagtgatcgtaatatctcgaacattacatagacacttaaaacctttagttgtatttcatcaaaaatctgttcataccccacgttggtttcaaaacatactatgctttttcttcgtgttatttcctatattcatttttgtgtgtatgtgtatgtcacaaatattgatatgcctggttgtttatttttgttttctattatgcctttttcaaaatataaaaataaacttgtaatttctaactaaaattttttagtcctagtctgaatttaaagtgatagaaaggactgatgcactgtttaacttatacagtataggcatataggctctcagaatcaaaagagcttgaggtaagttaagcctgaggtctacttcaaagagaaagctaatttaatactcttccagagtcaatcagtgctgattaatttttctttaattattcaacttttagatgtgtggatattaaaaaaaaattagctctgcatgcctttttttgttgttgttgttgttcttgttttttagatggtcttgctctcacccaggctggagtgcagtggcacaatcatagcccactgcactctgaacctcctgggctcaatggatccttccacctcagcctcccaagtagctgggactacaactgtgccccaccacacccagctaacttttaaatttttttgttgagatgaggtctcgtcgtgttgcccaggctggtcttgaactcctgggttcaagcaatcttggcctcccaaagtgctgggattacaggtgttagccccttgcacctagcctgaatgtctgtgtttcctacttacactagaagaggtgtgtgagatttgcaaatttattgccagcataacagtgatgccagtttgtgaagaccattctggaggaattgagatgctgcctggttttcctagcatttttcttattttctttctttctctatgtgactctaccagtctgacccctgatttatcctctgaaaccctcaatgaagtcaggaacagtctgaggaatagcagaacctaaaagatttcttgacatgcaaaatctataatagagttgagattttaataagactgtaattagtgtattgtgggatttcttcacatatctgtaaaacacatgaatttacataaaagatttatctcacaatttggggaatccactaattgagtttactaaaaaaattatgcattagacccttgaacaatataagcttgaagtgcatatgcaattttttttttttttttgagacagggtctcactgtcaccaggctggagtgcagtagtgtcatctcagctcactgcaacctccgcctcctgggtttgagcaattctcctgcctcggcctcccaagtagctgggattacaggtgcacaccaccatgcccggctaatttttgtatttttagtagagacagggtttcaccatgttggccaggatggtctcgatcttttgacctcgtgatccacccacctcggcctcccaaaatgctgggattacaggagtgagccacagtgcccagccacaatttttttttcaataaatatattggaaatttggagctttgtgacaacttgaaaaattcacaggtcaggcacagtggctcacgcctgtaatccagcactttggaggcggaggcgggtggatcacctgaggctgggagttcaagaccagcctgagcaacatggagaaaccccgtctctactaaaattacaaaattaaccaggaatggtggcacatgcctgtaatcccagctgcttgggaggctgaggcaggagaattgtttgaacgcgggaggcggaggttgcagtgagctgagatggtgccattgcactccagcctgggcaacaaaagcaaaactctgtctcaaaaaaaaaaaaagaaaaagaaaaattcacagatgaactgtgtggcctacagatatcttgaatgcaaaaaatatatatagatacaagtctatcatttactaccacaaaacacacaaatcaattaaaagttaaattttatgaaaacacagactgtacgtgtaagcaaatttaaaatgcagtattaaatcataactctatagccgccactgtccggccacagccccacactcttcactgtcgctcgtcatctcgcacagggtggctccagttgtggtgtttggcgccagaattaaaccaccaccatgtcgagcaaaaaggcaaagacgaagaccaccaagaaatgccctcagtgcacaatatccaatgtgtttgccatgtttgaccagtcacagattcaggagttcaaagaggccttcaacatgattgattagaacagagatggtttcatcaacaaggaagatttgcatgatatgcttgcttctctagggaagaatcccactgatgcataccttgatgccacgatgaatgaggcaccagggcccattaatttcactatgtttggtgagaagttaaatggcacagatcctgaagatgtcatcagaaatgcttctgcttgctttgatgaagaagcaacaggcaccattcaggaagattacctgagagagctgatgacaaccatgggggatcagtttacagatgaggaagtggatgagctgcacagagaagcacctattgacaaaaagggaaatttcaattacatcgagttcacaagcatcctgaaacatggagtaaaagacaaagatgactgaaaagaactttagctaaaaccttccaattacattgtcttactctgttttatttctcacacacttcccccaccctcatagaacctgttgcatgcaacttagtttcacagctttgcctttttttaaaaatgtatttattccagacctttctgccacttagcacttgtataatcagactggaaatggtgatgacgccataaattgtattgaaaaagagatcgccaataaaaatcaacaaatgtgaaagcccccccaaaaacataactctataaactagtacgtactgtactactgtaattttgtaactgcctcctgttttagtgagtcaagtgttgccagcatctgc

SEQ ID NO: 1149 - DNA, 955 bp, Homo sapiens
gcatggtgtctgatagtggctcaatttcagtttttttttaaattgtttccgaggcgtgtttcaaatatttgactttttcccactggtctgaatagtgcttctcagatacggcaagtctctaggtttgcatgagtcagcctctgtgccctctgttcttttccccgatgttctttttgcttcttcttatgctattaccacactgtcttaattactatattttattaacaaatctcactttctggtagaccatttccttcacctacttcttcactttccttcaggaatgtcttggatatttgtaactcttttccttatgatttagcatcagcttgacaagtttaataaaccttgttaggactgagataaaattagaaagattggacatctttaaggtactgagttctcctagccaggaatgtggcacgtttccctatttctttagggaattgtaaaatgtctttttataacgttttataattttccccatagagatctttaaaatattttgttagatttattcctagcaccttatatattttgttactcttgtaaaaagtatccttttttttttttttttttttagaaacggagtctcgctctgtcgcccaggctggagtgcagtggcacgatcttggctcactgcaagctccgcctcccgggttcacgccattctcctgcctcagcctcccgagtagctgggactgcaggcacctgccaccacgcccggctaatttttgtatttttagtagtagagacggggtttcaccgcgttagccaggatgttctcgatctcctgacctcgtgatccgcccgcctcggcctcccaaagtgctgggattacaggtgtgagccaccgcgcccggccagtatccatttttaaaaactacattttctctttgttgcttgggtagagaaataaaatcaatttttaatttatcttatatctgatcatttt

SEQ ID NO: 1150 - DNA, 479 bp, Homo sapiens
aaagaaagtggaagatagtaacagagaaagtggaaaaaaggacgagaagggatagacatgcaaaactccagcattccaaagttaagggaaagagaataaccatgttgtgcctataaccctagaagattacaaaaattatttctagcaaattgacaacccttctttctgaaggtagctttgggcaaaaaggtgctgttttgagcttttaccctgaatcacctggggtgcacttgaaaagaagccattttgccaatgcattaaaagtgtctgagtgaaagctgccacttgattgtcctaagaggcttttaaccccagccacataattatttcataacaaacaatcaggaacatttctcttcctcatcagtttcccagactacctcatagcacatgcatgatacaatgtgtgattttgcagccttccatgtaacatcggagtcctaaagagatggacttgaagaggctcatggtgattttaa

SEQ ID NO: 1151 - DNA, 13191 bp, Homo sapiens; identical to SEQ ID NO: 1019

SEQ ID NO: 1152 - DNA, 1316 bp, Homo sapiens; identical to SEQ ID NO: 1020

SEQ ID NO: 1153 - DNA, 309 bp, Homo sapiens; identical to SEQ ID NO: 1021

SEQ ID NO: 1154 - DNA, 565 bp, Homo sapiens
gtgaggaataaatagggaaaggggaaaaactggaagggggaatcattaggacccagctgcacagacatttgcagctaaaggagtggagatccagacgatctccgtgggactgggagcagctgtgtttaggattgacactgggggaacaggcagagggaagcatggtcttggcattggcagttttcacattgttggcttctgtctgttgccagcttcattctcattctttctatccttgtatgtcctgtttttactcttcattgtcattttagtgggtttccaggaggcagcagtgataaactgcatgcgtttagtatgccatgttttcctggagatcccactgactttactttcagtaacagtggttttcatttgccaactctggtgtttccccaccatgcaggtaagatagttaggctctaaacctattgaaatctggggttttcattttcatagggcacttatttatccttattcatatatgggaagtttatctctctgtgccaataggcagagtttttggctcatttttatggagtttttagctataagagagaacttgctt

SEQ ID NO: 1155 - DNA, 902 bp, Homo sapiens
gtgaggaataaatagggaaaggggaaaaactggaagggggaatcattaggacccagctgcacagacatttgcagctaaaggagtggagatccagacgatctccgtgggactgggagcagctgtgtttaggattgacactgggggaacaggcagagggaagcatggtcttggcattggcagttttcacattgttggcttctgtctgttgccagcttcattctcattctttctatccttgtatgtcctgtttttactcttcattgtcattttagtgggtttccaggaggcagcagtgataaactgcatgcgtttagtatgccatgttttcctggagatcccactgactttactttcagtaacagtggttttcatttgccaactctggtgtttccccaccatgcaggtaagatagataggctctaaacctattgaaatctggggttttcattttcatagggcacttatttatccttattcatatatgggaagtttatctctctgtgccaataggcagagtttttggtctcatttttatggagtttttagctctgtgagagaacttgctttatacaggggtttcacttcaaaatttctgcctcggccgggcgtggtggctcacgcctgtaatcccagcactttgggaggcccaggcggacggattatgaggtcaggagatcgagaccatcctggctaacacggtgaaaccctgtctctactaaaaaatatgaaaaaattagccgggcttggaggtgggcgcctgtaatcccagctactgagaaggcggaggcaggagaatggcgtgaacccgggaggcggagcttgcagtgagccaagactgcgccactgcactccagcctggacgacagagcaagactccgtctcaaaaaaaaaaaaaaaaaaaa

SEQ ID NO: 1156 - DNA, 686 bp, Homo sapiens
  misc_feature (95)..(95): n equals a,t,g, or c
caccaaggccagtttggaagcgaacggctaccccgaaattaagatactacagcgtgagttatgagaaagcgccacgcttcccgagggaagaaagncgggacagttatccggtagccggcagggtcgaaccagaagagcgcacgaggagcttccaaggggaaaacgcctggtatctttatagtcctgtcgggtttcgccacctctgacttgagcgtcgatttttgtgatgctcgtcaggggggcggagcctatggaaaaacgccagcaacgcggcctttttacggttcttggccttttgctggccttttgctcacatgttctttcctgcgttatcccctgattctgtggataaccgtattaccgcctttgagtgagctgataccgctcgccgcagccgaacgaccgagcgcagcgagtcagtgagcgaggaagcggaagagcgcccaatacgcaaaccgcctctccccgcgcgttggccgattcattaatgcagctggcacgacaggtttcccgactggaaagcgggcagtgagcgcaacgcaattaatgtgagttagctcactcattaggcaccccaggctttacactttatgcttccggctcgtatgttgtgtggaattgtgagcggataacaatttcacacaggaaacagctatgaccatgattacgaattcgagctcggtacc

SEQ ID NO: 1157 - DNA, 1796 bp, Homo sapiens
attcaacatttccgtgtcgcccttattcccttttttgcggcattttgccttcctgtttttgctcacccagaaacgctggtgaaagtaaaagatgctgaagatcagttgggtgcacgagtgggttacatcgaactggatctcaacagcggtaagatccttgagagttttcgccccgaagaacgttttccaatgatgagcacttttaaagttctgctatgtggcgcggtattatcccgtattgacgccgggcaagagcaactcggtcgccgcatacactattctcagaatgacttggttgagtactcaccagtcacagaaaagcatcttacggatggcatgacagtaagagaattatgcagtgctgccataaccatgagtgataacactgcggccaacttacttctgacaacgatcggaggaccgaaggagctaaccgcttttttgcacaacatgggggatcatgtaactcgccttgatcgttgggaaccggagctgaatgaagccataccaaacgacgagcgtgacaccacgatgcctgtagcaatggcaacaacgttgcgcaaactattaactggcgaactacttactctagcttcccggcaacaattaatagactggatggaggcggataaagttgcaggaccacttctgcgctcggcccttccggctggctggtttattgctgataaatctggagccggtgagcgtgggtctcgcggtatcattgcagcactggggccagatggtaagccctcccgtatcgtagttatctacacgacggggagtcaggcaactatggatgaacgaaatagacagatcgctgagataggtgcctcactgattaagcattggtaactgtcagaccaagtttactcatatatactttagattgatttaaaacttcatttttaatttaaaaggatctaggtgaagatcctttttgataatctcatgaccaaaatcccttaacgtgagttttcgttccactgagcgtcagaccccgtagaaaagatcaaaggatcttcttgagatcctttttttctgcgcgtaatctgctgcttgcaaacaaaaaaaccaccgctaccagcggtggtttgtttgccggatcaagagctaccaactctttttccgaaggtaactggcttcagcagagcgcagataccaaatactgtccttctagtgtagccgtagttaggccaccacttcaagaactctgtagcaccgcctacatacctcgctctgctaatcctgttaccagtggctgctgccagtggcgataagtcgtgtcttaccgggttggactcaagacgatagttaccggataaggcgcagcggtcgggctgaacggggggttcgtgcacacagcccagcttggagcgaacgacctacaccgaactgagatacctacagcgtgagctatgagaaagcgccacgcttcccgaagggagaaaggcggacaggtatccggtaagcggcagggtcggaacaggagagcgcacgagggagcttccagggggaaacgcctggtatctttatagtcctgtcgggtttcgccacctctgacttgagcgtcgatttttgtgatgctcgtcaggggggcggagcctatggaaaaacgccagcaacgcggcctttttacggttcctggccttttgctggccttttgctcacatgttctttcctgcgttatcccctgattctgtggataaccgtattaccgcctttgagtgagctgataccgctcgccgcagccgaacgaccgagcgcagcgagtcagtgagcgaggaagcggaaga

SEQ ID NO: 1158 - DNA, 912 bp, Homo sapiens
tactcatatatactttagattgatttaaaacttcatttttaatttaaaaggatctaggtgaagatcctttttgataatctcatgaccaaaatcccttaacgtgagtttcgttccactgagcgtcagaccccgtagaaaagatcaaaggatcttcttgagatcctttttttctgcgcgtaatctgctgcttgcaaacaaaaaaaccaccgctaccagcggtggtttgtttgccggatcaagagctaccaactctttttccgaaggtaactggcttcagcagagcgcagataccaaatactgtccttctagtgtagccgtagttaggccaccacttcaagaactctgtagcaccgcctacatacctcgctctgctaatcctgttgccagtggctgctgccagtggcgataagtcgtgtcttaccgggttggactcaagacgatagttaccggataatgcgcagcggtcgggctgaacggtgggttcttgcacacagcccagcttggagcgaacgacgtacaccgaactgagaatacatacagcgtgagctatgagaaagcgccacgcttcccgaagggagaaaggcggacaggtatccggtaagcggcagggtcggaacaggagagcgcacgagggagcttccagggggatacgcctggtatttttatagtcctgtcgggtttcgccacctctgacttgagcgtcgatttttgtgatgctcgtcaggggggcggagcctatggaaaaacgccagctacgcggcctttttacggttcctggccttttgctggccttttgctcacatgttctttcctgcgttatcccctgattctgtggataaccgtattaccgcctttgagtgagctgataccgctcgccgcagccgaacgaccgagcgcagcgagtcagtgagc

SEQ ID NO: 1159 - DNA, 706 bp, Homo sapiens
cagcggtggtttgtttgccggatcaagaactaccaactctttttccgaaggtaactggcttcagcagagcgcagataccaaatactgttcttctagtgtagccgtagttaggccaccacttcaagaactctgtagcaccgcctacatacctcgctctgctaatcctgttaccagtggctgctgccagtggcgataagtcgtgtcttaccgggttggactcaagacgatagttaccggataaggcgcagcggtcgggctgaacggggggttcgtgcacacagcccagcttggagcgaacgacctacaccgaactgagatacctacagcgtgagctatgagaaagcgccacgcttcccgaagggagaaaggcggacaggtatccggtaagcggcagggtcggaacaggagagcgcacgagggagcttccagggggaaacgcctggtatctttatagtcctgtcgggtttcgccacctctgacttgagcgtcgatttttgtgatgctcgtcaggggggcggagcctatggaaaaacgccagcaacgcggcctttttacggttcctggccttttgctggccttttgctcacatgttctttcctgcgttatcccctgattctgtggataaccgtattaccgcctttgagtgagctgataccgctcgccgcagccgaacgaccgagcgcagcgagtcagtgagcgaggaagc

SEQ ID NO: 1160 - DNA, 631 bp, Homo sapiens
ccccacttcaagaactttgaagcgccgcctacatactcgctttgatatcttgtaccagtgctgctgcaggtggccaattaagtcgtgtctttaccgggttggactcaagcgaatagtttccggataaggcgcagcggtcgggctgaacggggggttcgtgcacacagcccagtttggagcgaacgacctacaccgaactgagatacctacagcgtgagctatgagaaagcgccacgcttcccgaagggagaaaggcggacaggtatccggtaagcggcagggtcggaacaggagagcgcacgagggagcttccagggggaaacgcctggtatctttatagtcctgtcgggtttcgccacctctgacttgagcgtcgatttttgtgatgctcgtcaggggggcggagcctatggaaaaacgccagcaacgcggcctttttacggttcctggccttttgctggccttttgctcacatgttctttcctgcgttatcccctgattctgtggataaccgtattaccgcctttgagtgagctgataccgctcgccgcagccgaacgaccgagcgcagcgagtcagtgagcgaggaagcggaagagcgcccaatacgcaaacagcctctcgccgcgcg

SEQ ID NO: 1161 - DNA, 87 bp, Homo sapiens
ctggggccagatggtaagccctcccgtatcgtagttatctacacgacggggagtcaggcaactatggatgaacgaaatagacagatc

SEQ ID NO: 1162 - DNA, 2017 bp, Homo sapiens
gattttactgtttaatagtacaaaatttttgcaaaattagcagataatactcatcatttctaacttctgaaatcttttgtttaggtgagacatggaatccattaaaattgcattatcagttaagaaatgtacgggaacgattagctaaaaacctggtggaaaagggtgtattgacaacagagaaacagaacttcctactttttgacatgacaacacatcccctcaccaataacaacattaagcagcgcctcatcaagaaagtacaggaagccgttcttgacaaatgggtgaatgaccctcaccgcatggacaggcgcttgctggccctcatttacctggctcatgcctcggacgtcctggagaatgcttttgctcctcttctggacgagcagtatgatttggctaccaagagagtgcggcagcttctcgacttagaccctgaagtggaatgtctgaaggccaacaccaatgaggttctgtgggcggtggtggcggcgttcaccaagtaactctgctcggggtgaaccattctcctttctctcaagtaaaccagtagtttttcttctgttgacttctggttttctgtaatttgtactttcccacactataattggcttctgttttacaaaatggtgggtggctttttcttttttgtacgtgtacaggattctgctggtacgagaggccttcctctttctgtttttaaaaaaagttttactgccatattggcattccattccctgttgccatcctcactgttacctgttttgggtttctggtctactttgactttcaaagtacctccagcctcctcatacgcacagcttttggatgacctcagcttgagtttctccatatgtgcatgtacatctagcattctgcctacagttcagacagaagtcacaaaaaggccttcaactcaccaaaggtaaatatctgtatctattaggacattttttacatagacttcagttgagatgtatacttagcaaaattatttttaaattgaaacagcacagtaaatacttaatataaaatgtcccttggattttgcttcccatgtaaatctattgtattattacacttgttataattttaactataaaggtccaattgtttcacagagccagtttgggatgggctgcattccatttatgctgtatatagtttgaattatatataaattaccccttcttctggccacccctgctcccatcttagtattttgcaagatctaatcagttgtacacctggtgcccctcgcttgcttcaatcatggttatttgatggcaaaatcgacctcttgtcgctgaaggagagagaaaagatgtgtgtctgattggtcctgggattttttgagctgtgccatttatggtactctttgcctatgcatcccctttttagattttttttaaattttatcttactgtttttataatttctattgggaagaggcttgtgaccagtaccaatcttgagtttctttttctgtccacaagtaaattaatatctgctctgaaatgtcatttatctactcacacattcttggggaaaaaaatcaaatgtcagtcctagcagatgttgcatgtaaattggtagcaagtaatgattacaacccagaggattaagaattttgtaacagaaagctctatgttttaattttttatatacaattaggataattagcattgtcagactataaacctttgctttttaaagtttatttttactatttctttatcactttattgtatcatcaccattggtttcataatgtaaatactatatgttgaacaaattaaatgtcaaaattttttattaccatagtccatgttaatagtggggctttcaggtgtttagagattttttttgttgttgttaacattcattgcaaaagtactagatggtgtataactctagagttgaattttaagggattccctaatatgtatactatctttttatctgaagtaataaataaacaatgatcttgaaagtgcctgaatcagagcaagca

SEQ ID NO: 1163 - DNA, 2017 bp, Homo sapiens
gattttactgtttaatagtacaaaatttttgcaaaattagcagataatactcatcatttctaacttctgaaatcttttgtttaggtgagacatggaatccattaaaattgcattatcagttaagaaatgtacgggaacgattagctaaaaacctggtggaaaagggtgtattgacaacagagaaacagaacttcctactttttgacatgacaacacatcccctcaccaataacaacattaagcagcgcctcatcaagaaagtacaggaagccgttcttgacaaatgggtgaatgaccctcaccgcatggacaggcgcttgctggccctcatttacctggctcatgcctcggacgtcctggagaatgcttttgctcctcttctggacgagcagtatgatttggctaccaagagagtgcggcagcttctcgacttagaccctgaagtggaatgtctgaaggccaacaccaatgaggttctgtgggcggtggtggcggcgttcaccaagtaactctgctcggggtgaaccattctcctttctctcaagtaaaccagtagtttttcttctgttgacttctggttttctgtaatttgtactttcccacactataattggcttctgttttacaaaatggtgggtggctttttcttttttgtacgtgtacaggattctgctggtacgagaggccttcctctttctgtttttaaaaaaagttttactgccatattggcattccattccctgttgccatcctcactgttacctgttttgggtttctggtctactttgactttcaaagtacctccagcctcctcatacgcacagcttttggatgacctcagcttgagtttctccatatgtgcatgtacatctagcattctgcctacagttcagacagaagtcacaaaaaggccttcaactcaccaaaggtaaatatctgtatctattaggacattttttacatagacttcagttgagatgtatacttagcaaaattatttttaaattgaaacagcacagtaaatacttaatataaaatgtcccttggattttgcttcccatgtaaatctattgtattattacacttgttataattttaactataattgtccaattgtttcacagagccagtttgggatgggctgcattccatttatgctgtatatagtttgaattatatataaattaccccttcttctggccacccctgctcccatcttagtattttgcaagatctaatcagttgtacacctggtgcccctcgcttgcttcaatcatggttatttgatggcaaaatcgacctcttgtcgctgaaggagagagaaaagatgtgtgtctgattggtcctgggattttttgagctgtgccatttatggtactctttgcctatgcatccccttgttagattttttttaaattttatcttactgtttttataatttctattgggaagaggcttgtgaccagtaccaatcttgagtttctttttctgtccacaagtaaattaatatctgctctgaaatgtcatttatctactcacacattcttggggaaaaaaatcaaatgtcagtcctagcagatgttgcatgtaaattggtagcaagtaatgattacaacccagaggattaagaattttgtaacagaaagctctatgttttaattttttatatacaattaggataattagcattgtcagactataaacctttgctttttaaagtttatttttactatttctttatcactttattgtatcatcaccattggtttcataatgtaaatactatatgttgaacaaattaaatgtcaaaattttttattaccatagtccatgttaatagtggggctttcaggtgtttagagattttttttgttgttgttaacattcattgcaaaagtactagatggtgtataactctagagttgaattttaagggattccctaatatgtatactatctttttatctgaagtaataaataaacaatgatcttgaaagtgcctgaatcagagcaagca

SEQ ID NO: 1164 - DNA, 2017 bp, Homo sapiens; identical to SEQ ID NO: 1162

SEQ ID NO: 1165 - DNA, 1584 bp, Homo sapiens
caagagaaaattttataattatgataggactcctagctcttataagaagtggcctttataatgccacctttagtacttttcagcattctacaggtggacaattcaagaactatatttgtaaaataatgttttaaagagagccaacggtaaaggcaggaaatcactcaaaacattttgtatgttccagagactactcaaatattaatcctgttttcaggagtaacttcgtaggcgtggaaaagatttttgtttatttagaccaattcattatttattaacttcattcaataaatagttacattgtacctactacatgccaggcactatgttagtgagtttgttcactcagtcagccagctctgtaacatggaaagaaatgggaacaatttcacctatctcatagccacctgaaatagctcagcatagatagttttctgttcatttgcttctcaggctgttccctcactcactcattcactcattcatttgcttattcatcaagtacccattgagggcattctgggtgctgaaccctgtgctgggtaggcactgtgcgggtgtgagttgtgttctgaagggtgaaggctgaggatcttgagagcccagaggagggatccagcccgacccgagggaccaggaagagtggtctggaaccagcaccctttggacctaggctagaggccgagcaggaaccattgaggagagaggcaggaggtcagtggcccaggcgggaaccctcacacccaagccccaacatttttattttgttttgggaaatgtataggattaaagtaataactggaaaggaaataaatggaaacacggaatggaaacatttcctattttccctattgttatctgaagacaaacttaatttttatgttgctactttctctcttaaatatcctcttactaaatagtctgtcgtattaattagactgggtagtcctaactcaagaaagcatttggcaattaaaagatggaggactcagggtctgaccgttttccttggccttcatttggctttctctctcttttctcccctccttcttcccaggcctggctggctggtgcctggacaccatttggggctctgagagggttgtggctgccagcccccagtcgccaatgcctggtcaggcactcgtatcccctgtcctgttcaccatttctcctttctcattgttctcataatttgtcctgcttaaaactcctaggttctaagggacacccctgcattgcttgcctttcctttgctagacaccagagagaggctaaaaagtgaaatgtggcctggtgcagtggctcatgcctgtaatcccaacactttgggaggccaaggcaggcagatcacttgaggtcaggagttcaaggccagcttggacaacacgacggaatcctgtctctactaaaaatacagaaattagccaggcatgatgacccatgcctgtagtcccaactacttgggaggtaggaggatggcttgagcccgggaggtcaaggctgcagtgagctgagattgtaccactgtactccagtctgggtgacaaagcaagaccctgtctcaaaaaaaaaaaaaaaaaa

SEQ ID NO: 1166 - DNA, 1876 bp, Homo sapiens
caagagaaaattttataattatgataggactcctagctcttataagaagtggcctttataatgccacctttagtacttttcagcattctacaggtggacaattcaagaactatatttgtaaaataatgttttaaagagagccaacggtaaaggcaggaaatcactcaaaacattttgtatgttccagagactactcaaatattaatcctgttttcaggagtaacttcgtaggcgtggaaaagatttttgtttatttagaccaattcattatttattaacttcattcaataaatagttacattgtacctactacatgccaggcactatgttagtgagtttgttcactcagtcagccagctctgtaacatggaaagaaatgggaacaatttcacctatctcatagccacctgaaatagctcagcatagatagttttctgttcatttgcttctcaggctgttccctcactcactcattcactcattcatttgcttattcatcaagtacccattgagggcattctgggtgctgaaccctgtgctgggtaggcactgtgcgggtgtgagttgtgttctgaagggtgaaggctgaggatcttgagagcccagaggagggatccagcccgacccgagggaccaggaagagtggtctggaaccagcaccctttggacctaggctagaggccgagcaggaaccattgaggagagaggcaggaggtcagtggcccaggcgggaaccctcacacccaagccccaacatttttattttgttttgggaaatgtataggattaaagtaataactggaaaggaaataaatggaaacacggaatggaaacatttcctattttccctattgttatctgaagacaaacttaatttttatgttgctactttctctcttaaatatcctcttactaaatagtctgtcgtattaattagactgggtagtcctaactcaagaaagcatttggcaattaaaagatggaggactcagggtctgaccgttttccttggccttcatttggctttctctctcttttctcccctccttcttcccaggcctggctggctggtgcctggacaccatttggggctctgagagggttgtggctgccagcccccagtcgccaatgcctggtcaggcactcgtatcccctgtcctgttcaccatttctcctttctcattgttctcataatttgtcctgcttaaaactcctaggttctaagggacacccctgcattgcttgcctttcctttgctagacaccagagagaggctaaaaagtgaaatgtggcctggtgcagtggctcatgcctgtaatcccaacactttgggaggccaaggcaggcagatcacttgaggtcaggagttcaaggccagcttggacaacacgacggaatcctgtctctactaaaaatacagaaattagccaggcatgatgacccatgcctgtagtcccaactacttgggaggtaggaggatggcttgagcccgggaggtcaaggctgcagtgagctgagattgtaccactgtactccagtctgggtgacaaagcaagaccctgtctcaaaaaaaaaaaaaaaaaaaaaaagtgggccaggcacagtggctcatgcctgtaatcccagccctttgggaggctgaggagggtggatcacctgaggtcaggagttcgagaccagcctgacctacatagtgaaatcctgtctctactgaaaatacacagttagctgggtgtggtggcgggtgccttgtaatcccagctattcaggaggttgaggcaggagaattgcttgaacccgggatgcgaaagttgcagtgagctgagatcatgccattgcactctagcctgggcaacaagagcaaaactccatctca

SEQ ID NO: 1167 - DNA, 1876 bp, Homo sapiens
caagagaaaattttataattatgataggactcctagctcttataagaagtggcctttataatgccacctttagtacttttcagcattctacaggtggacaattcaagaactatatttgtaaaataatgttttaaagagagccaacggtaaaggcaggaaatcactcaaaacattttgtatgttccagagactactcaaatattaatcctgttttcaggagtaacttcgtaggcgtggaaaagatttttgtttatttagaccaattcattatttattaacttcattcaataaatagttacattgtacctactacatgccaggcactatgttagtgagtttgttcactcagtcagccagctctgtaacatggaaagaaatgggaacaatttcacctatctcatagccacctgaaatagctcagcatagatagttttctgttcatttgcttctcaggctgttccctcactcactcattcactcattcatttgcttattcatcaagtacccattgagggcattctgggtgctgaaccctgtgctgggtaggcactgtgcgggtgtgagttgtgttctgaagggtgaaggctgaggatcttgagagcccagaggagggatccagcccgacccgagggaccaggaagagtggtctggaaccagcaccctttggacctaggctagaggccgagcaggaaccattgaggagagaggcaggaggtcagtggcccaggcgggaaccctcacacccaagccccaacatttttattttgttttgggaaatgtataggattaaagtaataactggaaaggaaataaatggaaacacggaatggaaacatttcctattttccctattgttatctgaagacaaacttaatttttatgttgctactttctctcttaaatatcctcttactaaatagtctgtcgtattaattagactgggtagtcctaactcaagaaagcatttggcaattaaaagatggaggactcagggtctgaccgttttccttggccttcatttggctttctctctcttttctcccctccttcttcccaggcctggctggctggtgcctggacaccatttggggctctgagagggttgtggctgccagcccccagtcgccaatgcctggtcaggcactcgtatcccctgtcctgttcaccatttctcctttctcattgttctcataatttgtcctgcttaaaactcctaggttctaagggacacccctgcattgcttgcctttcctttgctagacaccagagagaggctaaaaagtgaaatgtggcctggtgcagtggctcatgcctgtaatcccaacactttgggaggccaaggcaggcagatcacttgaggtcaggagttcaaggccagcttggacaacacgacggaatcctgtctctactaaaaatacagaaattagccaggcatgatgacccatgcctgtagtcccaactacttgggaggtaggaggatggcttgagcccgggaggtcaaggctgcagtgagctgagattgtaccactgtactccagtctgggtgacaaagcaagaccctgtctcaaaaaaaaaaaaaaaaaaaaaaagtgggccaggcacaggggctcatgcctgtaatcccagccctttgggaggctgaggagggtggatcacctgaggtcaggagttcgagaccagcctgacctacatagtgaaatcctgtctctactgaaaatacacagttagctgggtgtgggggcgggtgccttgtaatcccagctattcaggaggttgaggcaggaaaattgcttgaacccgggatgcgaaagttgcagggagctgagatcatgccattgcactctagcctgggcaacaagagcaaaactccatctca

SEQ ID NO: 1168 - DNA, 2595 bp, Homo sapiens
caattatgtttgaaaataggatttgcactgctttattttaggtggctgggagttttgattgcatattttgttatagttcatagttggaaatatttgcgtaaatggttttcaacaagcctgaaagtaatttcaagaatgtttcagttatagaggtaaaatttgcacacaaaacatcttaggcactttttaacattctcaatcatgggaattttaacttttgggatttgttgaaatcttttttattatccttcacaatttcaatgcttcttttagtcagaaatgattcagggttatttgaggggaaaaaaccccatagtgccttgattttaattcaggtgataactcaccatcttgaagtcattgtccggtttccgtagcagttttgaaaccttagtacctttttaacagcatgtgggtgtcagtgtcattattagtctcctaataagttcctctgaagactgctatcagtctcttggactggaggtacaaataatttagaaataaaagatgataacctaacactatcatagttattaatgtgatcctaaaattgtttcctaaatcagcatttttctttagtcatttaagaatttaccagaaatatttgctcaatatgatcttgatattcctacaaagaaaaaagaaggggtagggatttggctatgccttcactacaacattagaatattgtaactcacatgccttctaaacgtgaactaagatttcctttggcaatatcatattctaaaagtaataaattccaatacaagttacatacatttaaaaaacattttacagattttatggtactaatgaaatttacagtgatagaacaaaagaggattagtagaaaatacattattagaatataaaaaatgttattactgaggaaagggaggagaggacaagtgtaataaatcaaaattgacctcaaaagaaaatgtgtaacagagttgaggttgttaaaacagaaaaggttctgaataatgaagattaacctaatgcagaattgctaggtaaagaggtcaggggaatgctaagccagttcttaagacttctctgtcctctgctttgctgttatccttaaggcatatactttgtctttctgcagaaaattctacctggctacaattactttgaacattaatgttgaaaaagaaaacaaccaaagaaaattggtacttacccttctacaaaagaagtgtgactagatatcaatcagtaattaacatatcaaggagctcttctagctaaatgaccatccagtagagatttcccacattcccatgaatatcaagaatagttgtcagaatatgtatgtacctgagcatatgtacacagacaagggggatgttgtggaatatggcaatagcattgttcttctcccctttcaaattgcctttcttgaccttatgccattccatatatatctgagttgtgcctcatttatttattggcaatacctagtgatacggatttagctaacaaaagatatgaagaactattatattgaggcctgtcctctacataccacacttaaaagatggtgaactgtgagtactacttaggttgacagcaacaaagcataagacaagccccaggtaaacgtctaaactgtttactcacattgtcctactccagccccttcaattatttcccatctccacaaatagtcgggggaaaaaattaaaattttcctttatgattcttactgttcttcgcagctcatcttttcctgcttagaattaaccattgctaatttaaaggagcagctagctgcttttctgtcagtctgaagcgtagtagtggaagaggtagtaagcaccagctgcctctttgctgctttgttttcctcctgattctcttaaatttgggttgcaaagctatcccgccccccaccctgccccatgaaacttgagcattcaaatgaagattcagcagtgtctgttcttcatttctatagccaaagctgttagttaaaatcccaaatctatagcatttaaagataccaaatagaaacaccttccagctttaaaaaaaaaaaaaaaaaagtcttccctctgctttattctcactttcttaaaaacacttattctgggtggtactttttaggtaagaaactactgagtttcaggaaaaatgctagctactctgcagttaccgtgctttggacttgcagttatcatagttttgggagagtcagtattgtttaacaaatgcaagtgagaactagaagggttaataaagttgctccttagagtggtgtcaaaccagaaccgagacacttaaaaagtacttcattttttgaatggaaaatattggagaaaagtatgggagatgcaggtagcatgtgagtaaatactacggtctagccttcgagcatcccaaattccgggggtaacttgacagtgctgtgctctcctttgtcatttatatctggcttaggaatggaatagtaataacaagatgccagtgatttggaatagtttgttatagaacattcagtgcaaaatagtgaaaatgtttggtcttcagaagtgctgtagttgttggtcattgccttaaagcagtctgcttgacgctaggagcactgaa

SEQ ID NO: 1169 - DNA, 3998 bp, Homo sapiens
gaagggagaagaacccttgttcaggaagccttagaaagggatccttaaaatagtactctacgcagacaagtgaaaattcttttaaactggatattactcaacatgttttcagatgtttccactacattgaggcaaactttttaaaagtggaatgcaaatagcattttactttagtatttctgcttttttctttctgtttctttggtaattgaaagtttgttgatgaatatttgtgtaaaacgcattcaagtctataacctttccaattacctgtggcccttagtcccacaggagtccctgttggaagggggtaaacactggatattaatgttgctgagtgagtctttctagccaggacaagctgattggaatttttgaatggtagagaagaaacagcacaaaggcacttgccattttaagtgtttggagaaagagaaccttttaagtttggattgggtgagctttcttctaaaaggagcttctgaagtaattgcaaaggaatagaatcgactatttttatagtatatttaatatatttgtatataactataataggaaccctctacatgcctcccacttttctaatttacttccccttttgccatagcactagtatagcctcatccgcatgggtaatgtgcctattgtcagcctaccaaaagatagtgctgctgctttatgagacaggtgagaagacccaactctcatgcctggggatcctttacggaaggaatagcacacacttttaaaacaacataccacagtctaaaagcatcattttgaaatgtaacaagcactttattgcaattactcattttgataaagtttattcttaggcgttaaccatttctaaaggatccccaaatcatcacttacttaggtgaaattatataaaatgacacatttctgagaaatgtttaggtccagtgaaccgtagttggtttatgggagtgatttcaagatagccaaatgaactttgatttttgttttgaatgtggtggagtcaagagattgtagatgcctagtttgatttaaacactattgtaaacctatcttgcctattgtgtggacaccaaaagagaccaatgagcctgtttatttttcagaggtctaggaaaattgcatccgtgtgagtagatgtacagaactaatctaaaagtgattgctagtaacattttagaatataataatttcaagaattattctgagtgttttaaatgtgccctgaaatgttggcatgtcatttcagcatttccatttgaattgctcttgtaatatttttgcacaaaaaggactgagaaaaagaatactttggttaaaggaaaaaaatagtataatttggtctttaattttaatgtctcctgtggaaacactggggatgaattttgttggcacagttattcaggatatttaaaacagtgttgaacagttcacaagaaattaagcaaacttggattttaaaaattaaaatactttctttccatgtgactgttttgcatagttttttccccctatgtcataacactacattccttgtttttcttaaataaaatactctgcaggttttgttgtgagtgtttataacagtattttgtaagctgcctgggtttcctcagggaaacattatttagtggaataggatatagtttatggagagacaactaagtgaaattccatcaccaccaccagcaaacactgaggtgctgcattaagtgacaatcaaactagtaagtatttatgaaagaatttagaaaggggttcaaagaagcaattgcttttaaagcagttctctggggttcttgaataaaaatggctaaatgtatttatttatattttaaaatacctgtgtgttctgttttctcatcaaagtgatttcggtgtcatgtatttaatgtgtggtttgttttgttttgcaccatattcttcttagggaactggctctgatttggggtgcagtcaccaactctcatgataatctttacggacagtctgaatctactttacttcaggacggcagtggaggggccaactccagatgcccctgcacttccctcctcaagtcatctaagaaagaattttagaaataactcctttcaaatctgattcatacagttccaacctttttctagtttcacttgctgccttctttgttttatgggcactttttgtgtgattacttccccaacacagtcaaaggccagtatgacagaaccaatggcacatgatgcctctattttgcccatttggggaaatgttagtaaaagaaatagcatcttttaatggctgtcattatcatatccatattaaaatccatttaaagttcttaaatttggcggaataatgtatacaggctgtaaacttctacaaaaaatgtttgctgtctttaatatggtgtcaagttacttggtcctttgaaaacaaaacaaaacttccatacacagcactgcccagtaaagcagtgttggaatattggaaacctagacatttgaggatccttcttgctcacaagcattggaacagaatcctccactttaggactcagagaagctatggagtcccacaggctaggtatagcacacaacttagagaacggtagttaaagcacgtcaaccacaattgaatttaatgatctaaaaaatatttcttaactctgagggttaaactgaagatacgttttcaaataaaagcttttaaatttcttaggaaacaaactgtgacatcgcttttaaaaatgacattcaaatgtttataatgtgtgtttttgagttggcttggactagtgcaagttcactgctggcaatggttatgccagtagttaagttaaaataagttgttaccttcagattgatgtcttgtataaccagacaatcatcttcaagcaaaaaaattggccaggaaatgtctttttaaaaaaaaaaaaaaaaaaaaagatgtgtcagccagaacagttaccattcagaccatactggaatgattttgaaatctttactatggtttaagttggggaaggcctcagtatggcattttcatattcactctatgtaaagattgaagcccaaagatgagttaaattcagtgctgtattgaaccagtcagtgcaaaaaaaaaaaaaaagtttacctttgtaatttttcatggtaacatcagttggtagtgtttaaaacatgcaccaaatcctttataatgttctgtgtggtcctcaatgtgatattcttgacattgctgtccttactgcttggttcttggttttaaattaaaaagtagatgtagctcatcatttttacttccaaaacggtggagctaaaaacggctaattgatcttgagataagaataccctttactaaggcaaagatttaattgaaatccaaaatgatttatagaaacgaaaggcattttccatttgttgtcttctgccgaaattctgaattgcatacacacatgaaggataatgaatggtttcaacggtgctatattaggttctctgattttcatgacctatgtatgtttggaaatacaatattgtataaaatgtggatcgttttgttaccgatttaatattgccattttaatttggtgtaacaattggttacacttgtttttcaaagctatcctttgaggagaaagtcaaaatgtgttgttagcctacctccactcaggcctcttgctgtgtaatcattattccaggttatgatgtgcatagcttttaaaactgcgtgtactattattctgctctttcccatactcttgtcatgtattcagaacctaaacttatagcaaaagagccaagcagtagcagtttttgtaaatgtaaaaataattagatccagactttgtttccttcaattttaaaaataaaaaatacctcagtgctatgtttttcagttatcacctgcatttctcaaaaaataacacctgcttcatgtggcacataacttgtaagaatcacattttggattttaaagaaagactattaaatattttaagatcactatcaatg

SEQ ID NO: 1170 - DNA, 777 bp, Homo sapiens
tttttagacttctaggttgctccatgggaatccctcaactcaactcattctctctgctgcatttcctctacaacagagcaccttccctcagtcacatcaccagcaacatcagtctcagcaacagcagcaactcagccggcacaggactgacagcttgcccgacccttccaaggttcaaccacagtagcacacgtgcttcctctcttgacatcaagggaggaaggggatggcccattaagagttactcagatgacctgaggaaaggagggaaagttccagcagtttcatgagatgcagtattgagtgttctagttcctggaattagttggcagagaaaatgctgcctagtgctacagatgtacattaaataccagccagcaggaggtgatcataggggcatagccagttctgacagtgttttaggtgcctggatattttttgatggaaaaagaatatattgccaaatattaagaagctcagctatgaaatgacctccagggaatcagaaaggcactaatgatgttagtaacttttagtggttctgtgcctcttatcaagtgttacagaggacataccactgccatgtcaggggtttgcttacagtgatgccatgaagacagtccagtagacttggtagcgaccccctcccccaacccctctcccttttcagataatgatggaacagtaattactttcagaatgttgtgtgggttcaaattctctatgtacagatgatgtaaaaatatgtatatgtctagataaaaggagagaaagcaa

SEQ ID NO: 1171 - DNA, 3412 bp, Homo sapiens
tcttctagttccatcaccgggacagcttcaacacagggtccacagcgtggggcatttcccagtgtctatccgacagcctcttaaagccacagcctatgtgagtccaaccgttcaaggcagcagtaacatgcctttatcaaacggcttacagctgtattccaacacaggaatccccacaccgaacaaagctgcagcttctgggataatgggtcgcagtgcactcccaagaccttcgttggcaataaatgggagtaacctgcctcgaagcaaaattgcacaacctgttagaaggtaagaatgtgtatttgcgtaacttcatttgcagtttggaactagaaactgctccagacacacgctgacttttcctttggctcactttaaccttagtaagacactaccctttatggcctgacttgtgctctcctccctttgaaaagtgatggatatccctgtgtgggtcaggtccccttctctctgatgtcattttcttcccttactccctcatcactatcactcctaagacgctctttgcttttgcttttaccagataagctctgtctccagagcttttgtagctttctgctcccaagttatttgcatggcttgctctgtgcctccctcaggtctttgctcagatggcagctctatccaaaaattgtagggcggggggaggttgactttttggttcattgctgtgtatccccgatgccaagaactatgcccaatacaggtaggatctcaaatatttgttgaatcagtcatttttaatcaaaatatggaaaaatgtgtcaggcgtatgtgcacacgcacaccctcctcccacacatttatggtttgaaaagcatcttaatgacattcacctggggctttatcagcttatgttggtaagttcagtatggtccaggtagtaattttttttttttcccttcaaagtttcagagtacttcaaaggacatttagtctagctcttggtcatgatgttcccttcttgaactggatatcatggagtatcttatattaaaaatccataaaagtggtttgaggagagattggtagatgaggaaataaagacaataaatacagacagctctttcaagaaattaggatatgaaggagaaggagaaaaccatagtaaaaagtttgaaagaggtggaacaagcaatttttttctgtctttatgcatttatggatatataaatagttttattttgttttgtttgtttagaagtaatagatgctcagatcaacaacaaatttcgaaaaacagaaactattgaaaaatagaaaagtaaagactgacccataatcctactgccagatagaaataattttggtacatgtttatttattcagtaagttttggcttattctgctttgtaaatgcagagctgtgtcatcatgctgatggctgactagaatcacattatttgatgtatatggttattgtagaccatacatttatccttgactatgtgtctccaaactaaactcttggaaaggtcactgctagacaatgtgagatggtctatttccccaaacttaagcaaatgctaggtattattctttttaattgttttaaatttaaattttttattttatctattctttttagagacagggtcttgctcttttgcccaggctggagtgcagtgttatggttgtagcttgttgtaacctcaaactcctgggctcaagtgatcctcctgccttgctaggactacagtgcatatcaccactcccagataatttgaaaaaaaaattgtagagacaaggtcttgctatgttgcccaagctggtcttgaattcctggcctcaagttttcctcctgcctcggcctcccaaagtgttgggattatagatgtgagccactgcactcagccaaagattctttttaaatgttttgcgaatatgataggcaaatcttcaattactaataaggttttgaaaatgtcttcatattcatttgctgtttgtattcaacagagtaaccatttatgtttttaggtcatttttctagccaggatcctatatttttcttattttaaaatatgttttatacattaagggtattggcccctttatttatgttgcaaattttcttgtgcaaatacaacatgcatgacactttgccatgaactggggctctgggagataagcatgcagtgaagacccgtaagtgtgaaccacaaggtacacttgagatggtgccagtggcttctcattactgcagtggaagaacatagatgggagagtaggtcaaagtgagtgatgtgactcataggattattaacaatctctctctctgtttttcttgtctctttttagttttcttcagcctccaaagcctctgtcttcactcagcactctgagggatggaaattggagagatggttgctactaatgcagttttatgtacccttgaaaaatgggaaagaagtaaaaatgagggttgtgttacctagctggctgggtagcagtggatgttgggatattctttcccttttgtgttttaatatatttactgcattgtttctcaatggaccagtcaccagagactaattattgcacttaaatatttgcctgagatactgcaacattctcaaacccatggttgcagtattgtgacacttagatctaggaagtttttgtagaactgctctgtacctgaatactttttgagagaattaagatgtatcaataatgctttgccatatgagttttttaaagtaacttgttcaatttactcacgtgttctaaacatctttccattacatgttctgtattttaatacattgcatattgacaactaggttctataatgtatgctttgaaatttacttttttatagtttacaggaattttattttttgtgcctatttctttttacacctatgtgaaccactatggaacaacttaaattttgtgccataaaaatatttttgtggtaaggtactatttttttagctctagggatatatcagcaaaaacacatcatgcaatttgagacacataattttgtgttgaatgagcacaacataatttgaagcattgcaaggagataaccagacagcagaattaaatggtcctgtctttttcatttttaatttattgtcatacatgggtttcatatttataacggcatcatgagctcattgcacttaatacctgcaatgtttgctactgtaccacaattgattttcaatactttattacgaaggatgaaactgtaatgttttattaacaatgcttctggaaatgaatgcattttaaagcaaataaatctttttgatagaccttttacaaaatccatttgcactaatgaatgctttcttatggcatataacttaatatttgttactgtgtacactgctgttttggaatgttcagaaataaagactctatttcagcaata

SEQ ID NO: 1172 - DNA, 3412 bp, Homo sapiens; identical to SEQ ID NO: 1171

SEQ ID NO: 1173 - DNA, 3089 bp, Homo sapiens
ggggggtagtcggtctataagcctcgcccgttccgctccctggggcttccccgagcgccgtcggtggtcatggctgccccagcctcccggcaggtccgacgcagagcccgggcagcgccgcggccccgctcggccgaggattggtggtgggaccggctggcgccgaggggctcggggtaccacctgctgcagtccgacagcatgctgctggtgctgtctgaaccaggccccgcccggccccgcgcacagcggcgcgattcccgccgcattccccggcagccgccccggggccccagcgccgcggccaagcccaaggccgggctcaggtccgaggcggcggccgcgcccgcacccgcaccggcacccacgcccacgcccgaggaagggcccgacgcgggctggggagaccgcattcccttggaaatcctggtgcagattttcgggttgttggtggcggcggacggccccatgcccttcctgggcaggtaacgctggtgccgggcccgccgccgagcgtagcggcttgggccagacgtggtccgagcggtggcccgggcgggggcggagggcgaaagcatcggagcgcgcaccgctcagtccgagagcgcagccccttaggcgcccagttggagtcccaggagcccggctttgagccggggtgtctactgcgctgcgagaggggggcatcgcctacggaggggccggcaccctcagcacgctgtcctcccagggctgcgcgcgtgtgccgccgctggcaggaggccgcttcccaacccgcgctctggcacaccgtgaccctgtcgtccccgctggtcggccggcctgccaagggcggggtcaaggcggagaagaagctccttgcttccctggagtggcttatgcccaatcggtgaggggttccctcttttccttacccctggctccaggctccttccgtctccctgcaccaaggtgttgggtgggaaggactcgtgtgggaacattagtgcagctctgcctccgctgtcggcccaggttttcacagctccagaggctgaccctcatccactggaagtctcaggtacaccccgtgttgaaggtgagagctccaggctgtcctgcacatcagctgtgacactctgggactgttcagtactctaggaagtgggtcaggcaccttgggggcccaacgctgctccgtggggatgtctgcttgcctgcctggttctcttttcctgctgtttcctccagcagggaggtatcagaggcggggacacccaagtaggcctggcatgggcagaaaggaggtcacagctaaggcggtagagtggggttggcaccagccacttgtctgtttcccttgtggatcttagcctgttgtttcccaaccccagctgcccctctgtctccccgcagctggtaggtgagtgctgtcctcggctcactttcctcaagctctccggctgccacggtgtgactgctgacgctctggtcatgctagccaaagcctgctgccagctccatagcctggacctacagcactccatggtgagccctgtgtcccaaggggccctgaaaaaacccaggccggggtgacgggtgctcttgtattggggccccaggtggagtccacagctgtggtgagcttcttggaggaggcagggtccctaatgcgcaagttgtggctgacctacagctcccagacgacagccatcctgggcgcactgctggtaagttggcattggtgggagcagaggcagatgctgagctggggactgccaggccactgaccctgtgacctaccccctccccccatctctgcagggcagctgctgcccccagctccaggtcctggaggtgagcaccggcatcaaccgtaatagcattccccttcagctgcctgtcgaggctctgcagaaaggctgccctcagctccaggtacctggcgccctgcctctcccacctgtcacaccctcccccatctacagcctggaccttgcccccaggtgctgcggctgttgaacctgatgtggctgcccaagcctccgggacgaggggtggctcccggaccaggcttccctagcctagaggagctctgcctggcgagctcaacctgcaactttgtgagcaacgaggtcctgggccgcctactccacggctctcccaacctgcgcttactggatcttcgtggctgtgcgcgcatcacgccggctggccttcaggatctgccatgtcggggtcagcagtcctgggtggtggccgggcgggtgaggtgtgggggcccttgtcaccttgtagcttatgctcactcctttcactgcagagctggagcagcttcatctgggcctgtatggcacgtcagaccggctgactctagccaaggagggcagcccctttttgacccagaagtggtgccatacactgcgagaactggacttgagtggccaggggttcagtgagaaggacctggagcaggccctggctgccttcttaagcacccctgggggctcacacccagccctgtgctctcttaacctcaggggcacccgggtcacaccaagcactgtcaggtcagcatcccctaccccagtccctggagccagtgtggctgtcactgtgtctgcctggggcctggaagttgtgtcctgcctggcctgagacctccaggggtcagaggggcatgcatactgtccaagcccctgcgtggggtgggcctgaggacaccaggggaactgggcttggccttggtggctatgggtggcagagccaggtgtcgaacaccagcaggcacagctccctagcctggcccagcccttctgaggcaacagctcaacttcctgtggtctgccctccccacagctctgtgatcagcagctgcccgggcctgctttacctcaacctggagtcctgccggtgctttccccggggtttgaagcgggcctaccggggcctggaggaagtccagtggtgtctggagcagctgctcaccagcccctcacccagctaggcagccacagacctgggacacctcagccagcttgcccaccctccacctttgcccaatttcagatatttgagcattttgttaaaataaaacatttttaggagtt

SEQ ID NO: 1174 - DNA, 2722 bp, Homo sapiens
ttaatgccaactcattaaatacaaatgttttattacgcaaaccacatgtaggtcccaggctcaggggcttaccctacagcccccactggtccctggctccaagcctgctccttgcccttgcccaccctggaaagccaggatctcctatggagtgtgtaggtgtccacgagtgtaccggtgtgcgggcctcctgggctgcaggcactcaggcatggtggcagcattgagggaaagacaggtgttggggagcggggtccccacctgcccaggctcaggagtcacaggggtctgcacagtcctttctgctgtggaacacgtgatagatgctggtcggggggaacatagcaacagcgccgagcagagagcccacctggatggccacgccggctgccagcaatgccggccggcccccgccatgcagcagggagctggctgccaccttcacgtaggagaacacgccaagacacagcacccacgacagcacctgagggggacacagcaccagctgagcgtgagatgtgcctgctccagggcaacgcccccccaccccacttcatgtccccctgtgctcaccacgaggaccacccccgccgaggtgcccaccaggggcgggcaggggctcaggactgccagcgccatcaggtagcccccacagaacacgcccagcagagagaggccgcccagccctgccaaggacctgcagtgagcgagcagaatgtcagggctgactgcgccaggacctggctcccagccctgagttccacccgcacaggggctgggggtccttgtgtacctgcacagcacacccatggccaggaagcaggccaggggattggcagcactgcccagcaccacagccaggtggtaggccagacgcccgtagggtaagcaggaaaagctctgcacggcaggcagcacgccattggtcagcgcgttggtggcggccaacaggcccagcaggcaggcactgcgggctgatagaagctgataggccttagggtctggaccaggggtggtgcctgctgcctggcttggtggctcttgcagtggtgaggactcttccacctcttcctctgctcctggggctcccacctggaggcctgatcctaactcccctgtgggtacagatggtggtggcggcaacagcagcagaagaccctggaaggcagcagctgaagcgaccagaagggcagtcagtgcccagaagaaggtgctggcgggaaaacgctcaaggaagtcgagcggggggccaggggtgccgttgatgggggctggcgggcactcgaggcggcccacaccctgcactagggccagcacgcagggcagcagggcactcaggccttgacccaggaagaatgaccgtaagaagcgaggtggcaggtggctcaagaagggcaggaaagtgacattcgaggcacagcatgccagtgccagcacaaaggccagtgctaagaaggccacagaatgcaactgtcctgccactggggccacatggtgccacagagaggccagcagggctgtgcccaccatgcccagcacctgcaccacccggatggggacctgctcgtcctttcctggggccagcctcctccagagggtcaccaccagcagacccaggttccccagagccacaagcacagagacgtaagaggggaggctccaacctgcagggaagggaggaggccatgtcagggtcatgatgcccaagggaggaagagtgccaaagcccaccttcctgggcacacctgcacctcctcccactcaccctctggaagctctctgaccaccacaggtagctccacccagatcccactgaccgcagcccaggagtcttgggcacacctgcacctccctcccactcaccctctggaagctctttgaccaccacaggtagctccacccagatcccattgaccgcagcccaggagcccatgccgaagagagccaccagcaggtgggtcagcaccggacgggcgggcgtgggtgctgccattcagcccaaggctgggcccttccaggtcagggcaaaggtcacagccagttcttttcccacctagggccagacacgctttggctctcctgggaagtgaagacttcttctagcttgaaagaaacagagaaacagataggatgcagagccggagtcagaacagggtgagaccaggggaactgggggagccccgggcaggagcgcagatggggaggattggctaaaacgtacccagcgggaccgccggcaggcagggaagcaggaagccggcccgagtcgctgcggccccaggggaggaggccgaaggagcgagtggagccctcctctccagggagaggcggggctggagtcaacgccaccaccaccccaagccggacgccgggaaagggcgcctaccaggaggagccacgcacaccccagggcttcacggtgcccgcgaccgcaagagccaagtcagatcccaggggagtggccgggacggctctgctcggaggggcgccgccctctcggtaccgtcaggtgggcgactcgggagccgtccggtccctgcgcctcccggtcccgcgcccagtgcgctcccgctccagtgccggcttcccgccacgccgggacaccgccgtccggcccagggacgccacctcagtccggagcgcgcaggacccggcagcagccacgacccgactcacccgtggcggttccgggcccgcccccggcatggcccacgaccggaag

SEQ ID NO: 1175 - DNA, 2263 bp, Homo sapiens
tccattctttcttaaccatcttcttctgcccccatctttaaaaaaaaaaggcagtaggctttatggctctaaaatcaaatgcttatgttggattctaataagggggttttatttcaggtatttgtaggcaaaataccaagggatttatatgaggatgagttggtgcccctttttgagaaggccggacccatttgggatctacgtcttatgatggatccactgtccggtcagaatagagggtatgcatttatcaccttctgtggaaaggaagctgcacaggaagccgtgaaactggtatgtgataattatccactgtcttagcaagtcactatttgaggaaataaactttaattcaaaaatgtttgtagttaacattattttgatttcttcagttgttgcttggaatgtttttatactgaccaagttggtatgtgacgtttatttttctctgactataaaagtaaaaaagaactgaaaatacccaaaaagtaatgttttatagaaagtctcccattgatttaagaagttatctattagattgatatcagaagtttcatatgagtatttggcttatgcatttctgtcttttggttttaggcaaaaggatgtcaattcttgatgttaaactttaggattcttaaagtataatgaagactggaatgggctgtggggaacataatagtggatgacagtgacttaggattcaattcagaaaatagttgtgaatctgttttattttggttacagcctactcatacgatttatttcatattttctaagtgtatttttgttcttcctgtatgtttcttggcccttgagtcttctctgtctttaatctttctctcctctcctactatttatagccagtctcatattaatttcctttctctagggcctttaaccacttggtgctcatttcagaccagtagtagtagcaacaaagttctgcaaatcaaatgtatcttcactcctgctgtatttaagacacagctatctcagtatcttaaaataacaatgtaattattttttggcatacccttgcctgacttctgaggacctcactaagtctagttctagcctttgtagaatggtcaacttctttcatcaaggctttggtttcattactggtgtctgaattagttccactcctagcttgacccagattttagtttttattatggattttttcttcaaacttgtttatttaatattaagttttcatttttggcagcatatggatgattttatttttaataatcatatctcttagtaaactaatggttaaataatattaaagtataagaagctaaaattggccaggtgtggtggctcacgcctgtaatcccagcactttgggaggctgaggcaggcagatcacctgaggtcaggagttcaagatcagcctggccaacgtggtgaaaccctgtctttactaaaaatacaaaaattagctgggcgtggtggcgcatgcctgtagtcccagctacttgggaggctgaggcaggagaatcacttcaacccaggaggtggaggttgcagtgagcaaagatcatgctactgccctccagcttggatgacagagcgagactccatcttaagaaaaaaaaaaaagggctacaatttatcaagaaaatccactatagtgatttaaataaaacatttttcaaaattttataaaattttgaaagtattgtgtttggtagacaatttaaaactatatatttagaattctgtgacttctgtagaatttgaaatttttctaatatctttgcattgattaaacatagttgttaccctttacatattgttattttgagtatggcttacctatatgcaattacatttccaaggaccctgaatgatcagtctcaggtatttttttctgaaaaatctgtggaaaaacattttcagatagataaaattaaaatatgaaataagatattttaaacaataaagtgagtcctttttatatggaagagtagtgaaggttaacaaaaccaaactaaaacaagagactgtaacaatgaagtttaaaatatacattcatattatggaaagcatgagggaacttggtgagttgatgaagcagggagcgtttggccttaaattgttgaattttttagattaagatcaattgtcctgagtttggggtggttttggggtctctggttcttttcttattgcagtgtgacagctatgaaattcgccctggtaaacaccttggagtgtgcatttctgtggcaaacaacagactttttgttgg

SEQ ID NO: 1176 - DNA, 14327 bp, Homo sapiens
tccattctttcttaaccatcttcttctgcccccatctttaaaaaaaaaaggcagtaggctttatggctctaaaatcaaatgcttatgttggattctaataagggggttttatttcaggtatttgtaggcaaaataccaagggatttatatgaggatgagttggtgcccctttttgagaaggccggacccatttgggatctacgtcttatgatggatccactgtccggtcagaatagagggtatgcatttatcaccttctgtggaaaggaagctgcacaggaagccgtgaaactggtatgtgataattatccactgtcttagcaagtcactatttgaggaaataaactttaattcaaaaatgtttgtagttaacattattttgatttcttcagttgttgcttggaatgtttttatactgaccaagttggtatgtgacgtttatttttctctgactataaaagtaaaaaagaactgaaaatacccaaaaagtaatgttttatagaaagtctcccattgatttaagaagttatctattagattgatatcagaagtttcatatgagtatttggcttatgcatttctgtcttttggttttaggcaaaaggatgtcaattcttgatgttaaactttaggattcttaaagtataatgaagactggaatgggctgtggggaacataatagtggatgacagtgacttaggattcaattcagaaaatagttgtgaatctgttttattttggttacagcctactcatacgatttatttcatattttctaagtgtatttttgttcttcctgtatgtttcttggcccttgagtcttctctgtctttaatctttctctcctctcctactatttatagccagtctcatattaatttcctttctctagggcctttaaccacttggtgctcatttcagaccagtagtagtagcaacaaagttctgcaaatcaaatgtatcttcactcctgctgtatttaagacacagctatctcagtatcttaaaataacaatgtaattattttttggcatacccttgcctgacttctgaggacctcactaagtctagttctagcctttgtagaatggtcaacttctttcatcaaggctttggtttcattactggtgtctgaattagttccactcctagcttgacccagattttagtttttattatggattttttcttcaaacttgtttatttaatattaagttttcatttttggcagcatatggatgattttatttttaataatcatatctcttagtaaactaatggttaaataatattaaagtataagaagctaaaattggccaggtgtggtggctcacgcctgtaatcccagcactttgggaggctgaggcaggcagatcacctgaggtcaggagttcaagatcagcctggccaacgtggtgaaaccctgtctttactaaaaatacaaaaattagctgggcgtggtggcgcacgcctgtagtcccagctacttgggaggctgaggcaggagaatcacttcaacccaggaggtggaggttgcagtgagcaaagatcatgctactgccctccagcttggatgacagagcgagactccatcttaagaaaaaaaaaaaagggctacaatttatcaagaaaatccactatagtgatttaaataaaacatttttcaaaattttataaaattttgaaagtattgtgtttggtagacaatttaaaactatatatttagaattctgtgacttctgtagaatttgaaatttttctaatatctttgcattgattaaacatagttgttaccctttacatattgttattttgagtatggcttacctatatgcaattacatttccaaggaccctgaatgatcagtctcaggtatttttttctgaaaaatctgtggaaaaacattttcagatagataaaattaaaatatgaaataagatattttaaacaataaagtgagtcctttttatatggaagagtagtgaaggttaacaaaaccaaactaaaacaagagactgtaacaatgaagtttaaaatatacattcatattatggaaagcatgagggaacttggtgagttgatgaagcagggagcgtttggccttaaattgttgaattttttagattaagatcaattgtcctgagtttggggtggttttggggtctctggttcttttcttattgcagtgtgacagctatgaaattcgccctggtaaacaccttggagtgtgcatttctgtggcaaacaacagactttttgttggatccattccgaagaataagactaaagaaaacattttggaagaattcagtaaagtcacaggtaaaacaaaaatgtatttagaaattacttttgcgaaatatgttgtactacttacaagtgctcaaaaaaactgaggggttgtatgtattaaattaagaattcaggtctgaagtatctaaattgcttcctttctgctttatagtggtttgggtttaagcaagttcccttatatccttcatttcttggaatgtccccttcacttctttgtcttaattgaaccttggcttttgctggagcttttgctctatagccctcaagtgaatgctttttttccccttgacaattagtgtattttaggaccaagaggatgaaagtttttactctctccctgctgccttgtctagatcagattttttttttttttgagacggagtttcgctcttgttgcctaggctggagtgcaatggtacgatctcggctcactgcaacctccgcctccttggttcaagcaattctcctgcctcagcctcccgagtagctgggactagcatgtgccaccacgcctggctaattttgtatttttagtagagacggggtttctctatgttggtcaggctagtctagaactcccgacctctggtgatcctcccgcctcggcctcccaaagtgctgggattacaggcgtgagccacagtgcctggctgatcagatttttttaaatatccaattctaaatccatggaattgattgagaagtagattttatatcacagttctatacacatttatatataactgaaacaatttaacaaaactgtacttttatttattatacatgatttattttgatatttcttattctatttcattttttaaaatgccaattgtgatctaatactacctatgatttaaaaacactgcgttagaccgctgcctccccttgtaaaaaccactgtttctttacatttttatcatccagacatatcctttcccttttgttgaagctgtcattcgttgctcttgtggtttcagcctttcattaatctaaagattgcttctggctcactgtcttcctcttctgccctaaattggcttctttctaatacctttaacatctacattggtgaaccatccagggctttagactcctacctacttctatgtctacctcatctttagtcctttacttcagctccaccatatccagattacattctggatctagtcaccagaaattctatgcactctgaactcttgatttctagcgtcccactttgtaaccactgctaccacccgctatattgtgttgtcaagtattgtgttgtcaactgctggcacagttctttgacctcatcactttattatctatagctccttctggcttcatgatcatttattcattctttcagcaggtgtttattaaagttcctgttaagtgctggcattgtgctatgtgcctgggatacactgatggctaagagacatattctctgctttcatagatcctatatcctgagaaaggagataagaccaagaatataaaaaataaaaattaaaggaatatttagacattgtgataagacactgaagcaggaaatacaggatatttagctagagaatagctactatccctgtttccatggttttggaagacttttctgataagatgacatgtcaaccagcacctgaaggatgaagaggttgtagcatacaaagagcaaaaggaagtgcattccaagacagcaacacgtgccaaggttccaaggcaagaaagaagtcagtatattacagtaactgaggaggccagtattattaaaaggtagaattaggagtagagttgtatgaaatgaagtaggcagggcttctgtaggccatgtaaggagttgggtttttattgtatatataatgagaaggtatttaaaggttttaagcaggaaataacacctatttcttgtttatgggatattattcctagcgctctgtggataggggcttggagagaaggggtgtgagtggaagctgataaattagttgaagctgtcatactagtacagatacaggattagactagggtaatagcagtggagatagaaagaagtaaatgagtttggaattggataggagagatgaaggaagaaatcaagaatggctaaccaatttctggcttcagaaccaggtggatggcactgtttattagataggaagtctagggaaggcagattttggccatggtggttcagttttggaaaagttaaatttgcaatgtctaagacatcaaagaggatacatcgggtaagaacgtaggcacatctagagcttagagaagtctggggtaggaaaaaaatctaagtatttataagggtataggtaacatttaaaagtagggctagctgacattatttagaaagaacacatacggagagataagggcaaaggactaagaccagaggaacactaatatttagtgatcacttccattcttggtaaaaatagtaacttttaagttagcttcaaggaagatttttggccatgattagttgtcaaaagttagttctcttgggtttatattactaattttgtttttaagatccttgttagtgctttaataaagtcatgttatatcaaacgctctaaaacattgtagcatgttaaatgtcagaatatagtagatttgttgtatatggctgtaccttcagaacccctaaaattaaaaaggaacatcaaatactgtcccaaaccccatatctaattatgttgatctaattgtctacaaaattagtgactcatgttgaggctgcttcacttatattttgctcatcgtcaagtggatttaggtctgcctaatcgctagatgtgtggtggatgcttttggcttatatatctggctgttggtttaacagagggtttggtggacgttattctctatcatcaacccgatgacaaaaagaagaatcgggggttctgcttccttgaatatgaggatcacaagtcagcagcacaagccagacgccggctgatgagtggaaaagtaaaagtgtggggaaatgtagttacagttgaatgggctgaccctgtggaagaaccagatccagaagtcatggctaaggtaaatacagttgcttggaatgggcatagggtcatcatttaaattttgtactcagaataaagctcaaatattttgagttttatgataaatagaaattgtagctttagacttcaactgtttggcaaggagcggctttaacactaaagttaacagcctgtcttggtatccaggaatttccattaacaatcccttttcctgcagattaaatgtgcaaaaggaactgaaatgaaattccttcaattaagtagtcccatacacactgggtgtttgtttagtgctaggcactgtgagggatagaggttttttttttttttaaaagtcctgagtaaagagagaagtaatgttttggagattataagttataatcttcattgactatattatgactttattacttggccatgaattatgttttatttagatttatagctaatttttctttttttaagctttttttgtagtttttatttttaaaaatattttatttattattattattttttgagacagagtcttgctgtgttgcccaggctggagtgcagtggtacgatctcggctcactgcaacctccacctcccaggttcaagcgattctccttcctcagcctcccaagtagctgggactacaggcgcctgccaccatgcccggctaaattttgtatttttagtagagacagcatttcaccatattgcaggctggtctcgaactcctaagctcatgatctacccgccttggcctcccaaagtgctgggattaaggcatgagccaccgtgccccgcctcttgtttttaaatgatcagattcccttagtgtattgtccccatgaagaaaggcaaaagattgtcatgtttgctcttatttgttagtggcaaaatatgcatggcaagtcctgtaaagggccctcaattccctcctgattcctgtacttgcgttgccaggatcttaatagtggtgccttgagtactggttcttaagttttcctttgggcgactcctgggacacatcagagttgcatttctttttttttgagatggagtcttgctttgtcccaggctggagtgcagtggcgcgatctccactcacggcaagctctgcctcctgggttcacgccattctcctgcctcagcctcccaagtagctgggactacaggtgcccgccaccacagctggctaattttttgtatttttagtagagacggggtttcaccatgttagccagggtggtgtccatctcctgaccctgtgaaccgcccgcctcggcctcccaaagtgctggggttacaggtgtgagccactgcgcccggcctcagagttgcatttctgctgcttgcaatgagctcttgagcattttagttgtctcttcccttcacagggaggcagcaactctgaatggccatgagttaatggttggattcttcttgataagtcagaagtcaaggtttttattccagaatttgaggaggcaaaccctcgttctaagtagtttggaggagaactctggtttatacttgtataaagtctgggttggcagtgacatctttgggttaatcagataagttctattcagaatgaaccagagaggctctcagaagtgctactcagtatcttttatctcatattccttgagtagatgggtgtctaggaaagggatagagaatttaaatagctctgagtttttattttgattttttactagcttgattttaattcctattgtttcttctcctaatacaactatgactttgggtaaactactgaacatgaatgtcatctattttattgagcctggatcaatctctaagatccaccacaactttgaatctacctgtagtaactaagtatagcctgtattactttttctgtaaaaatattttaaaatagtattatagatgtattataatagaggaataaaatattataaaagaggaataaaatcccatgaaaaccaaaagtatagcttgtaatttgcttaccagccacttctcacataacctttagtaactgctcagatggaagttcatcctaatctttttttagggttagaaaacttcaagatttcattctggtaactcctttttcctagatctaaaacaggtttcagaatgaaaaggaggtctctataaacttaggattaaatattatggagccctttattgtttcttttttttaaaagatggggtctcatgttgcccaggctggagtgcagtagctgcccacatgtgcagtcatagcacactgcagccttgaactcctgggcttaagcgtccctcctgcttcagcctcccgggtgcttgcaaccccatccagctcctttattgtttcctaattgaaaagaaaagtttatccatttgagtaaagcttctgttattcacactatcaatttacaattcactgaagattttttttgccaagttgggtcagttttacaatgtaccataacctaaaagcctaaatatatgtctcttaaagggaccctttttcctgttgaacattttaaacacaatttcagtaagtaattttcacatagtatgttatcgtttcatcatagaaaagtccatgttgaattttttttaaaaagcaactaaaccagtgggagtctgtgtaacatagaggctggaccttagtatgacaaattgagaataataaaggggatggagcgtttgtggaaaatgttagtttttttcctccttaaattagtatcttcttattagatagccctttatctgaagcaacaatttgttcaatatgttagttttttatttggataggtactatgttttcttagttcaaaagttatatagaaaagtatagacaaagaaatttcctttctacccctatccctgtgtctaccaaatcccctttgtctcctataaggcatccagttttaatagttgctggtttccttttagtatttccttcggcaaatatggatatacttccttaattcttagatgagtggtagtaatgttggtagcctaccatatccactgatctaccttttgtttattcaccatcctgtttcatcagctctgaggaaatacatcattactatatgtactactaaatagttaaaaaacactgccaactaaactatggcacagtacttgcttatcacattgactgtaagttgtcctatcctacaactcatagagctcctcttcattttttgggtttttgttttttttttttttttttttttttttgagacggagccttgctctgtcacccaggctggagtgcagtggtgtaatcttggctcactgcagcctctgcctcccgggttcaagtgattctcctgcctcagcttcccgagtagctggggttataggtgcctcctaccacgcccggctaatttttgtatttttagtagagacagggtttcaccatgctggccaggctggtcttgaactcccaacctcaggtgatctgcccacctcggcctcccaaagtgctgggattacaggcgtgagccaccgcgcccagccctcttcttcattttttatgactacatagtagtctattctgtggaggtactatagtgtatttaaccagctggatattgtttctaatcttttgctcttacagtgctggaaggaataagcttatgttagttgatacaagtggagatatatctgtaggatagattcttaggggtagaattgtgggccaaagggtagatatatctgtaattgttaagatactgccatattcctttctgtaggagatacactattttacattcctaccagcaaaatacaagagaattattttcctcattcttgacaaaatagtgtataatcaaacttttgaattttgccagcctgataacaaatgtctcagtgccattaatgattaatgatttgcttctcttactatgaatggtttgaactttaaatatattttaagagccatatgtgtttctgtgtatgaaccatgtattcaggaattttgcctatttttctattcagttgttgagctttttgttattttctggtgctctgatataaaagagagattagctgtttgtgatacatgttgcaaatttttcatccatatttattgtctttgcttatagtatttttttgccatatagaagtcatttatttttagtagttgagtataacattcttatggctcctagattttaagtcataaggtcatccccactccagtgttatataaaggaatcattcttgttctaaaatttcacagtcctccctccacccttttattatttaaattttcaatctatttggagtttatccttgtgtatagtgtaaggcatggaccagcttttctcctttttttctaatttaacactacctgatttaatgatttaagcattatagtttgtttatatttggtagggccagcctctaaatttcactcttttttttcctggttattcttgcttatttattttttcatatgaacttttgaaagttactcagttttagaggaaagaaacagaaaaacttgttttgaaagggactttttgttgattaacttggtaataataattatgtgttggttccttgaaggttctactcagtgttaggtgctttaatgacaacataggagaaggcaggaaccaataatttttgtaaattggtgactgatatcagtgtcattttcctagcaatttctcttactacctgtaacaacacttttagcacttaatgttttagaggagaaaagctatgctatgaagacaggaagaaacacttttcaggtaaaattaagtagccaatgacggttttgtttatttgttgcttactaggtaaaagttttgtttgtgagaaacttggctactacggtgacagaagaaatattggaaaagtcattttctgaatttggaaaactcgaaagagtaaagaagttgaaagattatgcatttgttcattttgaagacagaggagcagctgttaaggtaggaattttgaaattttggttcttgatatttgaattttgtttttgaaacttgccaaacgcaaagtaactttaaaaactgaaacaatattggttgtcagcttttgctgaactctttctatttaatctctgtaaagtggtaatagtatgtaacagataagactccatatttcaaagccaggttattactgagtttgtgatcttaggcaagttatttttaatctctgtattgttttgtaagattcgatagcatgatgccttggaagtattacaaggtataaaaattagctgctgtaaacactgaataggtaatgaatgcattataactacttagttgacctcagtttgtgtacctatgaaggaaactgagtggtgtacatgactcatacagtataccatgtttaattgagtagatagattttgagggtatgattagttttacctttatttaatcattttagagttaaaatagcattcactatgttttactgatttcggtaattgttagagatatcacttgtgtataatagttgatttagtctttgatgataatgaaaagtttgaagaaagtattttcatatggtatctggaacacaaaacctgctttctatcgacaatggtttaggactatctttaatgggtgaaattttcagtttcttttttttattcatctctccttccttgggggggtgggagcaagacaaaacactactaaaatcttatttatgttattaggaagatagatccagaatgcttagtgacacaggcatggttctttttctgcatgtttggtcggtgggatactgccatctctaatctgagcattttttggttttgttttttgcccaggctactgcttttaaaacaggctttatagaatccctgattggtttataattaattggcttgctcattgatggtagctaattaatgaggcagtattgttcataaaattcataacttgtccaagatcacaaactcagtaataatctggctttgaagtatggagtcttatctgttatgctgttatactcttatccgttcatttgtggcttctgaaatttcactggtatagaatgcagataactaataattttatgctgtctaaatattcctcctgactcgactggtttcaaataactggttgtcctgattgaaaatatttataggatggtttgccaaagaagcctatgaaattataaaatatctagtccaggaactgggagtcaccaggatggtcagggcagagggtagatgtttcattttttaatttatgccaggaagcttttgtaaacttgtttagttgctttaactgaagcaacgcaaagctgaggtggtaaaagggaaaattgcagtcttgaggactagtttcgtttttgtctagatacttataaatcactgatagctccaatagaacatttttttatgtgtgcccagagtggggaaaggtatagggaaacaaaaaataaaatatcatgaggaggtgacattttgttactgagtacctgaaccttttgatgtatggcagaggttgttaggtggaacaacgtgaacaaagggctagaacatggaatgtttgattactgctttctacataattgcttgagtcttcattagtccaggccttttctggctctgtacttttaactgttcaagcaaagtacattttgggttaagcattgtgagggaaacctaggcttttttgtgttagtatcttcttgaattttacagataatctcactcagtaacctcatttgtgcttcaaatccttgaaattgtcgtataagaacagtggaagacctgtatgttgtatgctacatgtttattttaaaattctaatcctgagaagttaatctttgtctggctcgtattaatactggcatttttccccggtatggatttgcttctttggtatggcttatcttttaaggagttatttggaattaaggagcagcaataggtggcagcccttttaccttttaaaatataatatcaggtggtcggttttgttctaaatgtaatttatgtataaaaagataacgtcaagggaaacgtattttctttgtgtgttagtgtttaactttctggctagattcaccttttgccatttaaaataattgtgaagtaaattgttaagtgtattaaattacacaagtataatagcttacatactatataaaacaaaatacagttttatatcgttgtaaaataatttttctaattttttataggctatggatgaaatgaatggcaaagaaatagaaggggaagaaattgaaatagtcttagccaagccaccagacaagaaaaggaaagagcgccaagctgctagacaggcctccagaagcactgcgtgagtctacattttagtagatatatctttggacaaggaataacgtgataatggagatcagattaataaaacaaaatcagagtcttgaagcaaactgatttgttttttcttttctcccttctctactttgctaggtatgaagattattactaccaccctcctcctcgcatgccacctccaattagaggtcggggtcgtggtggggggagaggtggatatggctaccctccagattactacggctatgaagattactatgatgattactatggttatgattatcacgactatcgtggaggctatgaagatccctactacggctatgatgatggctatgcagtaagaggaagaggaggaggaaggggagggcgaggtgctccaccaccaccaagggggaggggagcaccacctccaagaggtagagctggctattcacagaggggggcacctttgggaccaccaagaggctctaggggtggcagagggggtcctgctcaacagcagagaggccgtggttcccgtggatctcggggcaatcgtgggggcaatgtaggaggcaagagaaaggcagatgggtacaaccagcctgattccaagcgtcgtcagaccaacaaccaacagaactggggttcccaacccatcgctcagcagccgcttcagcaaggtggtgactattctggtaactatggttacaataatgacaaccaggaattttatcaggatacttatgggcaacagtggaagtagacaagtaagggcttgaaaatgatactggcaagatacgattggctctagatctacattcttcaaaaaaaaaaattggcttaactgtttcatctttaagtagcattttgctgccatttgtattgggctgaagaaatcactattgtgtatatactcaagtctttatatttttcctcttttcataaatgctcttggacattattgggctggcagagttcccttattctggggattacaatgcttttatcgtttcaggcttcatttaagcttcaaaacaagctgggcacactgttaaatcatgattttgcagaacctttggttttggacagtttcatttttttggatttgggatagattacataggagtatggagtatgctgtaaataaaaatacaagctagtgctttgtcttagtagttttaagaaattaaagcaaacaaatttaagttttcttgtattgaaaataacctatgattgtatgttttgcattcctagaagtaggttaactgtgtttttaaattgttataacttcacacctttttgaaatctgccctacaaaatttgtttggcttaaacgtcaaaagccgtgacaatttgttctttgatgtgattgtatttccaatttcttgttcatgtaagatttcaataaaactaaaaaatctattcaaaacattacctatttcaaattcaattgtgtcctaaaacattattttattcgtaatccttgcaaggaatattgttttcaaagtataactgcctatgtgagtgatcaaattcatgcaaaatttcttgtttattccaacatgtgttgtggatattagactgaggattagtctaaattcaagtatttattccaattagcactttcattgattggtgttctctcatagtctcttctaattttgaaattttatcttttattaaaaaaaaaaaaa

SEQ ID NO: 1177 - DNA, 482 bp, Homo sapiens
tcacgccattctcctgcctcagcctcccaagtagctgggagtacaggcgcctgccaccatgcccggagaattttttgtatttttagtggagacggggtttcaccatgttagccaggatagtctcgatctcctgacctcgtgatccacccacctcggcctcccaaagtgctgggattacaggcgtgagctgccgcgcccggccgaggttgctttttaagtagtaaagattttagagttgaggagataacttgaggagagctatgtcaatcttttattcaattattttatttttattcatttttatttttaatttataaattaattttttaattttaaataatagaaatggggttttgccatgttgcctaggctagttttgaactcctagactcaagtgatccgccttccttggcctctcaaagtgctaggattacaggcgtgagctgctgcgtccagcctcctttattctgtttttatgagaa

SEQ ID NO: 1178 - DNA, 188 bp, Homo sapiens
tcacgccattctcctgcctcagcctcccaagtagctgggagtacaggcgcctgccaccatgcccggagaattttttgtatttttagtggagacggggtttcaccatgttagccaggatagtctcgatctcctgaccttgtgatccacccacctcggcctcccaaagtgctgggattacaggcgtgagc

SEQ ID NO: 1179 - DNA, 8143 bp, Homo sapiens
ctgcatcctccgtgcccggcctgagctggagtcccccgcgccccccgcgttccgcccggccatggctgcggtggcgctgatgccaccgccgctgctgctgctgctgctgttggcgtcgccgcccgccgcctccgcgccgtccgcccgcgatcccttcgccccccagctcggggacacgcagaactgccagctgcggtgccgcgaccgcgacctcggcccgcagccctcgcaggtgaggcgcgtgcggtgccaggtgccagcgggggacgcgggatctctccgaaggaggaggcgttgggatgggcttctcttggatgacagcaggagactttggtgggggtgtccgtggggaggtgggggtcgggaatggggagatctctccagtagttgacgggctggggttccctctgatgggggagtgcttggggatgcaggtccttgcgataaggggccgataccacctcccgggctccttccgcactctgctgggtaaggaccctctagcacccaacccccagctccctcaggcctgatggtccccccacctcattcctcctcctccacatcgtgttccctccccactcagagctaccagcccctactcataccaccactccccaggattcaagcctgatctgcgtgtgaccaaaaccccctcctctgagcctccccctcctcctccaggtctgagaatccttctccatgtctcccctcctccctggaacctagtggggggaaggctcatttctctccaccttcactgtccatttctcttctcaagctccctccccatctccctcctcagagctaagagcccccactaatatttgtagcctctcccaacttcatctccatctggctagatgtcgtggggagcggggaagcctttccctgcctctgctgaatgctccggtccccccaccctcctcctgcccctccccatggcctgagccccctgtcctcccctcccccaggcggggctggagggcgcctccgagtctccctatgacagagccgttctgatcagcgcttgcgagcgtggctgccgcctcttctccatctgccgatttgtggccagaagctccaagcccaatgccacccaaactgagtgtgaagcaggtgagggcccgccggcagggtgggccagcgtggggagaggtggcctgggaagggccgtccccagtcacccgctcccacctcccacagcctgcgtggaagcctatgtgaaggaggcagagcagcaggcctgtagccacggctgctggagccagcccgcggagcctgagccggagcagaaggtgggcctcccactgcggcctggggtcccttttcccaatacccccaccctcttcaccccgtgggaaatcttcattcacgtgcagaggctctgccagactctgcgttctataccaggcctgcagggcaacctccatccagccccgtcatgtctccagccttagttacatgcaacaacgccccccatgccccaccaccttttcaggaataagtggcagaaaacagccatcatttatcaaacatctgtcctggttcgggcctgacttcaacctgtcccaaatgtttttgtgtcacttggaggcacaaaggacaatgtcacccccatttagtgcccagggggcaacctcccaggtcatacacagggctgtgcaaggggcgagatttgaagccaccagagctgtggccactcctcacctcactcctcttaggcgcccccagagctgccaggtgctggtctaagcccttcccctgtgatgagctggtggtcactgtcacctggaggggctcagaactgcggctcagggtagagcaggcttgcctcgcaagcacgcacacactgccttatgggagaaataataacggttcatctattgtagtccaagcaatgctgcatcatggggaaactgaggcacagaaaatcatgtagcatagccagagacctaggggctgggactccccagaaagccctttccccacttcccccattttcctccaccccttcccagctttcactgctgttcagaaaagctcactgcactgtcagcccttccaattcagagctccctcttatttatttatttattttttgagatgaagtcttgctctgttgcctagcctggagtgcagtggtacaatcttggctcactgcagcctccgcctcccgggttcaagtggttctcctgcctcagcctcctttgtaggtgagattacaggcaccccccactacaatcggctaatttttgtatttttaggagagacagggtttcatcatgttggccaggctgatcttgaactcctgacctcaagtgatcttcccacgtcggcctcccaaagtgctgggattacaggcatgagccaccatggccggccatcagacctccgtcttgacgctgtcaaaataagaataatgaggatgatgatatttttagtaatagggactactacgcattaagtgcctgtgccgtgccaggcacctggcaggcatcctctagttgaaatttcatggctactccatgaaggaagagaacgatacccattttagggctcagagagcacaatccacttccctaagggtacacaggaagccaactgccacgctgagatctgtgttcactataagaagtcctattggcccaaatcacttagccacatccaatccaagtgaattctcctagctcctctcctgttagtttatttattcatttatttatttgagatggagtctcactctttcacccaggctagagttcagtggtgtgatcttggctcactgcaacctctgcctcctgggttcaagcaaatctcctgcctcagcctctggagtagctgagattccaggcgtgcgccatcatgcctggctaatttttgtatttttagtagagacagggtttcacgatgttgtccaggctggtctcaaacttctggcctcaagtgatcggcctgcctcagccttccaaagtgttgggattacaggcgtgagccaccacatcctgccccctcccattcattggttaatgccctatttcggtgccatctttgtgtcttggaccttttttcaccagagaaaggtcctggaggctccaagtggggccctctccctcttggacttgttttccaccctctgcaatgaccttgtcaactcagcccagggatttgtctcctccacctggacatactacttgcagactgacaatgggaaagtggtggtgtttcaggtgagacctctgacaggggccacgccagagtggcagatgggtgggcagggtaagaagatgggatgcattggctcttagctcatgagatgcaaagtccacagtgggcgagcttcaggcacagctggatccaggggctcagtgtctcactccatgccttgactctgctttcttttgtggtggcttcattcccaggcatttacttcttcttggcagtaaggtggatgccagaggctctaggttacaaacgctgtggtttttttttgttgttgttgttgttgttttgagatggactcccattcttgttgcccaagatggagtgcaatggcatgatcttagctcactgcaacctccacctcccaggttcaagtgattctcctgcttcagcctcctgagtagctgggattacaggcggccaccaccacacccacctaatttttgtatttttagtggagacggggtttcgccatgttggccaggctggtctcgaactcctgacctcaggtgtttcacctgcctcggcctcccaaagtgctgggattacaggcatgagccactgccccggctccctctggggttttaactgagctgggatttactctgattggccctggctggatcatatgaccatctctcaggcaattcactggcttggtctggatcatgttcctacttctggagctaaaggatggggttaaggcaaatggaggagcccatgaaagcagaaaacaacatccctgacatcaagcccacccctgatacccaggggaactgggtatcagctgggcgtgggacatggcagtcacagagggcctgcctgggcccaggggtgctgttctcacaagcctctctgtgctgtcttgttcctggcccagactcagcccatagtggagagcctcggcttccaggggggccgtctgcagcgcgtggaggtgacctggcgaggctcccaccctgaagccctggaggtgcacgtgggtaaggtgcaacctagaccagtgttccttccatgggtggccccactgccacaaggagtcggcctggcaaacagaccttctaggatcgggatctccatctctcaagtcctgggttccatggctcatcccccaggtctccatggtctatttcccagggttccatggtccacctcccagggttccatggtccacttctcagggttccgtggtctacttcccagggttccgtggtccatctccccgggttccatggtctatttaccagggatccgtggtccacctctcagggttccgtggcccacctcccgggttccgtggccacctcccagggttccgtgttccgcctcccagcgttctgtggtccacctcccagggatccatggttcactttccagggttctgtggcccatctccctgggttctgtggcccatctcccagggttccatggttcatctctcagagttccatgggttcatctcctagggtcatctcctagggtccatctccaagggttctttggtccatctctcagggttccatggttcatctcttaggattctgcagttcatctcccagggttctgtggcccatcccccagggttctgcagtccatctcccagggttccatggtccatttcccagggttccatgttccatctcccagggttccatgttccatctcccagggttccatgggttcatctcctaagggtcatctcctaggatccatctcccagggttccatgggttcatcttctagggtcatctcctagggtccatctcctagagttctttggtctatctctcagggttccatggttcatctcctaggattctgcagttcacccccagggttgcatggttcatctcctaggatccatctcccagggttccatggtccctgtctcagcattctgtggtccatctcccagggctctgatctccattccaggactctatgccccaggtcctgacctcctccctcctggtcatggttattgtggcctcttagcaaagacctggtggtcgctgagtggcagctgatctctcagaccctgtaggccccctggacaaggtgaggaaggccaagatccgagtcaagaccagcagcaaggccaaggtggagtctgaagagccacaggacaatgacttcctcagttgcatgtcccggtgggtggcaggaccttgggggtgggaggggggtgggactggaggtacgggtctccctggtcccggcctgggcagctgagtggtgcctgccgggcggggcaggcgctcgggtctgcctcgctggatcctggcctgctgcctcttcctctccgtgctggtgatgctgtggctgagctgctccaccctggtgaccgcgcctggccagcacctcaagttccaggtgggtgggatctgtgaatggcgctgggccgagggagggggtgaaggcagagagagctgtttgctggtcctggatttggccacctgctcccatggaggccaggacctcagacatttttttcttttttcatgtatatacatatatatacatatacgtgtgtgtgtgtgtgtgtgtgtgtgtgtatatatatatatataatatatatatatatattttttttgagatggagtcttgctctgtcacctgggctggagtgcaatggcaccatctcggctcactgcaacctccacctcctgggttcaagcaattctcctgcctcagcctccgaagtagctgggactatgggcgcgggccaccacacccagctaatttttgtatttttagtagagacggtgtttcaccatgttggccaggctggtcttgaactcctgacctcaggtgatccatccgcctctgcctcccaaagtgctgggattacaggcgtgacccaccgcgcccggcctatatatatatttttgagacaggatctcactctttcacccaggatggagtgcagtggcatgatcacagctcactgcagcctcggcctccctggctcaagcaatcctcctgcctcagcctcctgagtagctgggaccacagtcacgtgccaccatgccccgctaatttttgtattttttgtagagatggggactatgttgcccaggctggtcttgaactcctgggctcaagtgatccacctgccttgccctcccagaataccgggattacaggcatgagccacctcacccagccaggacctcacacttgctgcatgacttgggccagtttcttcactgccctttgaattggtgggaagaaaatccactcttagttggggcgacatgaagtcagaggtggccacacttctgtggtgttggcctcacctctatcatgcccaggtgtgttggtgacacctctgtggtgcccagagcctgggcaacatagtgaaaccttgtcactacaaatcatttaaaaattagctagatgtggctgggcatggtggcccatgcctgtaatcccagcactttgggaggccgaggtgggcggatcacgaggtcaagagattgagaccatcctggctaacaaggtgaaaccccatctctactaaaaatacaaaaaattagctgggcgtggtggcaggtgcctgtagtcccagctactcgggaggctgaggcaggagaatggcgtgaacccaggaggaggagcttgcagtgagccgagatcgcgccactgcactccagcctgggtgacagagcgagactccatctcaaaaaaaaaaaaaagaaaaaaaaaattagctagacgtggaggtgcatgtttatgatcccagctacttaggaagctgaggtgggaggatcacttgagcctgagagttcgaagctgcagtgagctgtgatggcaccactatactccagcctggacaacagagaagaccccatcacacacacacacacacacacacacacacacacacacacacacacacaaaagtccaggtgtggtggctcacacctgtaattccagcactttgggaggctgaggtgggcagatcacttcaggagttcgagaccagcctagccaacatagtgaaaccccatatctactaataatacaaaaattagctgggcgtggtggcgtgcacctgtagtcccagctacttgggaggctgagaaaggagaatcgcttgaacctaggaggcggaggttgcagtgagctgagatggcgccactgcactccagcctgggtgacagagagagactctctcaaaaaaagaaaaaaaataaaacaatcagaggtgggaaggagacagtcagggttgggggctcggcctctccccgtccctccacttccctcctcccctctcttcctgcagcctctgaccctggagcagcacaagggcttcatgatggagcccgattggcccctgtacccgccgccgtcccacgcctgtgaggacagcctaccaccctacaagctgaagctggacctgaccaagctgtaggcctccactggccccatcactgccaactgcagggggcccctcgggcctcacttgccctgagcccaggagtccaagggcagggtgggtccagccttgagcccctccacccccaaatccttcctctcctcccagtcccaccccttgccccacggagtcctggggacgcagtgccccagctgggaagagggcgggatcgggcactggttcctccttgtccccgctttcttgggggcttgctactttttgtcttctattgtgtggctttctgagtatttgaaccccagtcctgtgtcaccttcctttttccttctatgtcccctctctgcggggggggcgctgaggctgagggggagctgcgtcttgctagggcttcccccttctccccatcccggtctccagagacccagcttctgagagacagggtgtgggcatctccatgcccctataaagcgtgcctggggcttgtctggggctggggaggaataaaccatgtatataaaagag

SEQ ID NO: 1180 - DNA, 13275 bp, Homo sapiens
gcgaaagtccagcttcggcgactaggtgtgagtgagccagtatcccaggaggagcaagtggcacgtcttcgggtgagtgtgcggctgtgctggagcccgggttaccagctcttgcccgcgcggaataggctttaagaaatcggagctgcagccatctgtttttctcttaatgctgcatctctgttctcacggtggtccttggggtgaggttagagaaggagccgagggatcctgacaccacctccacagcaccggcgggcgaggtgccctactttaggcgtagccttctgcttttggagccagatgtctgtggacttctgttcgcgttcagaaatgccgcctcaaacttctctcaattgttcattaagtgaacttctctcattcccttcccctttgccgataattggaggggaaaagaagtaggaagcgggacacggtgtcctggggcaagggacttattacctaaaattcgcggccccttctgtccctaaaggttcttctccctgcccactttttggtctctttttagacctaggctgcccctgccgtcatgtcgcaagggatcctttctccgccagcgggcttgctgtccgatgacgatgtcgtagtttctcccatgtttgagtccacagctgcagatttggggtctgtggtacgcaagaacctgctatcagactgctctgtcgtctctacctccctagaggacaagcagcaggtaaaggaactggggagtggctggggcggaaagtgatatcctcaggccaataattgtccatacagggtagtatgaggtcaaagactagcaatcctaaaggtctgagatcaattcaaaattaagggcatttaggacaaaatggctatgaaaagaaaaaaagaaaaaaaaattaagggcatgacaagtaaaaaaaaaattgagttgtgtgtccagaagaactataatttgcattgcattaatgaaataccctcaaatgcatgctcttagttaatctttcagggaataatagttatctctctttgccttgaggcccagttgtgctaaataatttgcacaaggtcatataggcattatgtaagtggaatgtatgttcaggttttaatagtatcaccatagcttcaatttgttgtaggtttcctgctaggccagggtttctcagttacagcattattgacatttggggctagacagttcttgtagggatctgtcctgtacatttcaagatgtttaatagcattcttggcatttacccactagatgtcagtagtgccttcccatttgtgacaatcaaaaaatgtcttcaggcacttcaggcattgctaaatggcccttggagtggaaatgaccctggttgagaaacactgtactaggtcctatgctaaacattaacatacattgtcagattttgtgctcttatagagtttctcttagagacttataaagttccatgagagcatggtccttgatgatgtctctcactatggactatcagagcttctcagttcctaggccatagtagacactctaaatatctgggttttttttgttttttgggtttttttgttttcgagatggagtctcgctctgtcccccaggctggtgtgcagtggcacaatctctgctcactgcaacctccgcctcccgggttcaagcagttctccctgcctcagcctcctgagtagctggaattacaggcacctaccaccaagcccagctaatttttgtatttttagtagagatggggttttgctgtgttggccagactggtctggaactcctgacctcaggtgatccaccctctttggcctcccaaagtgccgggattataggcgtgagcccctgcacccagcctctaagtatctgttgaatgaatgacataggtgctattattaaccccattctgcagatgaggaaactgaggccaagaatttcaagaactcataattcaaggtctcatagttactaagtcatggaattgggactcaaattcaagtgtttgcctctgctttgctttaatatcacatactaattttcataccagtcaataaattcgaactcagatcatcggtgtggcaagccacatttgcaggataatgacgagacagggaagggtgacaaagtagtaaaaatgtccatgtgggttggaatgattgtggaaccaaagagtagctgcacagagacatttgaggtgaaatggggtagtgttatcatagttcctagaaactactgtttgcccatttgctcagaggtaactgctgaaattaatctgtggttctgggctgggattctgccacaggttccatctgaggacagtatggagaaggtgaaagtatacttgagggttaggcccttgttaccttcagagttggaacgacaggaagatcaggtaagtgtctgagaagggaggattcaaggtgaaatgatgcagtacaaaagattcccaggaatgccttctgtgacaactgtattttctcccttctcagggttgtgtccgtattgagaatgtggagacccttgttctacaagcacccaaggactcttttgccctgaagagcaatgaacggggaattggccaagccacacacaggttcaccttttcccaggtatggagggtactggtttgtgaacaaaagaccaacatgtaagggcaactttattccctctttagagggaaagcttctcttcctgactgtgagttccttgtatatgcacacctacaattttgagggccctagttatgtgttagtcaatgtgtcaagtaacatatgtatatcagttctgaaaaattctattgttattatcattatttccttattttcctcacaaggatagtgtggctcaatgaatgtaatattgctgaagccatgtagctagtcactagtagagttaggacctgagtctagatccatgtatctccaaagcccatacttgtgggccattatattgccccattgtgtgtgcagcatcaggcctagggcatagcattccttaagtgtttgttgatttggtggaaagatggactagcagagagtgcttgagtcctcagtgtttagggaacagccagcagcattgcaggaagaagctgcttgagtggtctccagagccaaccactcaggaaggaatatatctgctggctctgcacaggaggcaagtgggagatgaaggagaggcctctaaaaaactgggtctctctctagatctttgggccagaagtgggacaggcatccttcttcaacctaactgtgaaggagatggtaaaggatgtactcaaagggcagaactggctcatctatacatatggagtcactaactcagggaaaacccacacgattcaaggtgagtagtaagccttcacgggattcctgattggctggtaatggtgttgtttttaccttttgagactctgagttagggggagaagggcacttgcctcagctgtccatctttcatatgcctccaggtaccatcaaggatggagggattctcccccggtccctggcgctgatcttcaatagcctccaaggccaacttcatccaacacctgatctgaagcccttgctctccaatgaggtaatctggctagacagcaagcagatccgacaggaggaaatgaagaagctgtccctgctaaatggaggcctccaagaggtaaagcattggtatccatggcagtgggggtagggggtacaaatctcggggaagttttgtgcttaccttctccctgtgcccctccaggaggagctgtccacttccttgaagaggagtgtctacatcgaaagtcggataggtaccagcaccagcttcgacagtggcattgctgggctctcttctatcagtcagtgtaccagcagtagccagctggatggtatgtaccgtgactgggctctgccaaaaaatagtaggaactcactccctgttcctaatagctgccaggagtacagaccagaggttgcaatctaaggtctgccttccaaggcccctgcaggccaaaagagaggtgaactgctctaggttgatgccctatacattggcttcttctccagaaacaagtcatcgatgggcacagccagacactgccccactacctgtcccggcaaacattcgcttctccatctggatctcattctttgagatctacaacgaactgctttatgacctattagaaccgcctagccaacagcgcaagaggcagactttgcggctatgcgaggatcaaaatggcaatccctatgtgaaaggtaaaggaacatggggaaagctggcatgaaccctggagggcaactggggagagactggcaaaagagttggatgttcccatcttacacccctctcctttggccccagatctcaactggattcatgtgcaagatgctgaggaggcctggaagctcctaaaagtgggtcgtaagaaccagagctttgccagcacccacctcaaccagaactccagccgcaggtgagtagattgtaagaataaactcttcactgtgttccaggaaacattagtcctctgcctggtcatggaaaatgtgcaatgactttttgtttttcttaacttccagtcacagcatcttctcaatcaggatcctacaccttcagggggaaggagatatagtccccaagatcagcgagtaagtttatccatttagaaatttgggcttcttggccataaatgatagttgggaaagcatggaggaggtcctcaggggaactatgtgttctccttctttgggtacagagattcttagtgggccgtcccctctccagaattatacaaagggccagaaggctcataacatgtgaggcccttatgtcagatcctgtgcatcattctaggctgtcactctgtgatctggctggctcagagcgctgcaaagatcagaagagtggtgaacggttgaaggaagcaggaaacattaacacctctctacacaccctgggccgctgtattgctgcccttcgtcaaaaccagcagaaccggtgagcttttgactataattcctgggctctgcaatttgctaagagacttcctggacaccactggggatggtgctaggatacccaaagggctggtgttctgctcacagctctattatctctgattctctgccaggtcaaagcagaacctggttcccttccgtgacagcaagttgactcgagtgttccaaggtttcttcacaggccgaggccgttcctgcatgattgtcaatgtgaatccctgtgcatctacctatgatgaaactcttcatgtggccaagttctcagccattgctagccaggtgagaagctagaggtgtgatgggtgtgcgcacttggaactggtaactctaagaaagctcctagggactacttatggagtcaagtaagatattttttttccctctagcttgtgcatgccccacctatgcaactgggattcccatccctgcactcgttcatcaaggaacatagtcttcaggtatcccccagcttagagaaaggggctaaggcagacacaggccttgatgatgatattgaaaatgaagctgacatctccatgtatggcaaagaggtgagaatacaagaaagctttagtgtagcagcttagtagctacacatttttccatggtgccttccaggtgggcttgtgccttctgagggcatgagcatctgatgacctctgacatgtgtgtctctcctaggagctcctacaagttgtggaagccatgaagacactgcttttgaaggaacgacaggaaaagctacagctggagatgcatctccgagatgaaatttgcaatgagatggtagaacagatgcaacagcgggaacagtggtgcaggtactagctgagtgacccctcttgctctgtcacctgagacagagggtgggaagtaaggagttaggtggagttgtgcctcaagatctgttccccaagttcactcctcagaaccttcacttacctctcttttctcctctgtttctgacagtgaacatttggacacccaaaaggaactattggaggaaatgtatgaagaaaaactaaatatcctcaaggagtcactgacaagtttttaccaagaagagattcaggtgagttgccctgagccagctccaattagctgctcagatttccatcactagcttgcctgaagtaaagagattttataaactactccagtaagggcaggaatatataactcccttttctctattccccatagtgctttgggttcaatctatgtttggtgaattgattaagggtttagttggccaggaaatcgtattaagtgctaacaacaggttttcaagggatcagtgtcacaagtgctttgtttgttcagtcatctgtcttagcaatatttttctggctctgcaaagaattgtgctctctgcttccctcttaggagcgggatgaaaagattgaagagctagaagctctcttgcaggaagccagacaacagtcagtggcccatcagcaatcagggtctgaattggccctacggcggtcacaaaggttggcagcttctgcctccacccagcagcttcaggaggttaaagctaaattacagcagtgcaaagcagagctaaactctaccactgaaggtgaggaaagagacaggcaggaaacataacagtggttcagggaagagctgttacttaaacccaggccttctaactcctgctctaacataatttcctaaactgcaagctacatccccctgacatttcaatctaggatacacatagcctcactttttatatttgctgcaagctactgttacctcagttaaagaggttagtccaaggctaaaaaaaccccacatattttaagtttcctgtttccttccctcagagttgcataagtatcagaaaatgttagaaccaccaccctcagccaagcccttcaccattgatgtggacaagaagttagaagagggccagaaggtaattaccaccattctctgtttaccaaactcttacctaaggcaatttcccacatccaacactctatcactggttcatgtgaagacaagatgttttttgtgcacagttctggagagtggctatttcactcagctgactagcctttctaattttacttctcttcaaatggctacctgacccctccagatcattatcctggttgctcttggccacaatatgattcctacttcccctttttcagaatataaggctgttgcggacagagcttcagaaacttggtgagtctctccaatcagcagagagagcttgttgccacagcactggggcaggaaaacttcgtcaagccttgaccacttgtgatgacatcttaatcaaacaggttagggcaaactatatacccacttctgtcctaccagcccactccagtgtatatgtgagaaaggaaagaggaccagaagaaaaaggtaaagatttttaggctgaatttatagtgagagcagtatatttgcaaaataaaaataactattctttgttaagcatttactaagtaccaggcactgtgctaagtaatttataggcattttctgtcacaaccaccttagggaggtagttactgtcatatttcatctaagatgctactgattataagaaaccattattttatgtactactaagaaaaaagtaacaatttctcatcagtaagatgcatcctgattccaaagagattaaaatgttaaaattgtgtatcttaaactaaactcaacatttaatttgacatttagagactgaggcacttagaaattaaatttactcaagctcatactaccttatgtgttagaagatgtcctattcagcactgcttatgttttgttctcagaaaatgtccccttattcagttataagctccgaccttaaagagttttaatctttgaagaaacagttgttagtaactagtaatggatggtatgtattacccttagccctctcgtttctctaatataccagacaaaagtgttttctataactttattgatcttccttaggaccagactctggctgaactgcagaacaacatggtgctagtgaaactggaccttcggaagaaggcagcatgtattgctgagcagtatcatactgtgttgaaactccaaggccaggtttctgccaaaaagcgccttggtaccaaccaggaaaatcagcaaccaaaccaacaaccaccagggaagaaaccattccttcgaaatttacttccccgaacaccaacctgccaaagctcaacagactgcagcccttatgcccggatcctacgctcacggcgttcccctttactcaaatctgggccttttggcaaaaagtactaaggctgtggggaaagagaagagcagtcatggccctgaggtgggtcagctactctcctgaagaaataggtctcttttatgctttaccatatatcaggaattatatccaggatgcaatactcagacactagcttttttctcacttttgtattataaccacctatgtaatctcatgttgttgtttttttttatttacttatatgatttctatgcacacaaaaacagttatattaaagatattattgttcacattttttattgaattccaaatgtagcaaaatcattaaaacaaattataaaagggacagaaaaattaagaatcaaacatcactctggaccatgggaaccttgaaaaggcatggcagtggagaccagtaactagtatacagcttgcctgagaaggcttagtaacaaatgaattcaagtcgtattagatattctaaaccttccttaatataagatgaagtgtcatatgttaggaggtaaaaacgtaacacaaaattctgggaataagaataaagtctggaccctgagctcagaatgatccatagcatctactgtgcaaatatattacagcagacattatagcatattacctcctgctgtacacacatgcacaggcctgaaactctccaagagcaccataagaatgattccctttacctcatctagataaaggctgaaaaaaatgtattctgttgcagatgggagggaaaaaaatagacaattacgttgaaaatttattaaaacagaccagcttgaagtgagtttattcttgtctgtataatcaccaatgttatttccaaatgtccgtgaaattatctataatcctatctccttgcttgctttggtaggagtatagctaacaatatagccatcttttgccctcagtaagggctatcagcagttccaagctctgtgagattatttttgcccttcttttattcaactctagttgaataaagttacttccaatttgaaagctttagaagacccccccaaaactgttttggaagattgtctccctagagagtaagaacaaatggatagctctattccatttaaacctaatctctgacatcagaatagggatcatgctcagcaaatccaagagcaaggtcatttgtatccattgctctgacttcttcctagggtactcagtgccctactgccagctcagggtagagtggcagactttcctcctttctttcactctcagcagcattgaaactttgttcctgtagcattgcctgtgctaaagtgctataaaagggactttcttgggggccaaaaaaaaaaagcattcagggaagaaggccaagatctatagccactctttggacataagtgagacagaagtacttctaactggcaagataatgtctgttcctgccaggattctgtcagttggcctctgaaggtaattatacaagctgtccctatggagctgttgccatctgtagaaacaagaagagctgaggtccttggaacagacgtgctgttctttacatggaggtaaggcttaattaagatgggtctaacaatgtgctggcttgagagtagccaactatggcgtgacagaagacaagttgagtggagaaactctgcgtgtgggggtattgttagcagagagtgaagcaggtaggaaaaagggagcaggcacctcggtggtaggagtctcgccttggttccgaagctgtaggatttgccggagtaaggccttaccttcttcccgggtctgcaacaaagtcagggaaatgtttcaaaacatgtccaaagctagtctcgaaaacaagttattaagatgctgttaaacaagttccacagatcaaggaggcgggaggcttgcttgttttttttttttgagatggagtctcactgtgtcacccaggctacagtgcagtggtgtgatcaaggctcactgcagcctcgacctcactgcagaggatcaagtgatcctctcacctcagcctcctgagtagctgggaccacaggcatgcaccaccaaacctggcaaaatttaatttttgtagagacaagctctcccttttttgtccaggctggtcttgaactcctggacacaagcgatcctcctgcctcagcctcccaaagtgttgggattataggtgtgagccgcttgcctggccaaggtaggctttccacttaaatatcttatgttctagcctaaaattcaaaccttttattaaagaactgatactcacatcattaaatgcacaacacttttgtgcacaagttgaagcttcatcccacagtttgcacttaaaatagtactgggccagatagcgaaaggcagtgctttcctccaagtgttctactatttcctagaaagggaaagcaaaattactgaggtgacagtaataatatcagcagtacaattctcatggtatgatacataccccacaggaatagatatcttggatatatttgatgtaacactgggcagcctgttctgactcagtcaactgttcatgaagcctacaaaagaaactgatctttaaataccaatgatatcccaaagcaacttagtgataaaaaaagtaaaagtacataagaccaaaaaaaacaatacataggtaagtatcaattttgacataaatgacactcttggaactagaatagtattagatgtgatagttactgttatcaaagcttagaatcattactctgctaatgatggaaggagagtcagtaaatattaatatctaagctagataaaccatccttgcaaaaattatctagtaatacccagagtaaagtggctcatgcctgtaatcccagcactttgggaggccaaggagggcagatcacttgaggtcaggagtttgagaccagcatggccaacaaggtgaaacctcatctctactaaaagtagaaaaattagccgggcgttgtgacacatgcctgtaatcccacctactcaggaagctggagcaggagaattgctttaacttggaaggtggaggttgcagtgagccaagatcataccactacactccagcctgggccacagaatgagactctgactccaaaaaaagaaaaaaaaaaaaaaaagctgggcactgtggctcacacctgtaatcccagcactttgggaggccaaggcgggtgggtcatcagagatcaggagttcaagaccagcctggccaacatggcaaaactctgtctctactaaaaaatacaaaaattagccaggtgtggtggcaagcgcctgtaatcccagctactcgggagactgaggcaggagaatcatttgaacccaggaggcagaggttgcactctagcctccgtgacagagcaagactccgtctcaaaaaaaaaagataacaagtggccaggcatggtggcatagggccataatcctagctactctctaatctggctgagaccaatgacttcaagaccaacctggtcatcacagcaagatcctatctataaattacaaaaaaaaaaaaaagataccaagcaactcaatttttttcctaagaatccagacaggaacctctttacatttaagaacctctttgcctactatttgagttattcctaatttttctggcccttagcaggaaattaatactgaaagtagtttgacacaaaaatgttatcctttcttcaaatcaatcttgatctcttgctttaataggaaagcaacggccctccttcaagagaagtagcattctctttttattttttttattttgagatggagttttgctcttgttgcccaggctggagtgcaatggcgcgatctcggctcactgcaacctccacctcccaggtcttgaactcctgacctcaggtcatccacctccctcagccgcccaaagtgctagaattacaggcatgagccactgcacctggccagaagtggcattctctaggaacaagatggctacattcacaaaccagcattcacacaccctgctacatccctacacctatgtagaatgatgggtgtatgggaggctctagaccatgcaggacccaccatcccagagaagccaacagaaatatcaatagcatttcactcctttcactcactttgccagtttcaccagagccattttctccacatctcccacggcgtaagctctccaataacactgtcaaaaaaataaactggtcattttgaccattgtcccatgtgtcacaactaaatcatatgaaggttaagaccctgcaagcctcccagaagttcagatttatagaatgcaagacatttttactagttctgataggtctaggctacacactgacattcccactgatgaccttggcccagctttgctttcagactatgtatctataaatattcagactttcctatgcacctagatcagaataagggaaaaattagagcacagatagcccaaccttcatctaaacagcagatttccactcaaattcttcaggacccaatttaaggtacctttttggcttccactagttgattgagtttctcgtaacattctcctaaagcaaccagcatgcgagaatcattgggtctgagaaagaagaacaggcagtctgagcaaagactttacagaaactgaagttctcttttgaggaaccagtacaccactatttcaaatctatgcaacaactggtctttaacctgatgctccatataatagattactttgtgttcataattatactattaacccattagtgaaatatactaaatgaaaataaccaaacagccttcagcaactttaacctcagatccccaagagccaaaaccatccactgtgatttgtcaatagctatcaaaagaggaaaaaaaagttattagcccttcccatatcagacgcattgtcaagtgaccaggcttaccgaagctggtgggcccgtctataataataaaggcagtaaaatggcatcttaaggatttcataggtctgcccgaggccataccaagctctgtagtcccgtttgttgacctcaatggcatgtctaagaaatggaaaagac

SEQ ID NO: 1181 - DNA, 39119 bp, Homo sapiens
ttcctattgtgtaaatacatttatttatagagtaaaaggcttagaaaagatctaatggaattgtctttaaatcaagccgatggaacaaagatgtgggcaacatttatggcataaatccaaacctcagcttcccctttttttctttatattatgtccacatgcatctttgactcgttggttgtgagttaaggtattattcttgttggaaaagaaaatgaggacatggcaaagaagtaccaggatcctctctaggtcagagttccgggagagattcaaactctagaaaaagtcaggatagcagctccaggttagaaaacaggttttccatcatctactgggttagctggttctccttccagactacttgagccttttcttttgtctaaccagatattcagtacctaaagggttaaggaacacatagcaagctattatgaaccttaaacactaaagtattgcaagtttatttttttggcaaatagactcaactatacttttttctttaaagtatgatgctacccagaaaagaaacccacaaatgtcttctagctactatatcttatcccctaaagatgggaaagtgtgaacgtacattaataacaacagatgaagcaaccaaaaaatacacagtgactccagcctctttggagtttagcccttgacttgaggctctggaagcgggaattcccattacttgtctatcctcagctctcttgagagctcttcactgctgcctgcattcctagactacttcactatcagagctggacttactgaggctcagggttttccaaaccagcaggcacattatcaatccttcagggccttaatcacctttaaaaataaactctgagaacacagtcacctcgaaatcacctttattctcataggcgttctgaaatcaagattccagaggctacaggtatctgcatacagtacctgaatctgctccaggacttctcgccgcatctccacagccatatggtatacatgatgatcagagtcattgtacattacagcattttggaacatcagcatcaggtctcgcaggaattgggccatggtgcgaatccgacccttagagagatttctcttcaggctagttaagtccatgggtctgcaggtggccaagaaaaaacaaagaaaatcaaaccttcatgtggaacatatgataacctaacacgttctcttgaagaactaaccagttcttaatgaaaacagtagcaaagataacaaccctcatcagataataaaatagcaacagcagttaatatttgcctgtttacaatgggccaaacactgtatttctatactaactcacttaatcctctcaataaacctgtaaggtaggtatcattaatatctcattttttttttttttgagtcggagtttcactcttgttgcccaggccggagtgcaatggagcaatctcagctcactgcaacttccaccttccaggttcaagcaattcccctgtctcagcctccagaatagctgggattacaggcgtgcgccatcatgcccagctaatttttgtatttttagtagagatagggtttcaccatgttggtcaggctagtctcgaactcctagcctcaggggatccaccttccttggcctcccaaagtactgggattacaagtgtgagccaccgcccccggccttattatctccatttcacagatgaagaaattgaaatctaaagaggttaagtactcactgaaaggcacacagcctgaattccaattcagaggcagcctgactccagagcccacaggtcaagccactatattctactatcagaggaggagtgctggccccaggtatcaaagttgtaaagagcaccaatcatcagtttatcacacagtagttatttgctgtttacaatgtatagtcatatattatttcatctacttctcttactgcacaaataaaaagctaagaataatttttttctcctttcatggagatgaaaaaaggatcaagtgaatattaagacaatattaatgagacacagaaagtagatatataagagaaggcacagcagtgtagaaagaagactgaactgcaggtaagaatctggggcttagttctagctctgctattaactgttggttgatcacgagcaagtcatgaccaagcacctctgagctttagtttcctcattcctaaagaagtttgtctctgctgtttgaatgatggtatcattgtctctgctgtttgaatgatggtatcccctccaaaattcatgttgaaacttaatcccaagtgcaacagtattaagaggtggagcctttgggaggtaattaattcatgagtgctctgccttcatgaatgggattagcatccttataaaagggctccatatcgaagagagtgccctcttatccttctgtcccttctgccatgtgaggatacagcattcgtcccctctgcagaatacaacaacaaggcatcatcttagaagcagaagcagagagtaacccacctcacacaccaaaactaccaatgccttgatcttgcacttcccagcctccagaaccaaaacaaagaaacatagatttctattatttataaattatccagcctgtggtattgtgctatagcagcacagactagtgactctccaaaggtcctatcatgatcttttacattctattaccatacaggtttatgacagcattttagatgacctatgctataaaaacccaaaataggccgagcacagtggttcaagcctgtaatcccagcactttgggaggccgaggcaggcggatcacgaggtcaagagattgagaccatcctggccaacatagtgaaaccctgtctctactaaaaatacaaaaattagctgggcgtggtgacgtgtgcctgtggttccagctactcaggaggctgaggcaggagaatcacttgaacccgggaggcggaggttgcagtgagccgagatctcatcactgcactccagcctggtgacagagcaagactgtctcaaaaaaaaaaaaaaaaaaaatccaaaataggctaggattacctgcctgtaatcccagcattttggaaggctgaggtgggaggattgcttgagactacgagcttaagaccaacctgggcaatctagtgagaccccatatctacaaaaaatttaaaaattcctcctcagtgatattctgaagaaaaataaagttattaataacatttcaaacaaagaaaatattttattataataaaaatatcaggccaggcacagtggctcacacctgtaatcccagcactttgggaggctgaggtgggtgaactgcatgagcccaggagtctgagacaagcctgggcaccatggtgaaactctatctctacaaaaaatacaaaaattagccgggcatggtggcacacacctctagacccagttattagggaggctgaggtggaaggattgcttgaacctgggcagttgaggctcagttatccaagaaatgtgccactgcactccagcctgagcaacagagtgagacctgtctcaaaaaataatagtaagtaaaaatttaaaaaataataaatttaaaaattagctaagtgcagtggcacatgcctgtagtcccagctactccggaggctgaagtgggaagattgcttgagcccaggaggtcaaggctgcagtgaaccatgattgcaccactgcactccagcaacagagtgagaccctgtctcaaaaaaatttttttaaataaaaaataaaaataaaatcccaaaatactgagaggtgaagctggctgggcttctgggttgggtgggacttggagaacttttctgtctagctaaaggattgtaaacacaccaatcagtgctctgtgtctagctaaacatttgtaaatgcaccaatcagcgctctgtgtctagctaaagctttgtaaatgcaccaatcagcactctgtaaaaacgcaccaaaaaaggtttgtaaacgcaccaatcagcactctataaaaatggaccaatcagcactctgtaaaatggaccaatcagtactatgtaaaatggacaaatcagcaggatgtggaggaggccaaataagggaataaaagctggcccctcaaggcagcagtggcaacccgctggagtccccttccacactgtggaggctttgttctttcactccgcaataaatcttgctgctcctcactctttgggtccgcactacctttatgaactgtaacactcaccgtgaaggtcagccgcttcgctcctgaagccagcaagaccacgaacccaacaagaccacgaacccaacgggaggaataaacaactccggatgtaccacctttaagagctgtaacactcaccgccaaggtctgcagcttcactcctgaagccagcgagaccaccaacccactgggaggaacgaacaactccagaggcgccacctttaagagctgtaacactcgctgtgaaggtctgcagcttcactcctgaactcagcgagaccacaaacccaccgggaggaagaaactccggacacatctgaacatccgaaggaacaaactctggacacaccatctttaagaactgtaacaccacgagagtctgcagcttcattcttgaagtcagcgagaccaagaacccaccggaaggaaccaattccggacacaatactacaatcaaccaatgttcataacttccatttggatcgacatctgtgccttactatacctataactaactgaataaatacagggttccttttaaagttttgctccaaaagaatagtgtcaaaaacaaccaaaggctaatttaagattataattaatgatcaggctggacaccaaggctcacacctataatcccagcctttggaaggcctaggcaggtggattgcttgagctcaggagttcaagaccagcctgggcaacatggcaaagctccgtttctacaaaaaatacaaatattagccggacgtgatggctcatgcttgtagtcttagctacttgggaggctgaggctggagaatagctgagcctgggaagaggatgttgcagtgagccaagactgtaccactgcactccagcctgggcaacagagtgagaccctgtcaaaaaaaaaaaaaaaaaaaatatatatatatagaatggatcatattacttaaaagtcaatagtacaaaataaaaaccctatatcatccttttgttccctgcattccttcttaaatgaagatatgatactgagctcatcataactttataaacttgtttggctatgaaacatatcttgagtttgtaagttataaaaataatctaacagatgggaaataaaaaatgaaaaggcagatataaaagcaaccaacctttcttgacccctttttcactgaccttttcaccacatccttgtaccctggggcctgcctttctgacacaggcttcagaaatggactgctgaacctgttaagggacaaacccagagaggataaagaaaccctggcaaggcactctgaaggagaagagtagctcagttcttagtagacttcctttaggggaatgcagactgtcagcaccattaggaaaaaatctatttgttccctcttgccagagagttaaaaaaaacacaaaactataaaatatttcactattattacaatatactgatttagggctcagaaatttgttcaaagttcccaaggccctgtctctgtgaaaaaagagaatccaccagattgaaaagaagaatatacattttaaatataaattttatcatgtagtaggaaccaatttctagaggcaactcaaatggcacagcaactatttcttgtacagacttgtgaaagcagctgtgggtactttgggataaatcgggcttagatacagaatctacctttcaactatggctcatttgagggatgaacatatctccttttatgcttaaaccccaatatgtattactgcttcagctctgaacataatcctattaccactttggagacctacctgtgactggcaatcatcttccagactggcaggagagtcttcttaaatagcaaatgatcctgaacagggtcatcctggcttagatcagtcctatgaggataaaacatgaagaaaagagacagtaacttcacaaataatattctatctcccccaggtgggtaatgaggttttcttaagacatgctcctaattaatatctgaagctttttatctccccttatctggccaagcagacttagttattaatatctattgttttctcttttaattttttaattttatttttctgagacagagtcttgctctgttgcccaggctggagtgcagtggcatgatctcagctcactgcaacctctgcctcccgggttccagcgattctcctgcctcagcctcccaagtagctgggactaaagttgcataccaccacacccaactaatttttgtattttccatagagacggggttttgccatgttggccaggctggtctcaaactcctggccttaagtgatccacccgcctcagcctcccaaagtgctgggattacaggcatgaaccaccatgcccagccaattttttttttttttgagacagggtcttgctctgttgcccaggctggagtgcagtagtgtgatcgtggcttactgcagcctcaacctgctgggctcaagcgatcctcctgcctcagcctcccaagtagctgggactccaggcacatgccaccacgccctgcagctaatttctgtatttgttgtagagacaaggtcccactacgttgcccaggctggatatctactgctttctaataaagatttcatatttaatctaaattgtaaggtaagaatgtggaatttaccatccaagactatgaactgtcatgagataagatgtctcagattgggcccggtgtggtggctcacgcctgtaatcccagcactttgggaggccgaggcaggcggatcacaaggtcaggagattgagaccatcctggctaacacggtgaaaccccgtttctactaaaaatacacaaaaaattagctgggcgtggtggcgggtgcctgtagtcccagctacttgggaggctgaggcaggagaatggtgtgaacctaggaggcagagcttgcagtgagccgagatcacgccactgcactgcagcctgggcgaccgagcgaaactccgtctcaaaaaaaaaaaaaaaaaaaaaaagtctcagattgcagatttcctgctgtttgtacagtcacagtatgtcatctctgcactctattgctcatacttaaggagttaaagaaaagcaaatgaaggcattcctcaccaatctacattttaaactgtatcctatttgtgtaccaaaaattgaaatctaggctgggcacagtggctcaggcttataatcccagtactttgggaggctgaggtgggattgcttgaagccaggagttcaagacccagcttgggcaacaaagcaagaccctgtctctatgagaaaaaaaagaaatctgctcttcaaaaaatatatatatatatatatattcatatataaatatatgcatggttcagctgtatatcttaaacaaaaaaacactagaataattattagttttacctttccacagacaactgggtggatctgggatatactgaagaaaaaaaaaacagttcatactatattctctcaacagatggatctgacacaggctggaaaaagaacaatttatttattaccataacaaaaataactttgctggacgtagtggctcatgcctataatctcagcactttgaaaggctgaggcaggagaatcacttgaggccaggagtcacagataaaaacaactttgtttttctgctttaaaaagtaattcacttcatgccagatgcagtagttcatgcctataatcccaggactttgggaggccaaggcaggggatcgcttgagtccaggagtttgagaccagtctggtcaatgtgatgaaaccctgtctctaacaaaaatacaaaaaaatcagctggttgtggtggtgcacatctgtgttcccagctattcatgaggctgaggtgagaggatcacctgagcccaggaggcggaggctgaagtgagccaagatcatgccattgcactctaacttgggcaacagagtgagatcctatctcaaaaaaaaaaattaatatttttttggtttcctgttaaaaaaaaacagcccccattaagatttgaaaatgtgttatttagtcctataattatctatacaaagatgagacaattgcataaaccaggggtgtccaatcttttggcttccctgggccacactggaggaagaagaagaattgtcttggaccacacataaaatacactaacaatagctgatgagctggaaaaaaaaaaaaaaaaagaaaaaaaaaagggaaaaaaaaagggtcagtgcataaatctcataatgttttaagaatttgtgtttggccacattcaaagctgtcctgggctgcaggctagggattagacaagcttgacataaacaatcccctaagagatgtgaaaaagaaacaaagatcacaaacttcaaaataatttttttcttctcttttatttcttgttttgttttctgagacagggtcttgctctgtcacccaggctgtgtagtgacatgatcatagctcactgtaaccttcacctcccaagttcaagcagtcctcctgccttggcctcctgtgtagctaggactacaggtgcatgcccccacacccaataaattttgtttattttttgtaaagatgaggtttcactatattgcccaggctagtctcaaaatcctgagctcaagcaatcctcctgcctctgcctcccaaagtgctgagattacaggtgtgagccactgcgcctggcctaattttttctttaaaaaaaaatttttttatcctcttccttgtctccatcaaaataattttccatttcaagttcataaaatctattttaatatttttaaaagaggtatagtttgggccaggcacagtggctcaagcctgtaatcccaacactttaggaggctgaggtaggaggatcacttgaaaccaggagttcaagacaagcctgggcaatatagcaaggccagccctgtctacaaaaaataaaaaatcagctgggtgtggtggcccatggctgtattcccagctacttggaagcctgaggtgggaggatcccttgagttcaggaagtcaagctgcagtgagtcatgatcgtgcccattgcactccagcctgggtgatggagctagaccctgtctctattaaagaaaaaaaaagcaccatagtttgtatattaggcatagtttgtataatattagctccatcacccaggctggagtgatacagacttggctagagtacagtggcacaatcatggctcactgcagcttgacctcctgggctcaggtgatcctcccacctcagcttccggagtacctgagactatagacaagtgacaccatacctggctaatttttttttaatttttattttgtagaggcatggtctccctatgttgcccaggctggtctcaaagtcctgggatcaagggatcctcctgccttggcctcccaaagtgctggaattacaggtgtgagccaccacacctagccttgaaagacagtcctaatattgattaaacatatttgttttataacaggagagcatatagacttctatttatatgatgttaaaattatacttaattaattatattttttgtgttttccaactctaattttctttaacttataaaagtaatccatttcatgattcaaataggcataaacagaagtatgaatcttaacaaacttggatgaaagtctacgcttacagctttgaggaggtagcatggctgaaaagtgtatccaccaagggagtctccttaatgttaaaggcatcatcacactcgcctgaagggggctggtcttccatctctgacacatatacttcaccctggtcctcccctttggattcttgctgagcctccccctaggaatgccaggaaacaggaaactttagaaggagatttactttctgcatagtaattttacttgcatagagtaaatgaaggctgcccttaaggtgagaagaggtcaattacataaagctacaaaagaaattaaagaaagctgacttaactagatttaagttaatgagttcttggtaacaatcttgctggaggactttgactctgtgccactcacctccagcaaaatggaaaagcattatttgcccaattctcattggattctttaaaaaccatcatgatcacctgtggccctggagttaactactctagctggccagataattttttttttttttttgagacagggtctcactctgttgcccaggctggagtgcagtagcatcatcatggctcactgcagccttgcactcctgggctcccccgagactcctaagtagctggaactacaggaacatgccaccatacctggctaatttgttttttgttttttgtagagatggtgtctccctgtattgcccagactggtcttgaactcctgagctcaagagatcctactgcctctgcctcccaaagcactgggattacaggcatgagccattgcaccccacctgccagataatattaataatgatgacggtattctaaattttactgattgcttactataagccaggcactgtgctaagtgctttacatgaattatctcatttaaacctcacagcaatcccacaaaatagggtgctattattgcatttctgcagagaaaactgaagttctaaaatgttcactaacatgctaaaggtaacacagctaaaactggtgctaaatccaggatttggatccaggtagtttaactttctggagttagcctatgtgctctaactactctgttctgcttccctaggcagaagaccaacaagacagctgatttaagttaccttcttacctcttcactctctgtgagtagtccctgaactgtacaaataactgagggagctgaagccacctctggctttccattttctcccagtggcttttcagctactaaggggtctcctttagctgaaagctcttcagtctctctgcagagctccctttctccttcgctagctttaatttcccttccttcttgtctggtaccagatggagggcagcagccttcacttgattcgttgctgctgatgcacaagggctccattaaataagctacctgcaatcaaagtttattattagatgcacaggaacaccactgaaaatcatcatccacatatcaacaatgccacatgctaacactgtcacagtgactaagtctgagaggacaaaatggtttaattaatacaatcatctaaaatctgccaaaatatcttatatacacaggcactgggctggttggtggggacactacagtgaacaagaaagatatggttcttgcctcttccaggagtttatgttctactttttcatctcagctgtcaactctgatcaattgggagtggctgtctagaataaagtgttgaaaattttgtctaccacagacacttgtagagagaagtggcaacatttgaaatggatgcttgctgatcttgatctagggtcttctaaatgtgttcaataacagcatacatataactctctgtccaattctgtttatttctggtcctcagcccttaaccaaggtaatgacacttaaaaatactaccttaaagttacagcattttaagcttcaaggaaaatttgggcaagtataacttcccacaactccaaaagcatgaattacaaggatactcataaagcagtccttatgacccaggcccctaatgactgaagtattagaaattcagtcaaaaagcatgttttttttatttttaatttttttacttttgagacggagtctcgctctgttacctaggctggagtccaatggcacgatctcagctcactgcaacttccgcctcccgggttcaagcgattctcctgcctcagcctcccaggtagctgggattacaggcacatgccaccaagcccggctaattttttaattttaattttaattttaattaatttatttatttagagacagagtttcgctctgtcgcccaggctggagtgcaatggtgtgatctcagctcactgcaacctccgcctctcaggttcaagtgattctcctgcctcagcctcccgagcagctgggattacaggcgcccgccaccacgcccggctaattttttgtatttttagtagagatggggtttcaccatgttggccaggctggtcttgaactcctgacctcaagtgatccgcccgcctcggcctcctaaagtgctgggattacaggcatgagccactgcgcccagccatttttgtatttttagtagagatggggtttcaccatgttggccaggctggtctcgaactcccaacctcaagtgatccactggcctcagcctcccaaagtgctgggattacaggcgtgagccactgcacccggcccaaaaagcatgtatttggtgcatattctgtatcagcaccaagtgctgaggacatagcaatgaacttaatccctgccactgtggagcttatattttagtaaacaatattaagagtggtagaagcatgtaaggataagcattctcttagaaagttgaggcttttccagctttggaaataagagctcactgttacctcagagagaaagtggaggaggttctggtggctggctttccttgccgcttcctgagattcctcactgcctccatccccaacaagcagttcactaggttctctctccgggctgctttcctctagttcctcagcctctggatcctcagtttccctccagttgcccacatcaagatccagactggagtcccatgagctgaagagggacctgcagtcattgctcaactcagagtcattgggatgatcttgttcagaatccagccaaacccactcgtgtcccatctgtaaatacacaggaaaacatgcattaaattcattcaaataaatattcctgaggcatctccatctcccgagttcagtagaaaaataaggggccagaaatttatttgtattcaagtattcatcattaggaagaattaaaatcttgctgaagggagacatgagatgaaattatatttgtctttgggaataaagaaagccccatgtcagtataacagagatattgcaccatacaatacagtataatagagacattaatattacctaataattatttttacttggaattcctcatattcacaccaaaagaagggaaagaactggagcatagctagctcaattattttcctctagcccaaatcatccataactaaaccgtaaggcaaacaaattgagggggcaggggatattttcctcagtgtataaacatttttaacctatgaaccattaaaccttcaaaacacactttaggattgcctttggcatccttctggtcatatccaaattgatgttgagaaacattaagcttaaaatatatcttcccttgctctcattacaccactatcttggtttttttatatctttctttgtcctctcccttttacaactttcaataaatccctaccttctatgttcatgcttggtcctctgctttcttattaatgtattttaaaaaaatgtatatatactttgaggtttcaactttgacctctattcaggtggctcccaaatctctctacctttacttcttatatgaattctggtgtcatttctccatgcatccaaaagtcaattccctttagatgctctaccacctgctgtaacatttctaaaataaaaatcacatttcctttatctccaaaatcactgcttcttcccaatttccttatccccatcaccattttcttttcttttcttttttttttttttttttttgaacgaactttcactcttgttgcccaggctggagcacaatggcccaatctcggctcactgcaacctctgcttcctgggttcaagcaattctcctgcctcagcctcctgagtagctgagattacaggtgcccaccaccatgcccggctaatttttgtatatttatagagacggggtttcaccatgttgactaggctggtcttgaacttctgacctcaggggatccacccacctttgcctcccaaagtgctgggattacaggcgtgagccaccacacccgaccccatcaccattttcttagtctacagaacccacaattctgttttgacccttccttctcttatattcagtaagcaagtcctcttcccagttttctcccacaataagttttctcagtgtccatcctttcctgaataaatgccatagtctcctagtcagcttttctatctttaatcctatctgctctcaacaaatatagttattctactcaaggctttataacagctatcacctcaaatataaatttctcaatctgccaaagtcctccacaaatttagccttattttgttcccttcactcacatgtacacctccttattccttagtataatccctgttctaattacatttttctccgtattgccacccaccacccccaccagatgcctacaccttccattcggtttgctagtctcatttatcaccttctctaccaactcaaaacgtatgtcctttaatggaccttttccacacacttctcccagcttttagagcttgtgtttgtatctcatgcctgtttgcagactgctttgggactacaatgttattttttattttcctttcttgtttgcaacatgtccatgtaacaaggaatttcatgttctaactcctggactaattgaatacctttccattgcctcacaaagactgtatcttctcttccttagcatcctaatatagttctattaaaggcaaaaagatctgtgacttctaatcgtatcctcttaaacccttctcaagaagactttgactattagaccaggctccagtgtgacatattgtctaaatatttagttataaagtgatattcatctaatattttttcatcatagccatgtttataataaaaagttcataacttttttttttttttttttgagatggagtcttgctctgtcgccaggttggagtgcagtggcttgatctcggatcactgcaacctctgcctcccaggctcaagcacttctcctgcctcagcctcccgcgtaactgggattacaggcgcccaccaccatgcctggccaattttttgtatttttagtagagatgaggtttcaccatgttggccaggatggtcttgaactactgacctcaagtgatccgcccaccttggcctcccaaagtgctgggattacaggtgtgagccacggtgcccggcactatttcatttcactatttttaaaaatgttggcagggcgtggtggcttatgtctgtaatcctagcactttgggaggccgaagcgggtggatcacctgaggtcaggagtttgagaccagcctgaccaacatggagaaaccccacctctactgaagaaaccacaaaattagccgggcttggtggtgcatgcctgtgatcccagctactcgggaggctaaggcaggagaatcgcttgcacctgggaggcggaggttgcagtgagccgagattgcgccattgcactccagcctgggcaacgagagtgaaactccgaatttaaaaaaaaaaaaaaagtttagttggccaggagcagtcactcatcacttaaaaaaaaaaaagttattaacagaagttggaattgaactgagattttaaatttaggggtgttttttctctgttgcccaggctggagtgcagtggcatgatctcagctcactgcagcctcaaccggccagggttgtgatcctcccacctcagcctccaatgtagctgggaccacaggtgcgtgccaccacacctggctaatttattatttgtagagacaaggtcttgctatgttgcctagactggtcttgatctcctgggctcaagtgatcttcctgtcttggcctcgcaaagtgctgggattacaagtgtgagccaccgtgtctggccaaattcagtaattcttaaaactgggcttagccttcaaacagcaatgttaagaactatatttatttgagaaagggtcttgctctttcacccaggctggagtgcagtgatgcaattataggtcattgccaactttgaattccgtggctcaagagatcctccagccacagcttcccgagtagctgggactacaggtgcacaccaccatgctgggctaatttttttttttttgagaaagggtctcactttgttgtccaggctggtctcaaactcctaggctcaagcaaccctcccacctcagcctcccaaagtgttgggctattttttttttttttgagatggaatcttgctctgttgcccaggctggagtgcagtgacgcgatctcagctcactgcaacctccgcctcccgggttcaagtgcttcttctgcctcagcctctcaaatagctgggactacagacatgcgccaccacgcccagctaatttttgtattttttgtagagacagagtttcaccatattggccaggctggtctcgaactcctgacctcgtgatctgccagccttggcttcccaaagtgctgggattacaggcatgagccaccacgcccggccgccaagaactctttatacagagtctttaaccataaaaacaggaaaaaaatggtaacacactatcctagaaataccatctgcaaagatagcattaagtgagacaaatgttcctgaggtaagggtcaatgctacctatgtccatgctctaatcttctttaagcaatgccatgaacagaattctaaaaaccttacttttcccaaacattcaagaaaatctgagtaaggaagtctttcctgcgcaatgcaacaccttaaggtatattaactataaactcaattctggttgcttaccttctcacactacagcaagcagttcataagacttttcccctgtaacaatctcattcctacaaatgaaatagttatgcagaagaaacaagtttcaaatacacacacacacacacacacacacacacacacacacacacacagaacaagccaaaggctagttttttttttcagtttattgtatacacacacatttcactggtggttgttttttttaaaaagtctgtacaattgacaagacaatacaaactagctacgatctgctagctacacattaggacattaacatagcccatggtttctgccctaaaacaggcaattgtgctactccaactctctaagagagattttccagctcatgtcgtgtggcccaggtacctcctcttctgtaacttccacctctggaactgggcccgcaagcccaagctctatcttgtttacttttattttaggttcggctcaaagagggtaactctgaggcttcactttttcatcttcatatctgcttcaatggcacagcggcgtcccctggttcctccatcctagatgacaggcagagaaagaaagggagcatgagttggtcaggagacaagagacggtgcaacagaaaagttggggatttggtttcttgggggagagggaagagaatcagcagaaaaatccagagggatgaggggcatatttctgtcttcccacagagtggctaaagaacacctggtagtttgtgagaggaaatgtaggatggaatatcttgctcatgcccactacagaggtccttggaattcacctagggtcccacagaataactattagtcatcccacccaggcccaaatcatgtgcaaaggagcaggagagtaaaagaaaggtaggagagtcagaatgggcaatgggtagtgaggttcttgactaacatacctgtccaactgttggtccctataagaaaggcctttcctgcagactgaccctggcactagttccctagcacctcctgacagtggttttccatgagatcaggacaattagaaggcttctttccatctgctgctctctccctgcagcccagctccttcctcttgtgcaatattttgctgtcttcaatagataaaagatcccattaaccagccttgcaatagccagccaaatgctttgcttgggggatccagagtcactgttgtaggccaataagaaagaacggagattataatgttctgtctgtggtacagcctgtaggcaagatgaattactgaaacctttgctgggccaggccatttttacatttctaatatgcaaggactctaaaatttttagagtccatgaacataagttgcccatgaggcaacagtgaaaataaaaaggtggtaaccttgcatgtgtataatgcttttcttttttttccaagccagtttcatatctattatctcattttatcctcacaacatccctgtgaggtaggctggacaagtacctcattatattagcttcatcacacaccaaggaaaacaatgccccaagagattatccaatgaccttaagaccatgtagttttctagcctgatgcccttccattacatcatacctcactgtcccataatgaacaacacagagtcagagccagttaatttatggaggaaagtaataaaagtctttaggctagctctcctaagcttatctgtaattccagcagccactattgatgcagtggtcacttttttttttcttttttttgtttgagacagagtttcactcttgttgcccaggctggagtgcaatggtgcaatctcagctcacggcaacctccgcctcctgggttcaagcgattctcctgccttagcctcccgagtagctgggattacaggcgtatgccaccacacccggctaatttttttttttttttttagtagagacggggtttttacatgttggtcaggctggtctcgaactcccgacctcaggtgatctgcccacctcagcctcccaaagtgctgggactacaggtgtgagccaccacacccagccacagtggtcattattactgagattgtttttttttttcttttgagacaaggtctcgctctgtcacccaggctggagtgcaatggtatgaacagtgcagccttgacctcctgggccccagtgatgctcctaccttgccttctgagtagcttgtagttagggaccacaggtgcgcaccactccgctgcacagctagtagggttttttgttgttgttgccgtttttaaattttgtagagacagggtctccctacgttgcccaggctggtctcaaactcctgggctcaagcaatccttccacctcagcctcccaaagtgttggaattatagacgtaaaccaccacacccagcctatactgagttctttagcttaaattttactgtttgttacattagtcttgcaacttaattttaggagacaagagaaaaactatttgctgagtactgccattatgagaaacactgttaaaaagccagctagcagctcctgctctgaccaattttaaatttgttaagaaaagaattggtaaaaggtgaagtcaggaaatgacgagcaggtacatcctagatccttcacccctagaatacatttcagcccagtgatctcaaaaacagtccctacccagcccacacacacacacacatgcagaaagacaggaatgcagaagaaaagagtttcttattcaatgacctgaataaacagaagttcaagacactgccacagtctgcatgttggatttccctctgccacccacccccattaagagctgagaatctttgtggcaacaccaccccttgcagccattcaatacttacaaagagagagagaaggaaggcaggagagcccattgggacactgtcctgttagaggacaaacaaacactgatcaggttccacagaaactctcagccacaagcaccccaaacctcaggacagagacacaagcaccacacacacaaggacaaaattttaaaactcaagaacaagaggaaagagatccaaaagcaatctgtccattacgcctctagcacagaaactgatggtccccaactgctgcaggctaagccatttcccccgccttgagagcactctcccagaggaattaataattcccctactcatgatttctcccatgtgactgggcctttcggttacaataggcttattcaacgtttagatgggtgcaaaccaccatcattctaagatctatgtgtctgtatatcattggaatctagaagcccaataccaagtagtaacataagggtccttggatgcttcagacttctactactggaacactggcacacaggttccttcctgatcgcctcaccttctctgaagcatcctgtttgcgggtagaatctctccctcgaagacttttagcactgatcccagactcggatgtttgcataatcaactgcgtggccaagaattgctgtagggagaagaaacagggtaggccatggagacctgatttagtagggacaaattaagtacactttaagcactgtaaatagaactttgtatagtactcttctggctcaaatatattttgactgattggaagtttagcatattaagttttaattctagttgcaatagggatgctaaagaatcaagcagccctaacttttttttgctataacataggatcaaaatctctatcctccaggaatgagaaaaataataaaactagaatgaaccaaagatcattcagcaatttaagtaatttgacaaatcgtgcaaagatttgcaatattcttccaagttcaacaccccaaaaagtacctggtaacacaatcataggataaaagcagggaaaaggaaaggagaaactcttatttgctgatcacctactatgtaccaggtacttaatgtaattaaaaaatatacattcaccatttttaaaaaattttatttaaaaactttatgaaactgcaaataattgcccaagaaaggtagaatattgtatcacaactctttcaccacaccaaagaaaataaaagtaagaacaaaatattatgttttcaattgtgtccctgacagctatccacgtaaaagccacagcaacccttcttggcatcaatatgaatcctccccttgaagtattttaatttcatccttgctgaaacacaaaggatcctcaaagtacctggatctgttccaagacatctcgctgcatctccactgccatgtgatagacatcatggtctgagctattgtacattacagcattctgaaacatcagcataatgtcacgctgaaattcagctgtgcttcggatcagtccattttctatgtttttcttaatagttgacaaatccataggcctaaaaaaaaagaacaggggtaagtagcagtggggatggaaagaggacgcacctagatctatgaatacattatcatatagactttctcatatataccttaactcccagctgccaggacttaaatgctaaccccttatcccaaaacatgcacttaacccaagaaacaatctatataataagcattgagaaaggtaataaagggagtttatttaggttttttttggagacagggcctggatctgtcactcaggctgtagtgcagtggcacaatcatggttcactgcagcctcgaacttccaggctcaagcaatccttggttcactgcagcctcgaacttccaggctcaagcaatccttcccacctcagcctcccaggtagttgggactacaaatgcgcgacaccacacctggctaagtcttgtattttctgtagagagggggtttcgccatgttgcccaggctagtcttgaattcctgggctcaagtgattcacccacctcagcacccccaaagattacaggcgtgagccaccgctcctggtggagatttattcttttagactatcagtggtgatctagccactggaattatcagtttagcactcagtgccccttatagcaaaaccataaacttacttgctttaaactttctatcgaaagcaaaacttcactaagactggacaatttataattcaggcaagttaccatgctgggtggaccatggctcacctctgcacaatgctgtggtagccaggtgctatgtcatctgtaacaggctgcaggaagacattggcatacctgtccaaaaggaataaggtgcaattactgacattctccagaagtgcagggagggaacttactctaagtaactaaaggtagtaagaactaataccagcagttccacagaagcctactcagacttttttccagtcaccaacaatgaagagtaggagaaaatgaacctactgactggtaaagcccactcacctatgattagctgcagctctccatacaagcatgatggctttcttccaaattttctgtgcctgaatagcttcctgatcctcactacagacagagctgaaacagagatacagcaattccactaggcacaagttaaaaaataaaaattataattctcttttctttttgagacagggtctcactctgtcccccaggctggagtgcagtggcatgatcatgttcattgcaccctcaacctcccagactcaatcctctcacctcagcctcccaagtagctgggactataggtgcataccaccatgcccagctaattttttaatttttttgtagagatagggtctcactgtgttgcccaggctggtctcaaactcctgggttccagcgatcctcctgccttagcctcccaaagtgctgggattacaggtgtgagccactatgcccagccctaattatttcttgtcagctgtttattccaggtcaaaaaagggaaacactaaagaaaagatcaggccaggcatggtggctcatgcctctaattctactgctttgggaggtcaaggcaagaagactgcttgaggtcaggagttcaagaccagactggaccacatagatcctgtcccttaaaaaaatttttttaaaataaaaatttaaaaataaagaaaaaggccaggcatggtgtctcacgcctgtaatctcagcactttgggaggccgaggcaggtggaacgcttgagctcaggagtttgagaccagcctgggcaatgtagcaaaacttggtttctactaaaaaaattttttttaattagcagggtgtggtggcacaggctggtagtcccagctactaaggaggctgaggtggaaggattgcttgggcctgagaagtggaggttgcagtgagctgagatcgcaccactgccctccagcatgggtgagtgagaacaagaaaaaagagaaggaaaggaaaggaaaggaaagggaaaagaaaagaaaagagaaaagacaggaagaaagacggaaggaaggaaggaaggaaaagatcctctcctcaccttcactgccttggcctcaaagaaagaatctcagatactcacaactgtgaagaagcagggctgctggggatggagtctgccagtgtgtgtgactgcagtgtagcattgtgtatgctgaagccatcatcactctcgctcacaggaggttcattatccatttctgacaagtagccttctccttgatcctcttccttaggctcctctaggctggccgcttcactgacaccatcttcctcctcatcctcacctggggcatccttagatacagtatgctccagttaacaaatgcaagcaaagctatccagcaaagcatcattaaacatgatctgtcttttgggttagaattagttctagaaatgacctcacgctgtttcctgactcagctgtctatcacttatactaccatctacttacagacactgcgttaagtaatttagaacctggacaaagaataatacccaggatcttttaaaaagaaagaaaaaaaaaagctacttacttaagactaagctaagaggcgttccttctttccccttgctcgagagtaactctgaccctgggtacaaagttatcaaaaataatttttattttgtgtctcatttgatggagcaagctcacatcacattctttaagcctctgttactgctgctttaataattctaaaaagaaaactctggatgattctctttggatagtctaattaataaacttgattcctgtatgttctccttggctcaggtatccttattcactacaaatcactctaagtgtatcaagccttcttaaggactgtgtgatattcacatgctgtttcatatgggaggcacctgttgctatagtactcccattatgcctgtctactgcagcttttccccatgcaactccataccagtctcttatcagagaataaagatgtgactttactgaaattcattaaaaagtagtgctatagggaaatctaatcacatggcaagaggaataaagaaaagtctgaaatacctttatctggcttccaaaaatagtccctgattcttctttcaatgagtctgcagaggagagaaagactacctgaagatttttccaccttagccttccccttcctatggaccataatcccctgcagctctcctttacatgctgacctgttctacctcctctacttgcccacaacccacaacccctcagaagccaaagcaaatgatttcaagtcagtgaaagaggactttatttacctgacatttcaaacttgtgctgagtctctgcctctaaaggatcttcaatgggatttgagccatgtgatggagacaacatgctttcaggggatgcctgaaaaccagaaaagaaaaaacaccctaagtactgataaatcgctatagctcacacaactttattcttcagtgataatgagaccatagaagaaattctaagtcctactcatgtaatgtgactccaatggtcaccttaacaggaataagtatatataacactaatcacagcctatgggctttggacacatcaaacatgtcagaactcaggaatgcaactggaaaaccaaaaagcctaagctgtcacttcttatctaaggtataaacctccatctccccagccccgatctttcttaagtacctctgtcttcacatttgtaagtggagtctcatcgcctttcccaatggcaacatctgcttcaacaatctctccagctgcagtacttcccagttcctcatctaagtcctgactcctgagttctggtggctccatacttgtggctggaacaactccagctactatttcggctcctgaaatgactggctctggttctgcaggttccaccttgatctctgcactgggctccctgatgtccaccagttcatgtattcccttgttttccgtttcctcaaagtccagtctctcttgcttgaccgtcatttctggtgcagggagaggtactggcttgtcccgctcctgctggataggatgctcccaggggccaggcagggactgaggatcatcattttcttcacaaaatgacagtgctgcttccactgctgccacatccagcacttcaggatgatcatctacctgtcccacaaaacacaagactattgaggtcacagaaagaagcccaagtccttcaatttttgttagcaccaaatgtgatggcttgaatctgcagcttttcgctccattttttccatgtagtggaggcaaacaatgaagaggcacctgccctgtgcaaaccagtaacatgggtagacctgaggagatgactagtatgttagcaccaaagggctacaaagatggagatgggcagaagtaggagagttgtttaagtaattcttactgtaagaagcaaagcagccgagtatggtggctcatgcctgtaatctcagcactttgggaggccgaggtgggtggaccacttgaggccaggagtttgagaccagcctggccaacatggtaaaactcatctctactaaaaatacaaaaaattagtgaggcgtggtggcatgtgcctgtagtcccagctactcaggacgctgaggcacaagaattacttgaggctgggaggcagaggtaacagtaagccaagatcgtgccactgcacttcagcctggatgacagagcaagactctgtctccaaaaaaaaaaaaaaaaaagcagcagcagcaccaaagtgaggctgaaaagagaagcctatgtaggacccatgagattctctggggctttgctgaatagttaccttgtcctcaatgatggcaatgatgtctccaacagtctcaaaatccagctcttcacctgtgtaagacacagcaatatccatcttctcagccagatctaattcttccttcccatctatgctgggagcctttgatccaacaggagcctctgctacccctgatcgaaaacactcttctttgatagaattgatgatcatggatatttcactgctgtccatggaaacagtcacagtatgtggatcccccacagcctccatgggaacacagttgtcgggttgactcactgagtaacagaaagagaaaagcatctcagaagcttattgggtacaaagcgaccaccttgagatcacataagcgctacagacagatgtcaaatatccaaacacttaaggtcagaaagagtcatcaacatgtgcctatgttttcttctccccagttttatctagaaaggtgagaacatattttcaagcctgctcatatctgtatacttagcctcttcctgcaatacataaatgcccacccacctcttctcacatctatttctaaggatatttatttctaaggataaagatggcacatgtctatgtagaacagagaagaagcatctgaatcggagctgatgctcttggtcatttttctctaactaaagctcaaaatgaaattttagatctagtggctgctcagggacgcacctggagctacactttcagtagtggagacagccggagcagaggatggtgctggcagcgcaggcatcatgacaatggtagcttgggacacagactctacagggggtggcacaagtttaactggaggctcactggcaacagtagtgaaggaagcaagaggtgtggtgaactgtgtaggaccagcttctaaaagccgggaaagagtgggagcacctaacatataaagaggtacacaaaatgaagtaagaagaaagcacataaataagaagcaatagctacttgaagactcaactaagaaaattcttatggtctcaaaggatgagagcaactcctgcattgaataagttcatcatctatatccttactctaaccttacttaagatcttcctccaagttaggaatgaaccaaagcactagaacacacaacatatataaaaaatgggtggtaaggctaggtgcagtggctcacgcctgtaatgctagcactttgggaggccgaggcaggtgggtcacttgaggtcaagagtttgagaccagcctgggcaacatagcgaaaccctgcctctactaaaaatacaaaaaaaaaaaaaaaaaaaaaaaaaaaaaaattagctaggcgtggtggtgggtgctgtaatcccagctattcaggaggctgaggcaggagaactgcttgaacgcaggaggtggagattgcagtgagccaagattgtgccaccacactccagcttgggcgacagagcaaggctctgtctcaaaaaaaacaacaacaacaacaacaaagggtggtaatttttcctcagaggaaaattaatcaccaagaaacgaaaaactggtatgaataaatctgtcgcttctgctgaagttcagcatattgtaaaccacccaagttcaacaccattcaaataccaataaggtttgtatggtattctatggagctttttttatttccctgctttatactttctacctcattaaattctcatcacatccttgtgaagtatatatgttacaataaaaaaggaaactgaggctcaaaagctaagttacctatccaaggtcacaaaaccaatgtgtggcaggcctgagattcaagcccaattctctggttccaaatcttattccactattctataatcttaggtatctctagcaccttgattttgcaagccctaagaaagcagttcaatattactctcaatatccatgctgtggtcaatcagggctatcactatcttgaagatagatggctttataatatggagactacattgtttaccaggtaaagtagctccaaaaaaaagttagaaaaagttgggctttaaatctagcactgacaactgcttagtaacagtgaaactgaggtcagtcaatgtcaagttcaacacctttgaggttgataaaggaaaagtggtaacttacctgatgcagcaggggaggctgcaacagtattgggtgtttgctgtatctccccaccatgtatcatgggaaggaccccgcctacctccaggaggacacctgtactgttcaggtggccagaagccacagccatttcactctcattgacctaccagggaagaatagaggtgaaggctacactcaagctttccttcactaccatttcccaacaaagctccagcagttgatcaaacttcatgaaaactaatagctaatatccacagagaataatttaagacccaagggaaactctaaactataatgttcaaaacttatttgacaagagttctctggagaagagaaccaaaataattgtgattcagatacctcaggacccatgggtactatcaacttactgtatttttaaaaaattaacatttaattaggagatcttttcctcttttgaacttttattccccatgtcacattttaggtcccaggcactcccttccaagtactaaatcaccacagctctcaaacacccacagaagtctccataccagtctggggctagtaggcaggaggctgcccttcttcaagagctctgacagcagaggggaggggggtggagttgctttctgtccaagcatctttttctggggtgaatcatctgttactggggtcatgggggcttctaagggtgcagagcctggaggaagggtgtcaggaatcccaggaaacgaggtgactggggtactcggcaaagtcccgggggttacctaagagacaacagagaacctttatctgacttctcaaactatggaaggttccctactaatctgtatgggttagtgtgtctaactattattttattagtcctgagtggaattgcccagaaaccctctatccctcctgctcttagccatacttttcttccccacaatcttctctttcatccactcaaacccacagtgactcaaccatcccacccaacctgccttttatgaactccttacccactaccaatattacatttacaaggattttgtcccttatttcagcaggaatttcataagactagtatgaaacaatttcttaaaatagttttttacctatctctcaaaaaggtcaaaagcctcaatgcttttaggtccgttcttatctcagagcacagaacatggtaaattaagtctttagcattcagatcaagagaggaagttgcctctaggccaaaagtggtttcctcatcgctcagctctgccggcttattgccccttcactgatcaattcccacagatggaaatatactcaccccagaggtagcctcttccatagtggttggagtcaagtccccaagtggataatcacctcctggggaggcagaatctataggagagcgaaccatcacagtgggtaacctccgggggggtgtttttactgcttgacgagctagaacataaaagagaacaatgtccaaatcttcaagattaaataaatgaaacttgacactagtctgctattatacaataaaggacaaataggtatgttgcattactaaagcagcataataagtttggattagaaagctttaacacttctagagatggataactttttagcctaatttttcctaagggcaattctcacactaagaaactcctttaacaatctcaaactacttaattatcccaaaggtccttggagtgggaaagtagtttaaacatcctttaatattctctttagcaacttactaatattctgcttttaagaacaggaaggccaggtgcagtggctcacggctgtaatcccagcactttgggaggccaaggcaggtggatcacctgaggtcaggagtttgagaccagcctgcgaaaccccatctctactaaaaatacaaaaattagctaggtgtggtggcagccgcctgtaatgccagctactcgggaggctgaggcaggagaatcacttgaacccgcgaggcggaggttgcagtgacccaagatcgcgccactgcactccagcctgtgcagcaagagcaaaactccgcctgggggaaaaacaaaaaacaaaaacagggaaagacctcactggcgcacagcatgtattcctagagttgtaaatgcttaaatttctcctcatctaatgactgagctattctcaatcttttcacaggcccttgacttctaaaacattatgttcaatatctcatcaagcctttgtgtcctgaagttaatttaaggtctagtgagatctgagcacaacgcatgttctaggagtttcttcttaagacattaagggatgtttttattctggtagaagagaaaactgcaagtaaatttaaatcaatgtattctatgttacaaaacagtccaactgtcattagcatgcagtactgtgcaatcaattgctaaagaggcatactaggttcagcttaccctggtatgcagcatctgtagccttcctctttacttcagcctcctcttcttccaatttctttttcctaaacagggaattaagggttagatgctagacagctctggctcctccccagagttcacagaacccttacaaagtaattttttttgccaggccagcactttctggaagaaaggcctaaacaggaattctaaccagcaaaacagtgaattggggtatactgcctaactcccagttcttcacccaggcaaactatagccactcttaagttagaactaagttatgttttcatactgaaatgtcccattatattaccttctaggactcactcccccctcccagccaccaaaccactttgcagctttccccttccagaatctgtctcaagtctaaagggacggcaattggaggaaataagccagattacttgaggggaaaagagggtaaaaagaaagaagcacagaagaacaatataatataacccacgttgcaatgtcattgcaaagctcatccagtctgctgtccatgtgtccagcttgaattagttctgcatctctctttagccgtctataggaagaaagagaggtaggtagactgggttttttaatctgctattttaaaagttctgaccagtaccagaagacagtcccttatgtctttctcaattttttggcattctctctgataagtacctatatctctcctgggtttcctttatcactttctttagttcttcaactcgctcagcagtcaatttccgaacaataacatcttcaacagtttccaccacttctcccttttcacctcgtttccgtctgtggaaaattgaaaaaaaaaaattcatattcaaataacataacatttatcccctctcctacttgcttttaccacttaatcatagataacttctgctattttttaatcatccagtatcataactaagtataaaccagaattcctcagtaaatactctccactaaagaaatatggctgaagtacctggctttgtactcactttggtgtctcagtggtctctaaaagctccgagtactgggaagcacaatgctattaaaaaaaaaaaaaaagtgaaaatgtgatgagcaaggctggaaagaaatgacctttcaaagtttcaagagattagagtaagatttagagaagagaactatatgtaagacgggagtggtttactaggagggcaagtaactttataatcaaatcagttcaaaataatcaaaacaagacacagaaaaagacagtcttatggactggagtttgtgcatttgcggaaaggcaacctaactgccaatatttatagctaatatctaccaagtagttactacatgcaaggcactgtgttaaatgttttacatgtattacttcaattagcttcacaacaatcctgaagcaactcttttatctctattttacaaatgaaaaaacagaggatcatggcccaaagtttttagatggagtaataatgaacccagatctaattcccaagcttgggctcttaactgttatgcaacaccaataagaaaggtctaatatgatcatacatggatggattagcaaacagtaggaaaaagaaaaaggtattctcaactattttcccacatcatggtataaaagctttgtaactaaaagtcagggcctggtagagaacctactttacaacccaaagactgctctaaaagagcccttgcttgggaacttactttttgagagaaccagtctggagggcggccaggttctgcaaagggcttgattgctctgctaactgataccctacaaaatgaggaaagctttattacacaccaagcagaaaacaataggagaggtatgctgagagtgcaaggcttggagttcaaactttggaataaaaaagatgcgaatggccaggcgcggtggctcacgcctgtaatcccagcactttgggaggccaagacgggtggatcacaaggtcaggagatcaataccaacctggccaacatggtgaaaccccgtctctactaaaaatacaaaaattagttgggcatggtggcatgcacctgtagtcccagctactcgggaggctgaggcaggagaatctcttgaacacaggaggcggaggtcacagtgagccgagatctcaccaccgcactccagcctggggacagagtgagactccatctcaaaaaaaaaaaaaaaaaaaaaaaaagccaatgaatgcgaggtgtgcaatggaccgtgcctgtaatcccagcactctgggaggcagaggtgggaggacagctcaagcccaggagttcaagccacccgaggagatcccatccctacaaaaaaaaaaaaaaaaaaaaaaaaaaaaatcgacaaggtatggtggtgcgtacctgcggcctgtggtcccagctacttgggcagctgaggtaggaggatcccttgagcccaggaagtcaagaggctgcagtgagcccaaatcgcgccactgcactccagcctgggtgacagagtaagaccaccccctccgccattcaaaaaaaaaagaacagcatatatagtatataatcatttgtgttagaaaatgagggggatgaaggggaaaaagaaaatatttgctcacataaaattttgctggagagacacaagaaactgctaacactagtagacgggggatagtaacgggaggaagacactgcatataattttgaatcttatgacttagtatctgctgataaaataataaaatttaaaacttttactcaagtattcttatactatttttctatggctgggcgtggtgactcacgcctgtaatcccaacacttcgggaggtcgaggagggcagactgcttgagatgaggagtttgagaccagcctggccaatgtggtgaaaccccacctctactaaaaatacaaaaattagccaggcatggtggcgtgcacctttaatcccagctactcgggaggctgagccaggacaatcacttaaatccaggaggtggaggttgcagtgagccgagatcgtgccactgcattccaacctgggtgacacagtgagactccatctcaaaaaaaaaaaaagattcttaacactatttatctaataaaaatgtgaggaaatatacagattagattctatttcaaaccagtttacctgttttgtttaaaaatgagctcaatttatatacatatacaaatatatgtgatgtgtatacacacacacacacacacatacaaaacacacattgtttttgtttagacagtatctcactttgtcacccagacttcagtgcagtggcacaatcatggcttgctgttgcttccacctctgaggcttaggcaacctcccactgcagccccacccaagtagctgaaatcacagatgcaccatcatgcctggctaattttcttttttgtagggaacagtttctcttatgttgcctccctggctcaagccatcctcacacctcagcctcccgagtagctggaactataggcacacaccaccagacctggctagtatttttgtgtttttttatagttttgtcatattgcccagactggtctccaattcatgatctcaagcaacctcctgccttggcctcccaaagttctgggattatagatgtgagccattgcacccagccccattctattctctagttctgtgaggtctataatttttcctagattccacatataactgagatcatatggtatttctttatgtgtctggcttatttcactttacatactatcctccaggctcaaccatggaatcacaaatggaggatttaattcttttttatggctcaacagtattccattgtgtgtgtgtgtgtgtgtgtgtgtgtatacatatatattttttctttacccattcatctgttaatggatactataataattaccttaattgtggatagtttcacaaatgtatatatatttcaaaaataccatgtcttatgctctaaatgtgtgcactggccgggtgtcgtagctcatgcctgtaatcccggcactttgggaggccgaggcaggtggatcatctgaggtcaggagttcaagaccagcctggccaacatggtaaaaccctatctctaccaaaaaatacaaaaattagccaggcatggtggcaaaggcctgtagtcccagctacacgggaggctgaggtgggagaatcacttgaacctgggaagcagaggttccagtgagccaagattgcaccactgcactccagcctgcgcaacagagactccatctcaaaaaaaaaaaaaaggtgcagtttactgcacatcaattatatcacaaaaaagttgttaaaagggaagagatgtgacttttcttaccaacccccttccttcttgttgcatggaacaaggatgtgatagctgaaggtcaagcagccaccgtgaaccataagataaccagaagataaactatgcactgaggaaggtggaacagaaagagaatatcctgagcctctaatgtcactgtgaagttgctatgagagctgtggactgcctagacttcctgtatgtgtgacaaaaaataaactcaagttttttttttttttttttgagatggcgtcttgctctgttgcccaggctggagtgcagtggcacgatctcaaatcactgcaagccccgcctcctgggttcacaccattctcctgcctcagcctcctgagtagctgggactacaggcgcacgccgccacacctgatttttgtatttttagtagagacggggtttcaccgtgttagccaggatggtctcaatctcctgaccttgtgatccgcccacctcggcctcccaaagtgctgggattacaggcgtgagccactgcgcccggccttaaacttaagtttttaacccatttctttgttgctattgctttctatatagtgtttttgtttttatggtggccacatattacttcaaaaattagatttaaaaaacaaacaaaaaaaatgctaggaagcatgacaatcagcaaagtactgaattgtttataaatgtggcaagagagttaaattcataatggatgattcaaaagaaagggggtgaggggctgataccgagaaaggtaaaatgatgatagttctaggctgggagtgatggctcacgcctataatcctagcactttaggaggctaaggtgggaggatcacttgagcccaggagttcaagaccagcctgggcaacaagtgacaaaaaacacaaaaaattagtcaagcatggtggcaagggtctgtattcccaactactcaggatgctaaactgggaggatcacttgaggccaagagttggagaccagcctggggaacatagtgggacctcgtctctacaaaaacataaatatttaaattaaaaaaaaaaaaaaagttcagcctgggcaacatggcaaaaccccatccctaccaaaaaatacaaaaattagccaggggtgatggcatgtgcctgtagtcccggctactcaggaggctgaggccggaggatcacttgagcccaggaggcagaggttgcagtgaaccacgatcgcactactgcactccagcctgggtgacagtgagaccctgtctgcaaaaaaaaaaaaaaaaaaaaaaaaaagtcaaacataataaagttactacataacccagcaatttcactccttgaataaaaaactcaagagaattaaaaacattgtccacaaccttgtacacgaatgtgcacatcatcagcattattcataatggccaaaaagtggaaacaacccaattgtctatcaagtgatggataaataaaacttggtatattcatacaacagattattattcagctaaaaaaggaattaagtattgatacatgctacataagaatgaaccttaaaaagtgttatgtcaagtgattaaaaaaaacaaaaaaaagtccagaagagcacgtatcattccatttgtatgaaatatccagaataggcaaatctacagagacaagagagttggctgggtatggtggctcacacttgtaatcccagcacttttggaggccaggactggtgcattacttcaagaccagcctggacaaaacctcatctctactaaaaatacaaaaattagccaggccactcgtggcgcatggctgtaatcccagctacttgggaggctaaggcacgataatcgcttgaacctgggaggcggaggttgcagtgagccaagatctaactactacactccagcctgtgtgacagtgagactctgtctcaaattaattaattaattaatagaaagtagatgagtgcttgcttgggggtggtgaggaggggacaacatggactgacagttaaggagtaaggggtttttcttagaataaaatgttctaaaattagattgtggtgatggttgcacaactgtgaatatactaaaaaccattatattgtacattttaagtaggttaattttatagtatgtgaattatatctcaataaagctgtttaaaaaaagaaatacagctggcctggtggctcacacctgtaatcccagtaggttgggcggatcgctcgaacgcaggagttcgagaccagcctaggaaacatgatgaaacccccatctctacaaaaaaataaaaaaaattagctgggcatggtggtgtgcacctgtagtcccagctactcaagaggctgaggtggaggatcatttgagcctgagatatggaggttgcagtgagccaagatcacaccactgccctccagcctgggccacagagtgcaatcttgtctcaaaaaaaaaaaaaaaaaaataggcctggcagtggctcacgcctgtaatcccagcactttgggaggccgaggcggacagatcatgaggtcaggagattgagaccatcgtggccaacatggtgaaaccccgtctctactaaaaatacaaaattagccaggcatggccaggcgcagtggctcacacctgtaatcccagcactctggcaggccgaggtggggggatcacctgaggtcaggagttcgagaccagcctggccaacatggcgaaactctgtctctactaaaaaatacaaaaattagctgggcgtgtccgcaccactgcactccagcctgggcaacagaaggagactcagtctcaaaaaaagaagaaaaagaaaagaaagtctacttacagcttaatatgattaactatagaaatctaccgatgtgaaagagtatctaacaatttctaagacccagaaaagctgacatcctagataccttaccaattttgatcgccacttctcatgacagaagatgctaaacatagcttctctcggatggaccatggctctgtggggccagtgcttagcagcttgtgttctgggaaagggagaaaaaaaaaaaagccttggaaacaaccactgagactgtagtgctaagctccaaaatccccaaaaagaggactaaaagcctaatacaaaacatcccaacttgttaggacaaagtgagctactataaccaaatcttgattttcacctctccaagtgaaatatcaccagtgaccggggtacctattcgttgcatgtgaattattaacattttatttcttaaaacgccatggcttgaagctccgctttattaagaaacagggaatgtcagattaggcagttctccctaaaagcccagttttaagaatactggactttattccagtttgaacttattcagggcttatttcccaggaacccgagcggccagcccctcctactaccccgcctccctcttagcataaacttgtttacttctctcagatcctctactccaaatgtcgggggtaaaagagcttttcagtccaaaaaaagaaaaatggctgaaatccccgagatgcaatttcctgagtggcaagaaaagctcatggttaaaagaccccacttccactgcctcacaaacgtcagacaaaaaaatgaatggctctttgaggtgccggttactccgtctggctcataacatcttttcgtctgcacgcccaagtttctagagtgcttttacggttaacccgcagagttcctaacacactaggattcactaagctgcttctctcacacctccgctctctccctgagaaacaagaccccagatttctgggcccccaaacgttggtcttcacgatgctgtagagcgcaggtctctgaaaaccctgggctctcaagcaacccacttctcccactccctaagcgtgtaacaaaaatatggtgcctagcctcggatctacaaaggcctttcacgcaaaacctgctcagatactcactgcccgttcccgtcgccatcttggccccgaagtctccaaccctgaggagagacggtctggaagggccgaaaccctggaattctgggaaatagtgtaccggcgttggttcgcggtgcctcctgggaaatgtcgtttttccccttaagacaaagcaagcaccctaaaccagttaccctgtgcactcctgttaagattgttgctaaggaaggacaggagttggctgctgaagcctcaagatttcctttaggctcttaggtaagaaatgtctaaggttcaaggaaaaaggttaagttggaagaatcccaggcaaaataagtgcgaatccacgaca

SEQ ID NO: 1182 - DNA, 2241 bp, Homo sapiens
agtagtgtaatcacagctcactgcagcctcaacctcctgagctcaagcaatcctcccacataaggctttcaagtagctgggagcacaggcacatgccaccaagccggggtaatttttaaatttttttgtggagacagtctccctatgttgccagggtggtctcaaactcctgagctcaagcgatcttcctgcctcagcctcccaaagtgctggaatcaaaggcatgagccaccacatctggcctatatatacattttcttagattatgctttacatcggtggttttcaaactatattccttggagcctaggtttctaaagaggtacccaggctgggcatggtgactcacgcctgtaatcccagcactttgggaggccaaggtggacagatcacctgaggtcagaagtttcagaccagcctggccaacatggcaaaaccctgtctctactaaaaatacaaaaattagccgggcatagtggcgcacatctgtagtcccagctactcaggaagctgaggcaggagaatcgcttgaacctgggaggcagaggttgcaatgagctgagatcgtgccactgcactccagcttgggtaatagagcaaaacaacatcttaaaaaaaaaggaaaaaaagaggtatgattctgtctcaaaaaaaaaaaacaggtacctcaagggttaaaaaggtagcattctgaccaggagtggtggatcacgcctgtaatcccaccactttgggaggctaaggcgggcggatcacctgaggtcaggagttcgagaccagtctgaccaataggaagaaactcggtctctactaaaaatacaaaattagctgggcatggtggcacatgcctgtaatcccagctcctcaggaggctaaggcaggagaatcgcttgaacccaggaggcggaggttgcggtgagccaagatcgcgccattgcactccagcctgggcaacaaaagcaaaactccgtctccaaaaaaaaaaaaaaggtagcgctctaagtttccctctcacacaagaatcaaagcagttctattctcattggtcttaaaaagtggaagtgaaagatttcagctgaagaaagtataagagccatctgtcttatatcaactggtgaataaacaaaatgtggcatatccaaacatggaatactactcagcaataaaaggaactactgatacatgctacaatatggatgaacctcaaaagcatgctaatggatgggaggctgaggtgggaggatcacttaaggtcaggagttcgagaccagcatgggcaacatagtgagaccctgtctctaaaaataaaaagtatccaggtgtggtgatatatgcctgtagtcccagctactccagaggctgaggcaggagaaagcttgagcccaggaattcacgccactgcactccagcctggtgacagagagagaccgtgtctcaaaaaaaagctaactgaaagaagccagacaataagactaaatattgcaagaatctatttatatgaaattcctggaacaggcaaaactataaagaagcaaagcagtggttgctgggggatgggaatgggactgactgcaaatacacacgagggaactttttggggtgatggagtattctaaactggattatggtaatggttacaactgcataaatttacaaaaactcattgaaatgtagacttaacattttatggtatgcaaattatacctcaataaaactatgtgtttttttggtgtcttttttttttttttttttttgagacagagtttcgctcttgtcgcccaggctggagtgcaatggtacgaccttggctcactgcaccctccgcctcccggattctagcgattctcctgcctcagtctcctgagtagctgggattacaggtatccgccaccatgcccggctaattttcatatttttagtagtgacagggtttcaccatgttggccaggctggtctcgaactcctgagctcaggtgatccacccgcccaggctggtcttgaactcctgggctcaagtaatcctcctgcctcagcctcccaaagtgctgagcccctgcactggcctaagctatattttttttaaaaagaatgaagagctacaccaagactaagaaggattttcatgaaatactgttgaatgagaaaaccaaaatgcagagtatgtatataatatcctatttttgtaaagcaagcagcccattaaaccttgcatatgtatatatacatattccttttaatgtg

SEQ ID NO: 1183 - DNA, 38771 bp, Homo sapiens
  misc_feature (7892)..(9416): n equals a,t,g, or c
gtgacttgtagctttaacaaaaattaggttccctagttgcagctgccagggaaagctagtctaatatcaaagcaaaccatccttcttctcaagcacagagtttttaagataggagtgtgtgtgtattgacattttcctagcagtggctgaagtcaaggaccaggagatttagggcccacttggagttcttatggtgaaacagtagtagcttcctagagacctttaaagcttatctgtaatttgtatagttcagaagatactgtatacatcattatttctccctgctttcaaaacaggaagggggtgtggagagtaacacactaaaaaaaggataagtaattaatttctgggtaagaatttccttttggcttaaaatggactgatggtgtaagttcctccctttgcaagcagaagctttgaagatagtgagctagatgaagctctggacatcttgaatgaagtattctgtataagaaccaagtgtataataactgttagtaatagaggctgctcatagaaatgtcattgcattataattgtagggacagtttgtcagagagtaggtagaagattatcagacccaggttttgttcttggctcacatgaagtcatcaagtaggctatttaaatgcttcactttaaccataggctaagattaaattaaaaataaaaagcttttgtcatggccgggcacagtggctcatgcctgtaatcccagcactttgggaggctgaggtgggtggatcacctgaggtcaggaatttgagactggtctgaccaacatggtgaaaccctgtctctactaaaaatacaaaaattagccgggcacggtggtgcacgcctgtaatcccagctactcgggaggctgaggcaggagaatcgcttgaacctgggagggggaggttgcagtgagccgagatcgtaccattgcactccagcctgggggacagagtgagactccgtctcaaaaaaaaaaaaaaaaaaagcttttgtcaattaaagatgcttgtcagtactgagtattcatgttgctatggcacttttataagaaaactgtacacggtcatatctgcttccgaaaataatacatagtgagatagtaattttacaggcaattaagaatttgctggccaggcgcggtggcttacacctgtaatcccagcactttggaaagccaaggtgggtggatcacctgaggtcaggagtttgagaccagcctggccaacatggcgaaaccctgtctctactaaaaaaaaaaatccaaaaaattagccgggcatggtggcaggcgcttgtaatcccagcaacttgggaggctgaggcaggagaatcacttgaacccgggaggcagaggttgcagtgagccgagatcgcgccattgcactccacctgggcaacaagagcaaaaactccgtctcaaaaaaaaaagaatttgctataatagaagatccatgtgtacattctgtatgcaaatcttaggaagatattagatcccagaaggttaaagttccgatctctatatatttgtatatgctttaaggagaagtggcatccatgtagatgtggtaaatggcttataactctcgaggtttccaatttctgctgtggtagcaattctaaactcagatggacttggacactactctggattactgtccctaaatatcaactactgtttataagccagcagaggccaactgaaatagtacacataaagttcctacagcatatccctcagtcagaagtggaaaagattgattaaagttggagtataaacatatggggccctgaccaaaaatattgaaccgtactactagaaatccccattctttagctaaaggataatctgacttcacttttaattcttcattgactattggtgctctgaaagaataggaaataatagcaaaacatgggaactcctagatagcatacatttatttttaaaatgtataccatcggccaggcaccatggctcacgcctgtaatcccagcactttgggaggccaaggtgggcggatcatttgaggtcaggagttggagaccaccctgggcaacatggtgaaaccccatctctactaaaaatacaaaaactaactgggtgtggtagcacacacctgtaatcccagctactcaggaggctgaggcagtagaactgcttgaacctggaagacagaggttgcagggagccaagatcacgccactgtactatagcctgggagaaaacaaacaaaaaacatatggtcaacttcccaagtaaactgaccaatgtcagtttaggttcagtcttactgtaggagtgcctgccgtaggccagcgcctctcaacctttccactaagtacattaagatcctaacagtaatcattgggaccccaggtcatcgtctcaacagaagctccagatttcttcaagtcttggccctcttgttttatatcaaaattttatgtatattatttttatattttcaaaaattctccccagatcatcaagtaatattgagatgctgacatagaaaaaagtagatttccagctggtatgatcagtgataaattggacttcatcaaaattaaaagcttttgtgcaccaaaggatactatcaagaaagtaaaaagctatcccacagaataggagaaaatatttgtaaatcataagtctagtattcagatgtctaaagaactcttagaattcaacaataaaaagataacccagtttacaaaatggatatgaatagacagttctctaaaagagacatatacatggccaataagctcgtgaaaagctgtttaatatctttagtcattagggaaatgcaaatcaaaaccacaatgatatatcatttcacacctactaggatggcaataatcaaaaacacacaaacagatgttggtgaagatacggagaaattggaaccctcaagcattgctggtgggaatgtaaaatggtgcagccacttgtggaaaatagtttgtcagttcctcaaaaagttcacagttaccatatgacccagcaattccattcctagggttacacccaagggaactgaaagcatagattcacacaaaaacttgtacacaaatgttcatagctttattataatagccaaaagtggaaacaacccagttgtccaccaattgggacaaattgaatgaatacacaaaatgttatatccacacaatggaatgttattcagccataagaaaacaatgaaatcctgatcacatgctgcgacacagatgaaccttgaaaaattgtgacatgaaacaagccagacacaaatggccacatattgtatgattccatttatatgaaatacccagaataagctaattcgtaaagacagaaaatagattggtggttgctaggggataagaggaagggtgaattgggaatggccactatgcggtacagggtttctaatgttctggcattagatagcagagatgaaaatgttctggcattagatagtggagatggttgcataacactgaatatactaaaatccactgaattgtacacttaaaaaaatgaagaaagaaggactatgcatgatcaaagaaaaaaatgctttgtgctcaagtagggatagaataaacagtaagactggaaagactgtgaagggccttgaatggcaagctaaggaagttagctttcatcttatagatcgtaggaagccaccagagtattttgagcaggggtggcatgtttaaggtagtgttataggaagtttaatttgtgaaatgagaaagagatactatcagccaggagaggtagaaggttctataaagtcaaattgaacacccgaagtttcagatttcatgaatgaccctgggtatgtgtgtatacacatatgtatgggatttgtagtcatctggggaaggctgaggtgctaatatgaatactgaaaactagagagggtaatatagcagagtagttaaaaatgaaaacactctgaacccacatgctgtctgggttcaaattccagctgggctaccttccagcactgtgaccttaggtaagtcactaaccctgtctgtgcttcagcttcctcttccgtaagataaggatacctactcatcaaggttgttttgaggattaagtgggttaatacatacaaagtgtttacaatgtcaagcttaaagaaaggtccccaaaaatgtcagctgctagtctgaaactccagagcaggtttgagagtaacccgctgttgttctctgccccggataaactatgaagtaacagtcctaaagtgttaaaagacaaaacaaatttttctttgtgaaaaatgaccctttaaaaaaactccatctactaataatgaagcttagtagtagtaaaatgatgatttttagccataaaacgggttttctatatcttcacaaatatagtgtagagtttcacaatattctttgatatgaaccagtctctcatactttctgtatagcactgattcgctaagtaagatgccaaggcatgacctcccttcaggaattgggaatctgcatttttaataagcatcctaggtaattcttttttttttttttttttttttgagacggagtctcgctctgtcgcccaggccggactgcggactgcagtggtgcaatctcggctcactgcaagctccgcttcccgggttcacgccattctcctgcctcagcctcccaagtagctgggactacaggcgcccgccaccgcgcccggctaattttttgtatttttaatagagacggggtttcaccttgttagccaggatggtctcgatctcctgacctcatgatccacccgcctcggcctcccaaagtgctgggattacaggcgtgagccaccgcgcccggccgcatcctaggtaattcttatgcatgatacaggttgagaccagtgccatgtacagaagtgggaaaaatggcttatgaaactcagttgtatttagcacactgtgttagacataaaatttgaaaacccaacctggacaacacagtgagacccagtctctactaaaataaaataaataagtgaacattgaaaaccaatggatagtagaatgtattcagttcagtgagacatgaaacaatatttttgcttaattgaatcaaacatatgttaaaaaaaaaaaaaaaactcaccctactcccaaagcactcaataaattcttcagagaaaaggaagagctttttgtactacattgcctctaaaatcttctgtaggataagacattttaagatcacttaaaatcttgttttaagtttttaagtctcattttaataaccaaataaaatggtttttatttgagccagtttcaagttcttaaagtgacacataggacttaacaaaatccattagttgtcatttgtgctttgcccatttttactgatttcttcatactctgaaggaaaaaaaatgctacaaatgtatgttggtatataagagagtgcattccataaatattagaaattttttttttctttttttgagatggagtttcactctttcgcccaggctggagtgcagtggtgccatctcagctcactgcaacctctgccttccagtttcaagtgattctcctgcctcagcctcctgagcagctgggattacaggcgcccgccaccacgcccagctaacttttgtatttttagtagagatggggtttcaccatgttggccaggctggtcttgaactcctgaccttgtgatccacccacctcagcctcccaaagtgctgggattacaggcgttagccactgcgcccggccagaaaaatattttatagaattcaaacttgtattttcttttgaagggatataaaaagggtgagagaacccaacaaccacacttattcaaatttataaggataattaggagtattctcatggttatctttagaatcttagcagggtaaaaaagagtttattgtttcatttgctgaaactcctgagaagaagtctcaccacatttgtatttacagagattagatttggcaactctaaagacaagagaaattactcatgataagtgtttggaggggttggagagaaaacagctaattaggcacttggcagtgtggcagggcaacctttgggcaacccagtccagattaggttagaagaggagcacggaccttttgtccactgcaaaccagtgccacaaatgaagtgggaagagacaggttaccacatactggttggacttgagagagaaccagaaagtgtacaatcccataagcataaaaaatggggataaaacttcaagtgtatataagggtaagaacaggaggaagcagtaacagagagggcaggagagaaagatcagaaggaatcggacgcctgagaagaggaactgggggctgagtcctgtcctggcctggccgctccccattcctccctctgcctctgagggcttcagttttcccaagtgagaaacagctgtgctagattgcttctacagtcctttccactcctggaccgaaacagttgcccctgcatctaaaatacgtagctctagcatataaaatgcaggttacctcaactcccccccgactcccacatctcactcccttcctttccctgcctgccctaattctggctgcgttctgttcttgcctcatatggactctttttctcctccccttcttttccaatgtcatgcagtctcttaacactgggtttcaaccactatacagaaaaatgttagtgaaaaaggaagaggggttccatgctgcttgattctccctaaccaggcacactaaactaggggtgacagtgtatcacaaagtccagactcacagtcttgctgccccttctcctcttcaaagtttgtttccgaagtaccaccccttgcacctcacatcccagccaactctgcctacctgtcagccccagccctcctcaggcctgcctcagcctcacagccaggatcctaccaacaccaacaccgcgccaaataacccctcccaaaagcctcaccggaactaatctggggactctgcctattattaggaacaccttggatgaagcccctacccgcagaattctggcagtagcagcagaattttcaggcatgtgcctaattttgttggggtggtggttgattattttttttaaatctaggatttctgggatctgaagcttatacaatcttggatatcttctttaagaaaaagaatacaaaaatatcttctataagttttacaaaaatatatgaccatgtgagcacgttgctagctcccgcccccaccccaccccccagagccttggaaggggagtgaaactgaagcttttttagcttcatggcaaatatgcttcttcctgagagtactgggtacattcacagacctttattttttactttctatagatttaatttagttaagtcagttcgaagcgggcaaaggccaaaatttctcacccctaggtggctcaaatttctgagcctgagattttatatcttaaaatccattaaaagaatactcaattttcggccgggcgcagtggctcacacctataatcccagcactttgggaggctgaggcgggcagatcacgaggtcaggagatcgagactatcctggctaacacggtgaaaccccgtctccactaaaaatacaaaaaattagccaggcgtggtggcgggcacctgtagtcccagctacccaggaggctgaggcaggagaatggcgtgaacccgggaggcggagcttgcagtgagccgagatcgcgccactgcactctagcctgggcgacagccgtctcaaaaaaagaatactcaatttttaagaagttaggtgtaggtatgcttatataaaatatttagacatgcataagtattttaagtggcctgaaggaagtacatgtatgctacttttgcaaatattttcgctttttttttttttttttttgnnnnnnnnnnnnnnnnnnnnnnnnnnnnnnnnnnnnnnnnnnnnnnnnnnnnnnnnnnnnnnnnnnnnnnnnnnnnnnnnnnnnnnnnnnnnnnnnnnnnnnnnnnnnnnnnnnnnnnnnnnnnnnnnnnnnnnnnnnnnnnnnnnnnnnnnnnnnnnnnnnnnnnnnnnnnnnnnnnnnnnnnnnnnnnnnnnnnnnnnnnnnnnnnnnnnnnnnnnnnnnnnnnnnnnnnnnnnnnnnnnnnnnnnnnnnnnnnnnnnnnnnnnnnnnnnnnnnnnnnnnnnnnnnnnnnnnnnnnnnnnnnnnnnnnnnnnnnnnnnnnnnnnnnnnnnnnnnnnnnnnnnnnnnnnnnnnnnnnnnnnnnnnnnnnnnnnnnnnnnnnnnnnnnnnnnnnnnnnnnnnnnnnnnnnnnnnnnnnnnnnnnnnnnnnnnnnnnnnnnnnnnnnnnnnnnnnnnnnnnnnnnnnnnnnnnnnnnnnnnnnnnnnnnnnnnnnnnnnnnnnnnnnnnnnnnnnnnnnnnnnnnnnnnnnnnnnnnnnnnnnnnnnnnnnnnnnnnnnnnnnnnnnnnnnnnnnnnnnnnnnnnnnnnnnnnnnnnnnnnnnnnnnnnnnnnnnnnnnnnnnnnnnnnnnnnnnnnnnnnnnnnnnnnnnnnnnnnnnnnnnnnnnnnnnnnnnnnnnnnnnnnnnnnnnnnnnnnnnnnnnnnnnnnnnnnnnnnnnnnnnnnnnnnnnnnnnnnnnnnnnnnnnnnnnnnnnnnnnnnnnnnnnnnnnnnnnnnnnnnnnnnnnnnnnnnnnnnnnnnnnnnnnnnnnnnnnnnnnnnnnnnnnnnnnnnnnnnnnnnnnnnnnnnnnnnnnnnnnnnnnnnnnnnnnnnnnnnnnnnnnnnnnnnnnnnnnnnnnnnnnnnnnnnnnnnnnnnnnnnnnnnnnnnnnnnnnnnnnnnnnnnnnnnnnnnnnnnnnnnnnnnnnnnnnnnnnnnnnnnnnnnnnnnnnnnnnnnnnnnnnnnnnnnnnnnnnnnnnnnnnnnnnnnnnnnnnnnnnnnnnnnnnnnnnnnnnnnnnnnnnnnnnnnnnnnnnnnnnnnnnnnnnnnnnnnnnnnnnnnnnnnnnnnnnnnnnnnnnnnnnnnnnnnnnnnnnnnnnnnnnnnnnnnnnnnnnnnnnnnnnnnnnnnnnnnnnnnnnnnnnnnnnnnnnnnnnnnnnnnnnnnnnnnnnnnnnnnnnnnnnnnnnnnnnnnnnnnnnnnnnnnnnnnnnnnnnnnnnnnnnnnnnnnnnnnnnnnnnnnnnnnnnnnnnnnnnnnnnnnnnnnnnnnnnnnnnnnnnnnnnnnnnnnnnnnnnnnnnnnnnnnnnnnnnnnnnnnnnnnnnnnnnnnnnnnnnnnnnnnnnnnnnnnnnnnnnnnnnnnnnnnnnnnnnnnnnnnnnnnnnnnnnnnnnnnnnnnnnnnnnnnnnnnnnnnnnnnnnnnnnnnnnnnnnnnnnnnnnnnnnnnnnnnnnnnnnnnnnnnnnnnnnnnnnnnnnnnnnnnnnnnntcacgcctataatcccagcactttgggagtctgaggcgggcggatcaccagaggtcaggagttcaagaccagcctgaccaacatggtgaaaccccatctctactaaaaatacaaaaattagccaggcatggtggcacacgcctgtagtcccagctacttgggaggctgaggcaggagaattgcttgaacctgagaggcagaggtttcagtgagccaagactgcactactgcactccagcctgaggaacagagcgagactctgtctcaaaaaaaaaaaaaaaaaaaaagaatgtaagtaatttgcccaagctgcagagctaaattttaaactagataattctgattccaaagcccagataatctggctagaagttgcaccaggggattcactgatttacaaagaattagaatgtgataaaattccctgagtacaggcaagtgtgatttttatctttgctagtaaagccatttagatgtcttaaagtgcctcaatctgttgcacctgttctactaaaacaaagaaatgagtcaacggcctcttttagctttaacattctctctgtctatacatttttatagaataatttttagttattgcagcaggtttcaccagtcagccaacgggtgtgtataacattaatcactagcactacacctcagaagtcttgcttattaagagcactcagcttaagtgaagaaattaaagaattttggtaggcctttgggacagttcaagtttaggttgtttggctgggttgagagagtaaaaaactaacatttcttaacctaaccctttttctttctttctcacaggtaacaactatccaatagcttacctttaaaatgtcccctctattgttcctccctcagacatttttgatcacttgtcccagtttccatgagtcctgtatcacagctgtcacaatgcttgagctatttaggtggaggtaactttcagaaatgaactgctgaagggtgcagagtgctcaagaattagattaacaaagaaagtacacctaaatttagcattaaaatgaacttttaaaatatttttcaataggaggataagcaaacataaaaatgggtgtgcttatgtctataaacaggtgctggagcatagattgttatctggacatcaaagaataatagagctgtagctttaaaagagcacacagctggttattagtgattcactcccaggtcactgccaagtgccaaggcatgtggcaagaatagtagaatggaaatcaggtgatgtggattctaatttgagctctgctctgttaaccttgggcatgccagttatcccctttggaccttagtctcttatctacctaatgaagggtttggagcaggtaattcttcagttctaagtaagaatctgtattcatgaataactgttcagcatatgactcagcccaaggtgtacaggattgctggagtgtggaaggtatgttggctcctgcctgtactagcaacaaggcttaatctagtgaacagaaaggatcaaaggtggctatatccccacctaaatgtccatgatctacaagtgctcttctagctggcagagtgggtcagtaatgagattttgtatctcattatatgaagttctaagcactgaacctaatcagttacccatcacttaagtagacagtgtcaggcagagcttaactctccttcctattttcctttgtcttccttttctctgtaagttctctaacataaggaacttccattttggtgaaagaatagaaaagttgagggacaggccaggtgtgttgtaagtaagactgatccagctgattggtttgccatttagattgcatggcagacatctgccataagcacttaaaacacaccttcaataggcattagaaagcacacacacggccaaacatagtagctcacacctgtaatgccaatactttgtgaggctgaggcaggaggattgcttgagcccagcagttcaagaccagcctgggcaatatagcaagatgccatctctacaaaaaattttaaaattatctgaatgtggtagtacattcctgtggtctcagctactcaggggtctgaggtcggaagatcacttgagcccaggagatcaaggctgcagtgagccatgactgtgccattgcactccagcctttgcgacagagcaagaccctgcctcaaaacacacacactgactagggatggtggcttatgcccagcactttaggaggctgaggcaggcagatcacttgaggtcaggagtttaagaccagcctggccaacatggtgaaaccctactctactaaaaatacaaaaatcagccatgcggccaggtgcagtggctctcgcctgtaatcccagcactttgggaagctaaggcaggaggatcacctgaggtcaggagttcgagaccagcctgaccaacatggtgaaatcctgtctctactaaaaatacaaaattagccccgtgtggtggcgcctgcctgtaatcccagctacttgggaggctgaggcaggagaatcacttgaacccaggaggcagaggttacggtgagccgagatcacgccattgcactccagcctgggcaacaagagcgaaactccatctcaaaaaaaaaaaaagaaaagaaaatcagccatgcatggtgacacacagttgtaatcccatctacctgggaggctgaggcaggagaatcgcttgaacctgggaggcagaggttgcagtaagccaagattgcaccactgcactccagcctgggcaacagagtgagactgtgtcttgaaacacacacacacacacacacacacacacacacacacacacacacacacataatttgctgttgttttgggggcatggcggcacatacctatagtcctagctacttgggaggctcaggcaggaggatcacttgaacccaggaagttgaaactgcagtgagctgtgattgtgccgctgcactccagcctgggcaacagagtgaagtactgtctcaagaaaataaaaaaataaagaaataaaaacataaggtttagatggcaactttaaaatgtgaaaggaggatatacagtttttcaaaattcttctaggagctatgccagcaaaaaggtttgaagacctgaagaccattatatcagtggcataaacatctttaatttgtccttttccttctcctacacctagtcaattgattttttttttcccatttatcaatttcagactctgcctggtttttcactttcccatccattttgttacaatatttttcctcccttgaaattagcccagtctcttggagtgaatgccccatgctccttcctaccgctgtgtctttactacattatcctcccttggaatgccgtcatctcttctctgttcaagaactacttctcccgaccactgtggtcgagattgatttctctttaacctctacaacattggctattccatacagttagcccttagcatagaacatcattgtttgattttgctccttaagaatagaaagcacctcttaaaattctaccatattcccccaatgcctaatgcaatgctaaccacatagtgagtgcttaataaatattgtattgactgcctagagtacagagcacttgttcactcattgttcggccattcagctaatactttttgagaaattttgtgtaccaggaactgtactatgcactggggtacggtagggactaaagtagatgataatccctgctttgaaagactgaaaagtaagatatatggtatgtcaaaaggtaataagtactgagaagaaaaatagaaaaagcaggaaagaagaacaagaagtgtgtgatgggggagggttacagggtggggaggggtagtgttgtatacacttctagataagatagggaagtcctcactgatacttatggtgacattttacaaaggacctgaggtgtaggaaggatttgagcttatctgtgcaaagagccttccaggcaaggaacttaccatgtgaaggcaccaaggctggacctgcttaacattccaggaagggaaagctttggggctggagcagaagggtagaggccagattgagagatgagtcagaggacagtggggcccgggcagagggacagaacctgcgggtgctggcaatcagccttttgatctgagtgagaatagaggccttgagagggctttgagcagaggagtgacctgctgacttaagttgaatagaaccctctagatgcttcattaaggctagactgaagggaggcaaaggcagggtgagatcagtcaggaggcaagtatataatgataatacattgaatataataatgatatattaataataataatccagagatagtggcaactcagaccaggggaagcagtagaggcggagagaagtggtcagattttggatttattttgaaggtagaacagacaggattgctgactctgttgagtagtcagctgggagctattgatggtttctgagcaggagctgaaggaagattaccccggtataggactgctgggaagacgtggtgcaggcagagatcaggtaggaggccattgcaaggatttaagggtgagatccataagggttttaactgcaaatcagcagaggaaaaagggagtggtgatggtcatggtgacagtgatggtgagagagactggaaaggaggaatcaacaggatttcatgactagataacagagaaccaatatgaagaaggaaaacactttttttttttttttgagacggagtctggctctgttgcccaggctggagtacagtgagacgatctcagctcactgcaacctccgcctcctgggttcaagcgattctcctgcctcagcctcctgagtagctgggattacaggcatgcaccaccacgcccggctaatttttgtatttttagtagagatggggtttcaccatgttggtcaggctggtcttgaactcttgacctggtgatccgcctgccttggcctcccaaagtgctgggattacagacgtggagccaccatgccctggcaggaaaacacacttttgaatgttgtgtgacctggagaatggtaacactgttaatttaaaaaaaaaaaaaaagcccagagaaggctgatttagggagaaatttatgccttagttatacagagtttgagatggtaatgaaatatcaaattaaaactgtccagcaaggaagtaggaaatgtggaactgaaaaagaagttagaactaaagatgtggatctgtctttggcataaagattatattaagttacttgagagtagatgagtttccaaagaagcagtgtagcaagaatagtggagggccaagactggatcctgggggtcagcaacatctaggagccagaaaaaatgccttcggtgaaagaaacggaaagatgggtctattcaaattgtagtcagccaacccatgccagaagtaagcacagaaagtaagagtgaacattggccaagcacagtggctgatgcctgtaatcccaacactttgggaggccaaggcgggcagattgcttgagctcaggagttcgagaccagcctgagcaacatggtgaaactccaactctacaagaaattagccggtcctgtgcacacctgtagtcccagctgctagggaggctcaggtgggaggatcacttgaacctagaaagttgaggctgcagtgagctgtgagcatgccactgcactccagcgtgggcaacagcccggtggctcacgcctgtaatcccagcactttgggacgccaaggcaggtcgatcacttgaggtcaggagttcgagactagcctggccaacatggagaaaccccatctctactgaaaatacaaaaattagctgggcatggtggtgcacacctgtaatcccagctactcgggaggctgagacaggagaatcacttgaacctgggaagcggaggttgccgtgagccaagatcatgccactgcacttcagcctggacaacacagagagactctgtcccaaagggaaaaaaaagaaaaagatccaggagatccattcctaggtatatacccaagagaattgaaaacataaaaacatatgttcacacaaaaacttgtacatgggctcatacctgtaattgcagcactctgggaggccaaagcaggaggatcatttgaggccaggagttcaagaccggcctaggcaacatagtgagaccctgtctctacaaaatgcatgaatgtttgtagcagcattcttcataatgttcctaaagtggaaacaacccagttgtttgtcagctgatgaatgggtagattatatgcagagtatccaggctgggcgtagtggctcatgcctgcaatcctagcactttgggaagctgaggtggacagatcatttgagctcaggaattcaagaccagcctgagcaacatagtgagaccttgtctataaaaaatttttaaatgttaaaaaaaagaatgcagagtatccatacaacgggatattattcagccataaacaggaatgaagtactgatacatgctacaacatggatgaaccttgaaaacatgctaagtgaaataagccagacacaaaggtctacacattgcctgacgccatttatatgaaacacctagaataggccaatctatagagacataaagtagatgaatggttgccaggctctgggagttaagagagaatgggaaatgactgccaacatgtatggggtttctacttgaggtgatgaagatattctgaaattagatagatagtggggatggctgcacaaccttttttttttttctttttgagatggagtctcgctctgttgccaggctggagtgcagtggcgcaatctcagctcactgcaatctctgcctcctgggttcaagcaattctcctccctcagcctcctgagtagctgggactacaggcaggcaccaccacgcccagctaattttttgttagtagagacagggtttcaccatgttggccaggatggtcttgatctcctgacctcgtgatctgccctcctccggctcccaaagtgctgggattacaggcataagccaccatgcccggcgacaaccttttgaatatactaaaaaacattacattttacactttgaagggtgaattttatggtaaattatatctcagtagaaaaaaatccaggaaactgtgtatagtcagccctccatatttgtgggttccacattcatggattctaagctaaataataatacaataataaaaatataaataaaaaacaatatgctatatagcagctatttgcattgcatttacattatattaggtattatgagtaatccagagatgatttaaagtgtatgtgaagatgtgcataggttacatgcaatactacaccatattatataagggacttgagcatctgtggtgtctgctgcgagtactagaaccaatccttcatggacaccaagagataactgtattcaaaaccaatgaaaccagtgaaagagaagtttcaaaaagattgaaaacacagcagggcagtcaaggaaaccagggagaaaggaaagactagtggatttgggtattagaagatgaaagattaaaacaaatcattccatatcagcatgcagtccatagactactcctaaaagttcctgagacttctttaaggaatctctttggggtaaaaattattttcatgatactactaagatgtatttgtcttttccctatgttgacacttgcactgatgttgcaaaatggtggtaaaactgctggcgccttagcacaaatcaggacggtgacaccaaactgtaccagtggtcactgcattctttactgccatgcactcacaatcaaaacagagccagtttcacttaagaatcgttgatgaagtggtaaattttttttgttttttttttttgaggcagggtcttacccaggctagagtgcggtgggggcatcacagctcactgccgcctcaacttcctgggctcaggtgatgctacctcagcctcctgagtagctgaggctacaggtgtgcaccaccacacctggctaatttttgtttttgttttgttttgttttgtttttagagatggggtttcactctgtcgcccaggctaaatattgttaattgtatcaaatgtcagtccttgaataaatcttttttttttaactggtatgcaccaccacacccagctaatttttgtatttttagtagagacggggtttcgccatgttggccaggctggtctggaactcctgacctaaagtgatctacccgtcttggcctcccagagtgctgggaggtgtgggccaccatgcctgatcctgagtacatctttttaaacttgtttgaagaaatgggaaatatgcataaaccgcctctgctgcacactggtagagtacggtggttgtcacaaggaaaagcatttgggcgattattcaagttgcatattgatttagcagcttcttttttcaccgaccaccatttttacttgaaagaatgatagacaaactatggttttagacttaggcatctggcagacagtctcttgaaactgtatgaagtgagcctgtcacttcaaggtaaacaaatgacaatatttgtagccagtgataaaatttacactttcaagtaaaaattagaattttggaaaacttgtatccactcccatgagcttgaccacttttcaatatatacagacttttctgctgaaatcaatggtgaaatttaaggaatatgattttttgatatgtattctaatgaaatatgtcagtatttagaagatctgcctaacaacagggaaccagtattttgcagtgatctatgtgtgatgttacaaagtcatgcatggtaaaatatccattcaaagtgcaagagaagccaatgggttttattataacaaaagttcctaactgttaagaaactactacttgtcaagttttgatgtagcgctaaagaatatccaaaattatctgaaaatgcagatactttctctgtctgtgtaaagccagattttctttgtatattttaaccaaactaacatattacaacagattaaatgcagaagcagatttgagaatccagtcatcttctattaagtcagacagaggccataaatttatgaaaatgtaaaacagtggcattcttctcattagatggctttatttctttgattgttttgggaaatatagtggtttacatttaaagtatgttatttatattaatataatgtgtagtagttttactgttaatatttttactgaattaatcatatcttttactttttttttagttttattttcttccttttttttttttttttgatttggagtctcgctctgttgcctagtctggagcacagtggcgtgatctcagctcactacaacccccacctcctgggttcaagcgattctcctgcctcagcctcccaagtagctgggatcacaggcgcctgccaccatgtctggctggtttttgtatttttagtagggtttcaccatgttggccaggatggtctcaaactcctgacctcaagtgatccacccacctcggcctcccaaagcattgggattacaggagtgagccaccacacccagtttttagtcttattttctaacacagtagacattgatatatagttcccacattaacaaaagttgtttggggtgctcaatttatttatttatttatttatttatttatttatttattttattttaattttctttttgaggcggagtctcactgtgtcgcccaggctggagtgcagtggcacaatctcggctcactgcaagctctgcctcccaggttcacaccattctcctgcctcagcctcccgagtagctggggctacaggtgcccgccaccacacccggctaattttttgtatttttagtagagacagggtttcaccatgttaaccaggatggtctcgatctcctgacctcgtgatccgcccgcctcagcctcccgaagtgctgggattacaggcatgagccaccgtgccccgcttatattttttttatttttatttatttatttatttatttttgagacagggtctcaaaaaaaacaactttgttgcccaggctggagtgcagtggcatcatcgtagctcattgtagcttctgtctccccagactcaggtgatcctcctgcctcagcctctcaagtagctgggactacaggcacgcaccacccaccccacccaactattttttttattttttgtagagacagagtcttgctatgttgcccaggctggtctcaaactcctgggttccagtgattctcccgtctcagcctcccaaagcactgggattacaggtgtgagccaccactcccagccaaatttaccagacttaatggaaacagtccatttctgtttcttcagatgaaacctcacaactttaggattaataagtaatctcacaactattgtacaggaaataagaaaacgttcccgctaacaatgcacgttgtgatagatctggtccctgacacaaacagcacttggaactgagtgaagtccagagactgaataatacagttctatccactccctgtgcttgactacaacccctgaagagggcttgtacaaattaaatgtatcccagcagctgcttgaaagaccacagcattggccgggcacggtgactcacgcttgtaatcccagcactttgggaggccgaggcgggcggatcacgaggtcaggagatcgagaccacggtgaaaccctgtctctactaaaaatacaaaaaattagctgggcgtgatggcgggcgcctgtagtcccagctactcggagaggctgaggcaggagaatggcgtgaacccgggaggcggagcttgcagtgagccgagattgcaccactgcactccagcctgggcgacagagactctgtctcaaaaaaaaaaaaaaaaaacacgcattttgaatgtccctagcattagggattataaaggtcccattctagtagaagatcctcaggtttggagtgtactaaaggtcatcatccttcgcctgctaataaatttctgaagtccctgctttaaacaaacaatcaaaaagaaggaacagttacagtgctgccaaacaagttctttttttttttttgagatggagtttcgctcttgttgccaggctggagtgcaatggcgtgatctcggctcaccacaacctccacctcccaggttcaagcaattctgcctcagcctcccgagtagctgggattacaggcatgcactaccacgcccagctaattttgtattttttttagtagagacagggtttctccatgttgaggctagtctcaaactcctgacctcaggtgatccgcctgcctcggcctcccaaagtgctgggattacaggcgtgagccacggcgcccggccaacaagttcttacaaacctctgggttgttacaaacccatctggtgctaataaaggtaaggcatcaaccccaatctccaagctgagaattttatcctcaggactgagcactgcggcctgcattcggatgttagtggggctgtcagaaccgtgtctcatgctgttaaaagtggaagtccttcccactcagacccacggaagccaactctgatgagtgggagggtgagcagaaggggcttcggtcattttttatagattcttcaggtaactctagccaccatattaagcattggctcccacaaaaaagcattaaggctcagaaacatcttgtagggtcacaccctccctaaaaacagcacatccctgaagtggtggctgggcagccaggctccaaagcccgctgagctgagcggcagccaagaacaaggtttggtgtttacatactcaaaatcagcctgggttgtcacagcaactcacctcagcacagttcttccttctccacggcggcttgcttccaggctttgctgttctccgtcaccgtcttaacgttcctgctaacctggcctgctgcattctttttatttttctcccaattcctccgccttcttctcatgtgtttgctagtgtgcaatacctcacctgtttggaactcaacaacgtcccctcctgcaaaacgcacctgaaaacaagaaatagcacacaaggcctctaagtggccagaacagatgttaccaggcctaagtccataaggaaagcacccaagccccttgcttttgtcttaaatctttttttttttacacctttaaaataaggttatggtttctaaggcctgccgtaaattaggagtagggagaggaactattgccaagcaccccaaaagttcaagaggtgactgttgatcccagagtagcaaggaaagggacagacaggctataagaagtggacacaagaactcagaactcaggacagtgtaggccttgttagagtcaggcagacaatttcacatacctcagaacgtcataaagccatcatgactttactctggaatagatacgatccagacacctagaaaatgttaaattagattcaacttaaagaggcagagtaatatgtgtggtgttttttaatttcgagcattccaaatggttaagggttttcatgcttaaagagagaaacttagctacctagaacttatttatgagtgctctagataattatctactgttttatatttttttatttataccccgttactaaaacaaaagtaaaaataaagcaaaagattgaaggcattgacatttagtctatatactttctagttcctggctctagttcttagcaatatttgctgctaacctggtgttctgtctctgccaaatttctgcccatgtgaaatatatgagacttgatcctatttccttgctcattgatctacctgaaagggtcatagatgtctccacctccctagagctagtgatcctatatcccatcatctcagccagctagaaaacgaaccatcacatgccacctcctacccaattacgtgcttcataaacagaatacctggcatatagcaggcatttactaaacacttggtgaatgaatacatgagccagtaatccataagatatctgtagaattaattacagttgagccttgaacagcgcaggtcctatgggatcccaccccttgtacagtcaaaaatcctcataaaacttttttttcttttttttttgagacagaatcttgctcgttgcccaagctggagtgcaatggcgtgatctcagctcactgccacctccgcctcctgggttcaagcaattctcctgcctcagcttcccaagtaggtgggattacaggtgcctgcaccacgcctaactaatttttgtatttttagtagagatggggtttcaccatgttggccaggctcgtctcaaactcctgatctcaggcgacccacccgcctaagcctcccaaagtaggggattacaggtgtgagctgccgcacccggccgacaggtgtaactttttttttttttttttttttttttgagacagagtctcactctgtcaccaggctggagtgcagtggctctctctgctcactgcaatctctgctcactgcaacctctgcctcccaggttcaagcgattcccctgcctcagcctcctgagtagctgggactacaggtgtgtgccaccatgcccagctaattttttgtattttagtagagacggaatttcaccatgttagccaggatggtctcgatttcctgacctcgtgatccacctgcttcagcctcccaaagtgctgagattacaggcatgagccaccacacccggccacatataacttttgactctccaaaaacttaactactaatagaagacttaccaatagcataaacaagttgattaacatatattttgtatgtcatttgtgttatatatgtatttcttaccataaagtaaactatagaaaagaaaatgttattaagagaatcataagcaagaaaaaatatgtttactcttcattcagtggaagtggatcagcataaaggtcttcctcctcatgatcttcaggttgagcaggcaaggaggaggagaaagagaaagggttgccatctcagcagtggcagaggcagagggaagtctaaggggacccttgctgttcaaaattgtgttgatcaagggtcaactatacttgcatgaagctataaatttaagagcctagcctattatgggaacagcaattaaaaaaaaaaacaccagttggccgggcgtggtggctcacgcctgtaatcctagcactttgggaggccaaggcaggtggatcacctgaggtcaggagttcgagaccagcctggccaacatggtgaaataccgtctctactaaaaatacaaaaattcactgggcatggtggcgggcacctgtaatcccagctacttgggaggctgaagcaggagaatcgcttgaacctaggggccggaggttgcagtgagctgccaagatcgtgccattgcactctccagcctgggtaaaaacagctaaactccatctcaaaaaaaaaaaaaaacaccagttgatcctggcaccaggaagatcaaatggcatttgtttgtttgtttgttttgagacagagtctcgctctgttgcccaagctggagtgcaatggcacgatctcagctcactgcaaactctgcctcccaggttcaagtgattctcctgcctcagcctcccgagtagctgggattacaggcacccgccaccacacccagctaattttttatatttttggtagagatggggtttcaccatgttggccagtatggtctcaaactccggatctcaagtgatccacccacctcagcctcccaaagtgccttggtttacaggcgtgagccactgcaccagccagtacagttttttgttttgttttattttggttttttgagacggaatctcgctctgtcgcccaggctggagtgcagtggtgccatctcagctcactgcaagctccgcctcccgtgttcatgccattctcctgcctcagcctccctagtagctgggactataggcgcccgccaccacacccggctaatttttttttttgtatttttagtagagacggggtttcaccgtgttagccaggatagtctcgatctcctgtcctcatgatccgcccgtctcagcctcccatagtgctgggattacaggcatgagccaccgcgcccagccttttttttttttttttttttaatgtatgggggaaaaatgactagaaggacagaaaccaacatataacatgattgtgtgcatttacttatttaacaaataattgagcaatttatttctgtatgatactattctaagcgttttagagttaagcaaactcacagtaaactgtattgcccatgataaaaactgcagttacataatttaaaagcaagaatcgcagcaattcatcaggcacagtgactcacgcctgtaatcccaacactttgggaggccaaggcaggaagattccttgagcccaggaggtcaaggccagcctgggcaacatagtgagaactcatgtccacaaaaattacaaaatagccaggcatggtggcaagcacctgtggtcccagctactcaagaggctgaagttggaggatcacttgagcccaggaggtcaaggctgcagtgagcgatgatcgtgccactgcactccagcctgggtgacagagcaagagaccctgtctcaaaataaataaaaataaaagcaagaattgcagaaagtataaaccatgaccaactcaagagaataatcaatgaaagaataggcagaatgtctttccaaaaagcagttgagagatccccatcctccacatatgcactagtgcagtggggatgttgccaggcatggccgccagacctctagatagaacactgaaggtgagtctgcagtaaagccatggaatgtgctaattttagtttaggaataccaaattttattgaccgtttttaattcaataagcaacccttggccatgtataatcagttcatgacccatcagaagatcctctgtggttcactcatggcctttggactatactctgaatcatggctttagaagacatttttttagtatacttaaatggattttataacttggttgatgcccagattacagactgtgaggagtatctccacataacttgtaactgctatatatgcagtcagcaattccagtatttagcctgatattaatttatatttttcctcataatctgataatacagtgctagcaagatagatcacaaagtgtaaatgagtgtttctggagcatagatgggtacgctcaaatctttgtatcttgttttttaatagagacggggtttcgctatgttgctcaggctggtgtcgaactcctcggctcaagcaatccccttgcctcagcctcccagagtgctgggattatacatgggagccaccatgcctagcttccttgtatcattttttaaaattcaagtaagagaaaatgtctggcaatagttcataagctataaatgaaacctagtcttaggacccagctttatattgcctcaatcaaatattaatatctttagttcaaaatttgtatttacaaaaaacttttggttcttggggataccgttattgccttctctgttgccatccatataatgtatgttgttttttttttctctctccctctgggctgcgtttcatgccagataaacttccaaaccaaactgggatggcaccaggcacaaataacactcttcttatcttttcccccatctaggttacccctttgctttgttttatcggcattaccttttctacaaggagacctacctcatccacctcttccatacctttacaggcctctcaattgcttattttaactttggtgagtaaactaaattagcagtgacaccgcaattagtgggaacctggaaggaacagacttgaacaaaatttccttgagagaatctaataggtagggaagttataatgctcccacttgcaaagagggttgtatgaagaggaacacagcttaacttttcctttttttcttttatgtacattcttctgtcagataaaaacattttgagggtggttacccttgccatacctcatcaacaaagaatcctcagtttctctgtgctgtggatgtaactgaatgaccgagccaagcagtccccacttagattcattcttcacttcagacattcaaaaatacagtaacaagctgggtgtggtagcccggaattcaaggctgcagtgagctatgattgagctactgcactcaagtctggacaacagagcaagtcgcatctctaaaaaaacaaacaaaaaaagaaaagaaataaaataacaccctaataatcttttttattttaataaataatttccatcctctcctccaaaacatgaggttattctgaaaaaaaagatcctgatgccaacattttttctttatatattacgttgtgattggaagtctcaggacggtgggagtgtaaaaaccaggctaaattctctcttcttgcatccaggaaaccagctctaccactccctgctgtgtattgtgcttcagttcctcatccttcgactaatgggccgcaccatcactgccgtcctcactaccttttgcttccagatggtaaacgtctttcccttagcagctcaggctacagctgacagcggttcaggggacaggggtaggcaggggactgtggtatagaaattagcagacctaatttctaacccctctcccagcacttagcagtatgacttcaggtaggtggcttatcacaggcccaagtgttccatccacagattgtaatggtaactctttgcctgcctcaaggaagggccaccagctaaccctttgcatactgtgccattaggctctttggtttaacccactatccaggagcagagtcacttcaaggcaagacagaaaagcaacttagaatgagttaaagaacctaagcctaggccaggcaaagtggctcacacctgtaatcccagcaccttgggaggccaaggcagtcagattgcttgagcccaggagtttgagactaacccgggcaacatggtgaaaccccatctctacaaaaaaaatacaaaaattagccctccagcctgggcaacatggtgaaacaaaaaaaattaaaaattagccgggtggggtggcatgcacctgtggtcccagcatctaaattctcatctcagtttagccctcattttgccaagaagccttgagcaacgctcttcccattacaggttttcagcacctccatttgtaggaatttattaaggcttttaatgatgggatgaggagaaaggaaaaaggaaagagaacattgaatttcagagcaaggagaagaaatagtagtgatgctagaataaatacttctgcctctcctaggcctaccttctggctggatactattacactgccaccggcaactacgatatcaagtggacaatgccacattgtgttctgactttgaagctgattggtgagtgatggtcactgcctgccttccttacatgtaggtccctcccccatctcactaaaaacttcctcggcaccccccctccgccccccgccatacacttctggctgcactcagtctacaggccacatcctcagtgtcctctcccaccaccctacccatccgttctctctctgctcaggtttggctgttgactactttgacggagggaaagatcaggtaagtacccattcatcggcagagaggttcaagacttaatgaaagggaagaaaaaagttgttaacaaaagactgaacccaaattccagagcggagcctctccctcattccccagcctgtgcaatctccctttcagatagcactgagcaaggatcaacaaatctaatttgcccaggatccagctcttgcacaaagtccagagatcaatgccagcaaggcatttgctaaagcagcaacagccagctatgcacacacatacgcatttccacaagaagcaactatttgtcatcccccaaagagaaggctatttgaagaaccccagtcagtggggcacacaggtggggaacactcaaagtggctcttgtggggagattcaaggctatcctgaaccatgcattctcttcttggcatagaattccttgtcctctgagcaacagaaatatgccatacgtggtgttccttccctgctggaagttgctggtttctcctacttctatggggccttcttggtagggccccagttctcaatgaatcactacatgaagctggtgcagggagagctgattgacataccaggaaagataccaaacaggtaattgcccctcttggtccagatgtttgtgtaggtatttcactcactctgaagtgactcttctgaaagctgcattctccagcatgaccctggcatagagacctgagtcatgcaggccctggactgttgtaacaggcactctgtgccaggagtgggccctttttagtttagggttcttccagttatccattctaacactagtacaaacataaaaatccacatttatgccacaggattttgcctgaaccagtcacatttctgcctttaaagcctattttcatgtatatatgaaatatatttatgattgataggtaggtaggcaggttgataggtaggtaggtagatagaggctgggcacagtggtttcacctctataatcccagcactttgggaggccgaggtgggaggatcacttgagcccgtgagttctagaccagcctggcaacatagagagactctgtctctacaaaaaaatacaaaaattatcagacatagtggcatgcatctgtagtccaagctacataggaggctgaagtgggagaattgcttgagtccaggggaggtgggtcaaggctgcagtgagctttgatcacaccactgcactccattctgggcaacatagcaaaatcctgtctcaaaaatatttatcagtaggaaatgcaggagggcacagtggctcatgcctgtaatgccaacgctctgggaggccaaggcaggaggatcactggaggccaggagttcaagaccagcctgggcaacatagtgagaccccatctctacaaaaaaaaattatccaggcaaggtggtacatgcctatagtcccagctactcaggtggccaaggcaaggggatcgcttgagcccaggagttcaaggccacagcgagcaatgactatgcctctgtactctagccggagtggcagagcaaggccctgactctagaaaataaaaattaaaatggtaaaaaaaaaaaaaaaaaaaaagtttaattgccagaagaattccttcactgagaacttgtccatcctgtgtttcagcatcaattcaaccaagaaatgaaggagcagattcaaagtggttatttttattatcttacctccactgggttttcagtcccaatggagattgtgagacctggcaagaccttgagatcagtagcatccctgaggggtaaacacaagactggtccactgtctgctgccctgactttcctacaactcttaagaggtttgcagtccccattcctcatagccagccatagaaatctttccctgaaacaggaaacactttgggcagcagagcttctcatcccattccaggtagacaaccacacccctaaacactcctctccataactgaaggtcagagggtgaagggaatagtctctgctctctgtgaccaggaacttcactcgttcctttccagcatcattcctgctctcaagcgcctgagtctgggccttttctacctagtgggctacacactgctcagcccccacatcacagaagactatctcctcactgaagactatgacgtgagtgtctactaaagcagcagcagcatgactgcaccagagctagaaaatggacaggcaaggatccctacagatagcagagaagtaggaaatatcatctacaagtgcatgttggttttgctctagatctgtgagttgtcaatgccagccgtgctgggacatgttcatcagccagcactgaacaaccttcgcgggcacagggctgtgccaggtgcacatttagcacccgttgccttctctaggagccgctcctagcttgccttatcacatccacgtgacccctcagagcacagcagcttctgattctccatcctattttcttctcttgactgatacatttgggcacttctagggaattcagaaaccaagggaaggggggaagtgctggcttttgctcctgcccagctgaaaggcttgaaaacagttcagtaattctgggcaggtttctctccttaaattaaaatccaatatgggcccctctgtacttaacattccaaatgctcattccaaacactttgccaacgaaggcaaacagtagagaagttaaatacagtgctgcccttgaggctctccaagggaaaggcgaatgaatattctccaggccctctgcttattcctctctgcctattgtgaaggcaatcaggccagactattgagggcatctggcagcaggactcaggcaggtatgaagtagccagccacaagtgtgaaaaggaagagtgctgagagaaactgcctagtcatgtgatatccctaatgcactgtgctttcttccctcaagaaccaccccttctggttccgctgcatgtacatgctgatctggggcaagtttgtgctgtacaaatatgtcacctgttggctggtcacagtaagtagaaaagttgaaacaaggtcctatttagacaagccatgggggccagtatggggagtggcaagagccctaactgagctattccctctcaggaaggagtatgcattttgacgggcctgggcttcaatggctttgaagaaaagggcaaggcaaagtgggatgcctgtgccaacatgaaggtgtggctctttgaaacaaacccccgcttcactggcaccattgcctcattcaacatcaacaccaacgcctgggtggcccggtgagctgctggtggggagcctggaccctggttccttccttccactgtcttcccagattggagggcaggggtgtaccatgtcacccctatgcgtctttcccatctgggcagaaccccctgtcgctcacactgactttgacccccacctatacccccctcccaaaaaaaccattactgtcatatttgaaaaaaaggcaagatataaaagtgcgttaagacctgggtgttactccagctctgccaatggacttatgtcctccactgccctgtttatcaacagctttacttgtttgtccccaccactagagtgtgggcagcttgagtagagtgtctggttcaccactgatctcagcatcagcctcagtcactgctgctgaaccaagtggctcgtgcgcacacggtctccagctccgccttgggtctgctttccatctctaaaagtaatcagtcagcactgcctcctgtaccctctgggggctacacgtgggaacccaccagcactccaatccaatcctcagggtgaggacccagaggcaggtggcgggatgcaaggaccagtcagtttgagggtcgccccacccacccttttctccagctacatcttcaaacgactcaagttccttggaaataaagaactctctcagggtctctcgttgctattcctggccctctggcacggcctgcactcaggatacctggtctgcttccagatggaattcctcattgttattgtggaaagacaggtaggcctccagggtgggggtgaaggggaatataagggacaagatgctgatgagctcctcctccctccccaggctgccaggctcattcaagagagccccaccctgagcaagctggccgccattactgtcctccagcccttctactatttggtgcaacagaccatccactggctcttcatgggttactccatgactgccttctgcctcttcacgtgggacaaatggcttaaggcaagtgaaggcctgcttgtgagactgggagggactcactgcaacctcaaaggttgcaaaggacactccaggcctgtctaccttagtggcctctctctccacaggtgtataaatccatctatttccttggccacatcttcttcctgagcctactattcatattgccttatattcacaaagcaatggtgccaaggaaagagaagttaaagaagatggaataatccatttccctggtaagttaatacagctaaactaaaactaccaccaggttacagaatagagcaacagactggaaaaaaacaatagtattagaaatctggggtgaattccaaggattagcctggctactaaggaacacagtatgggcaatgactactgtgacttattgaggcatgctaggaaacatctggaagggctatagaccaggaattacaggagtaactaaccagccttccaaactcctcttgtcttgcaggtggcctgtgcgggactggtgcagaaactactcgtctcccttttcacagcactcctttgccccagagcagagaatggaaaagccagggaggtggaagatcgatgcttccagctgtgcctctgctgccagccaagtcttcatttggggccaaaggggaaacttttttttggagaaggcgtcttgctttgtcacccacgctggaatgcagtggcgggatctcagctcaccgcaacctccacctcctgggttcaagtgattttcctgcctcagcctcccaagtagctgggaatacaggcacgccaccatgcccagctaatttttgtattttcagtagaaacgggatttcaccacgttggccaggctggtctcgaactcctgaccgcaagtgatccacccgcctccgcctcccaaagtgctgggattacaggcgtgagccaccgtgcccggcccaaaggggaaactcttgtgggaggagcagaggggctcacatctcccctctgattcccccatgcacattgccttatctctccccatctagccaggaatctattgtgtttttcttctgccaatttactatgattgtgtatgtgccgctaccaccaccccccccatgggggggtggagaggggtgcaaggccctgcctgctccactttttctaccttggaactgtattagataaaatcacttctgtttgttcagtttttcaccactagcattcctgactgctctctttcacagttcttctccatcatcagggttctctcctttagcacatgggaatctgggagctaaagcctgccttcaaagcatggaaccaaactgcaaactctgtaacctcctatctgtccctgaagtcccggggaacaaacagttttacaccactggatactttaggaaccccaaaacaaccaggtttgcaagaacagtattcataggataaacaaatagcaaatgtacagccttggcttccccaaactccacagtctcagtgcagaaagatcatcttccagcagtcagctcagaccagggtcaaaggatgtgacatcaacagtttctggtttcagaacaggttctactactgtcaaatgaccccccatacttcctcaaaggctgtggtaagttttgcacaggtgagggcagcagaaagggggtagttactgatggacaccatcttctctgtatactccacactgacctaagaaaagaacagttttgtcagccaactctgtcactcagtagctgtttcagcccttctttagggcaggaaaactatggctgagctagtatttcagctgtgctgttgaatatcaaatccctacaaaggatgaagaaggtcctaactgtgacttccaattatggcagcagccctcaaaggatgtgccctggggcagggtgtggaactgtcatgtgtcttctagctcattgtaagcattgttaaaatgcctactgctctgggaattctatactaagttcagctctaccaagaatttcagggttgagcccagaccttaccttgccatgggcaaaggcccctaccacaaaaacaataggatcactgctgggcaccagctcacgcacatcactgacaaccgggatggaaaaagaagtgccaactttcatacatccaactggaaagtgatctgatactggattcttaattacctaaagtaaaaaagagagaaaagtcagccccagaaacattcccagaaccagccttcaactaacaggtttcaatacctcaccttcaaaagcttctgggggccatcagctgctcgaacactgagcttgtgtaaaagttgaactagaagggggaaaaaagagttcagagctagatggagaccacagtccttctgtccagtcatcgaacaaggaaaaccccatggataagatgagttccctgtgtgctttatatctagactggactcctgaaatgttaggaacaaacagttgccaagcatatggctagctgtacagtgatgggttcagactccctctttcactcagccaggaagctactgcaagaacaggagtggagtttccacaaacatagaaaaataataacagtccttgtcctggtattaatcatgttgttctcccattttctcgcttaaaaatccacatttagttctcccttttcctcttcctcccttcttccctactgacaagttcattctaactttgttctaaggcttcttacccatgaggccacaaaagcggtcaaaggttctgggaattcgggtctggggattcacttcaatcagaacattcttctgtgtatggatataaacctgtagcaagccagctcggttcaggggactatccatcagcatcagcaaactctgagcaaagcagaaaccgagacatggttaaggctgaagagaggcagcactcagctgccaacccttccatacagaggctcaaagggttgtgagcactgtccctggagttacctggtgggtgatatctggccgcgcttccccagggtcccgtccattcttcaacaatatagacttgtgcttgtcacagttgagtagctcatatgtcttccctacctgaagaacagggaacatgacgagagaacagcataagcttctgttacctagccccgtggttcttcaagtgtggtccccaaactaccagcagcagctgcacctggaaacttgttaggcaaattctcaggcccaccctagacctactaaaccaggaacactgggggtggagcccagcaagcccttcgggggattactgtgcagccttatttgcactccccagtgaatggtctgagagggaaacaggaggaagggcacaacctgtgacttcacattatctactaatacactggatttaattaaaaaacctgtggctgttaggcaaggccaatgagacatcctggaactaggcaggagttagtagttagcaaggctgaatgctgtgtttattacaggagcagtaagtaggtactgtgcaaaatatcgagtcaccaccctcagtttgcgtacaccaaacatgcactaagtgaagagctgcaaatctgaacaagaaatgtgaaggccgggcgtggtggctcacgcctgtaatcccagcactttgggaggccgaggcgggcagatcacaaggtcaggagattgagaccatcgtggctaacacggtgaaaccccatctctactaaaaatataaaaaattagccgggcatggtggcaggcgcctgtagtcccagctacttgggaggcagaggcaggagaatggcatgaacccaggaggcggagcttgcagcgccactgcactccagcccgggcaacagagcgagactccatctcaaaaaaaagaaatgtgaaaactaatgatgcaggaggcagtttaatcaaagaaaactctcagaagtaaaaggaagaggggttattcccagttttaagacgggcatgggggcagatgcagtggctcacggctgtaatcccagcactctgggaggccaaggcaggcaaatcacttaaggtcaggagttcaagaccagcctgggcaacatggcgaaaccccatctctactaaaaatacaaaaattagctgggcatggtggcacatgcctgtagtcctagctacttgggaggctaaggtgggaggatggcttgagcccaggagacagagattgcagtgagccaagactgtaccactgcactccagcaagaccctgtctcaaaaaaaagaaaaaagaaagactggcatgagcaaaggtacagatggaatcaagacaaagtagccaggtgtggtggcttatgcctgtgatcccaacactttaggaggccgaggtggaaggatcacttgagcccaggaatttgagaccggcctgggcaacacggtgggaccctgtctcacaaaaaaaaaaaaaaaaattagccaggcgcagtgccatttgctggcagtcccagttactcaggaggatgaggtgggaggactgcttgagccagggaagtagaggctgcagtgaaccatcacaccactgcactctgttgcccaggcaacagagcaagaccctatctcaaaaaagaaacaaaaaagaaaaagtggaaacgaagaaaggaaattttgaggaaaattgggagctgagacactaaagggcagtgattatatatgaagctgctttgtaaaccacagaatcctaatgtatcaagcacaaagccaaaaataattctggagtaagcagggcaggatgggaatgactgacagacactatcctaacaactctctgtacactggaaaagacatcagaagtttgatgttaaagaagtggactacatctgtagcagctaaaagaaataattccaagttgcaatttggagtcccaaggagcattagggtggtcagtaaaaagtctaaaaacaaactgttatatacaaatacaagttttggaaggttaagtttttatgtatcactggaatgtatatgtctagcaacattcttgagatatatggctccaaaaagtctgcgaaaaaagggatgtagattttgaaattgaatagttgaagtaatgtcacagagagcacaaagaacaaatgaccaagaactaagtccatgagacacccttagttatagaagaaaaaaaccttcttgaatgaataatacagtttcaacccattagtaggatataatcatgttttctattcttttaatagattacaggcgcaggcctgtaatcccagctactctggaggctgaggcaggagaatcgattgaacccgggaggcggaggctgcagtgagccaagatcgtgccactgcactccagcctggtagagactgagactccatctcaaaaaaaaaaaaaaaaaaaagtgtatttagaacgaagattaaaatcctggcctgacttctaaaccaatgcgatttcttctgggcctattcaattagttctaacgggtaagagaaaggaggaggaagaacactgcccaaggctttaagatagagaactgctggttctattacatgtggggaaagagatgaatgatagataaaaatgcagatgtaaaagttttaaataataaccaggtctggacagtgtatcataggtggatattagagagaggtgactatggatactaatgaattgaaacacgaagcccttacaaaaagtgtgggcagactaggctacataactacgtttctcatctgcccagtaacttgtcttgggatgtggaatgacgcaaggaacgaaactttcctctgcttagactactataccacagaatcctggtaaaccaattggaagcaaggaggtgagggctagaatatcattcaaaaagagcaaaagaaaatgagtactaccggccgggcacagtggctcacgcctctaatcccaacactttgggaggccgaggcgggcggatcacttgaggtcaggagttcgagaccagcgtggccaacatggtgaaaccccatctgaactaaaaatacaaaaaaattagccgggcgtggtggcacctgcctgtagtcccagctactccagaggctgagtcaggagaactgtttgaaggcgggaggcagaagttgcagtgagccgaggtcgcgcaactgcactccagcctgggcgacagagcgagactccgtctcaaaaaaaaaaaaaaaaagaaagaaaaatgagtactaccatcccaggatgtcaaatcaacgcaaagccaaccaagccaccttccttcaaaagcatctttcacccctctctgctttctacatccactctgggccccttaccctcattccacggagtcccaacctatcgatttactacttctccacttcctgtcccaaactaccttgactgtctccagactggccccttccagcaccacaataagcctacggcctccgatcttgtttcctgcccctagtcggggccgcttgggtggcagagcatcccagtcctgtgcctgctccccaccgcttcgttcacgaggcttgaatccatcactgggcgcggccatcttgcaacaataccggaagttgcgctaacgctcttaaataagaacagcgcggcttctaatcacaaatttccttc

SEQ ID NO: 1184 - DNA, 5905 bp, Homo sapiens
gggaaccgcccaatcaggcgcgcagttggagaggacaggagaggagggcgtggcttcctgcatttggcggggtctttgtctctcgctggcgctggcacaggaacttgggatccgtctcctctttcgcctcctgcaccttgggagccccgggctactctcccacagcccctgttgccctgtgatctgtaggtccttggggacgcatagtcaaggtgccaggacatcctggaagctgggaaatggtgagtatacggggttcgccatcccgagaggggagaacagactgtgaaaccggcaggaccgtcctccccacggttagctccgagtctcccgcagcttggccctcagtcccctgtggctgcaagatggccgctgggccagcagcgagggccccacgtcccgtccggcccatccggtcctgtccctgggcagcgccctgctctgcgcccacagccatgagtatttcccagattgttcagggaggcctggtgggtcatcagggaaaaaccgcgactgggtgtttgcgtgggaggagctgcggcccgtggggtccccagtctctcttgttaaaaattaacgggagtctatgttaaacgttaaccagtttatctgaacaaagagtgattggtgaaatggaaagcacccagccatgatttctggtccaccagaggggcataaaggaaaggctttcataagatgcatgagaaagcagcccaaattcaagaattggttccagttatatggtagccttatttgaactatccagatggaaatgtcctggttacatattcagaggttaattgcatgtttgtcatgggttaaacctgcattttgcttcaggctaagatagtgttttataggaaatatatttgagttaggttttagatttttttttgtttgttttttgttttttacctatgaacacagggcactagagccactttagactaattttctgatctttaattattttaacactccagaggaggactggttttctcctgtgtttttttaatgtatggcaagtggaacctctaatcgaccaccctgtttttcatcctaactcaggcttgcagtaaaattatcagttcccactttctttgctgcattctcaaatgcaacacatgagaccagctttcccttgccaatttacaatgctgttaactatatgtcctttattatacatttcattaaagttttctattatttggtttctttctacttctccctacagttctggcaatatttgctttttatatttagaagcctcccttttgggtgcataaatatataaagctatattctcttgagaaattaacctctattattattctatggtaaactcatttcatgcttgtgagagacattgctagaaagtctattttgtctaatttaagcattaccgttgcactcctttggttattgtttgcatggaatatcattttctatcctttcacttttagcctatgctcttaattcataattgagtctcttgtaagcagcatattacgaggtttaaacgattaatttatccactctgtctgctttagtctcttttggctgctataactgaatatcacacactggtaattaataaagaatagaattttatttgacttatgattctggaggctgggaagccaaaacaacatgatactggtatatgttgaaggtctagttgctggataataacatagacaaagatgtgagggagagagagcttttttttttaatatataacagatccattcttgttataattagcccattcccataataagaacattaatccattcatgagggcagagttcttagagcttaattaatttttaaaggttccacctcttaattctaacatgttggctattaaattttatcctaaattttggagatgacattcagtgtacagcagtatctgtttagtagatactttaatctttttatttgtaaggtagtgataggtaaggagttactattgtaaatttgtagttttctgtccattttaagtttgcttcttttttttctggttctgtctttcctgtggtattgttcatttttgttgagacaaagttatgctttcttgctcagactgaagtgcagtggcatatcacagctcactgtagcttcaacctcctgggctcaaataatcctcccaccttagccacccaagtagcttggactacagacacgtaccacaacacccaaggagatttcatccttccaccttggcctcccaaagtgttggaattataagcaggagacaccatatccaatgtgtaatttttgttgtttgtgtatgctttaattactttctctttttctttactgcagtttttttttcctagtggttatcatgagacttaggtaaaacatcttgtattttaatagtctagtttaagatgataacaatttatagtattctgaaattcagtatgtatttaccattttagtgacatttatactttagtatttttcatattgttagttagcatttcatcatatcaatgtgaagatttcttccagaccatggctggagaaggaaagaaggtgtgttttgcctgactcagtgactatagagagaaccaagttctgcaggcctgtcacctaagtctcaggtgagtatgaattctcttgtgtttttcacagattgttgcagtggcaggaccaaggtcaaatgagttatagccaagtctacagtaagatgtggcagtattctgttttgaagccgggaccatgattggcaagcttgccacttggtcaagtgctcaccctctgaaaatgtcttccttggtctttgcctccagctgggtgccacaaactctgaactggattccaaggctttcatgaatgcacttatgtttgctgtggcagctgcattatgtcgtgggggatgtggatgcagaacctcacattctgtcgtcttgcttatgttactctcctttatgtttcactttctcaaatgaatgtcaagcaggtgattttcagattcaaaagttctaaaataaattgctcaaatttatacattatgtaagctgttaataaaatttcttgtaggtgctacatatttgttaaaatttttggttgtaattttaagctcactgtaggcagaaaggaatcattaagatttctattcttttttagtctgtatctaaatgaccatatattttaattccaaatatttactttatacttcagtaatgctcattgtattttgcaaaatttatattgttcttttatttgaaaatataaggctttttttagctcctgaaagctatattatagtcatatagttttattatagtatttgataagaagagcagcaacatattgagaacagataaaattctgctgtctttttaatgattatttattaaattcttctcattagagcctattattaatgattgtaatgtatttactgtataatttttctgcaatttattaaatgccaatgacttccaatgtctgcttttcatgactgcacacagtttaaagctgtagatatctaatgggttatttttcagcccggcatggtggctcacgcctgtaatcccagcactttgggaggccaaggtgggtggatcacgaggtcaggagatcaagaccatcctggctaccatggtgaaaccccgtctctactaaatatagaaaaaattagccgggcatagtggtgggtgcctgtattcccagctactcgagaggctgaggcaggagaatggcgtgaacccagtgggcggagcttgcagtgagccgagatggcaccactgcactacagcctgggcgacagggtgagactctgtctcaaaaaaaaaaaaaaaaaaaaaaagggcttatttttcattgtatatttatgttgtattcaggattttatgcatttaatctctcttcttatgttcaattctgtgttgttgtgtttcttttcttgggggggtatgttttctcagatcagttaattgtatttttgcttttaaagcttgatatcatgagttgaatgataattttttaactcggtacactttatgacaatgtgatatttaatttatatgtgaattagccgtgtttgttgcttatacatatatctatgtgtttttcacctatgtatgtcatttttttcatcttttttccttgtttttttttttaagtttcagatacgctttctttttcttttttttgtttttttcttttaaagagaattttaaaacagagtcaaatgaacaaaaatcagttatttgtcctcttgcagggcgggtagaccttccttccccacgggtttgaggctatggctaagtggtgagccttggggagatgcaggaaggatccatcccaggcacttggctagaggtaagtaaaaatagcctttggaccagaagacctgatagtttgggtactcgtctgaacataagtccccatcttcccagaaatgtcgtcttttgtctgcaacaactggctggagaaatatttcagaaagatgtgtgcctggaacacccaaagacgtacctttcctttctctttggcataggccttgtagcactgtagaaagaccaggtttgcaatggagccttcaatactcttcatccctatggatctcaggggctcatagggtgacaggagaggagacaagctagcttgggaagagtctttgtacttcagcttctcccctactgaaacactatatacttggggccacagttcatcacaaaacacacatgctctctttctttctctcacacccacatcttgggaacccaacaacttgatggcaggtagctctgggtatccttggtctggcattcacccactgggcatctaagctgtcctaaagctcttttcaatcacttctcactctttccaggcccatgtgggtaggtgttccagccttcactctttcaggctgatcatagaggcacagtgtgggaaaatcccctactgtgatggccattgctgggaagcagggaaggttaagggcccactgctgcccaaggctagtgcagaggccctctgctcctccactcatctcctcaaagaatgatatcaggtgcagcagctgctgtctggaatgttatcaaaccaggactgcacaggcactgcattctctgtgtggaagaggtaagaagcaggctagttgtccaggatgagttttcctcaggtccctccccagatggctgacgttcttgacatagcagccctggtgaaacaaacatgactcatgggtcaggcagccccaaaccatcccatacccgtccagctcacccgtcacaggatctgcctacttgttcaggctgggaagaagagagcaatgacgaaaacacatttaaacatttcctccattcatgtcaggaactcatccatataaggcctcatgagcacatggatctggtgcatggtcccctcaagctctacaggcactaggcagtcagcattgctgattggcttaaaggagctatgcacaagggtttcatccaggtcagtgaccatacagatccttccttgatttttctctgtcacctctgggagcaggcaggttcctgggatctgataaaactgatattggagacgctggagctgatccgacatagcaatggtgttgactccctccttatgtgtggattgctcagcgggggaacttgactgtccaacatgctgggtgcaagaacagcagaaaggggacttttaagatgtggcaaacatgaggcctcttcggagaggactttggaaaccaggccttgcttggtaaggaccagggcatcttccctccatgcctgggtgatgatggagccttgttccatctaacaatcctgagggctgggctggggggcatgggctggggcctgattcagttcccgagattctgacctccacagctgttcacataccccttctcctttccatactggtcgggaaggga

SEQ ID NO: 1185 - DNA, 3891 bp, Homo sapiens
gggaaccgcccaatcaggcgcgcggtggcagaggagaggaaaggagggcgtggcttcctgcatttggcgggatctgtgtctctcgctggtgctggcacaagagcttgggatccgtctcctctttcgcctcctgcaccttgggagccccgggctactctctcacagcccctgttgccctgtgatctgtaggtcttgggggacgcatagttaaggtgccaggacatcctggaagctgggaaatggtgagtatacggggttcgccatcccgagaggggagaacagactgtgaaaccggcaggaccggcctccccacggttagctccgagtctcccgcagcttggccctcagtcccctgtggctgcaagatggccgctgggccagcagcgagggcccccacgtcccgtccggcccatccggtcctgtccctgggcagcgccctgctctgcgcccacagccatgagtatttcccagattgttcagggaggcctggtgggtcatcagggaaaaaccgcgactgggtgtttgcgtgggaggagctgcggcccgtggggtccccagtctctcttgttaaaaattaacgggagtctatgttaaaaggttcatcagtttatctgaacaaagagtgattggtgaaatggaaagcacccagccatgatttctggtccaccagaggggcataaaggaaaggcttttataagatgcatgagaaagcaacccaaattcaagaattggttccagttatatggtagccttatttgaactatccagatggaaatgtcctggttacatattcagaggttaattgcatgtttgtcatgggttaaacctgcattttgcttcaggctaagatagtgttttataggaaatatatttgagttaggttttagatttttttttgtttgttttttgctttttacctatgaacacagggcactagagccactttagactaattttctgatctttaattattttaacactccagaggaggactggttttctcctgtgtttttttaatgtatggcaagtggaacctctaatcgaccaccctgtttttcatcctaactcaggcttgcagtaaaattatcagttcccactttctttgctgcattctcaaatgcaacacatgagaccagctttcccttgccaatttacaatgctgttaactatatgtcctttattatacatttcattaaagttttctattatttggtttctttctacttctccctacagttctggcaatatttgctttttatatttagaagcctcccttttgggtgcataaatatataaagctatattctcttgagaaattaacctctattattattgtatggtaaactcatttcatgcttgtgagagacattgctagaaagtctattttgtctaatttaagcattaccgttgcactcctttggttattgtttgcatggaatatcattttctatcctttcacttttagcctatgctcttaattcataattgagtctcttgtaagcagcatattacgaggtttaaaagattaatttatccactctgtctgctttagtctcttttggctgctataactgaatatcacacactggtaattaataaagaatcgaattttatttgacttatgattctggaggctgggaagccaaaacaacatgatactggtatatgttgaaggtctagttgctggataataacatagacaaagatgtgagggagagagagctttttttttttaatatataacagatccattcttgttaaaattagcccattcccataataagaacattaatccattcatgagggcagagttcttagagcttaattaatttttaaaggttccacctcttaattctaacatgttggctattaaattttatcctaaattttggagatgacattcagtgtacagcagtatctgtttagtagatactttaatctttttatttgtaaggtagtgataggtaaggagttactattgtaaatttgtagttttctgtccattttaagtttgcttcttttttttctggttctgtctttcctgtggtattgttcatttttgttgagacaaagttatgctttcttgctcagactgaagtgtagtggcatatcacagctcactgtagcttcaacctcctgggctcaaataatcctcccaccttagccacccaagtagcttggactacagacacgtaccgcaacacccaaggagatttcatccttccaccttggcctcccaaagtgttggaattataagcaggagacaccatatccaatgtgtaatttttgttgtttgtgtatgctttaattactttctctttttctttactgcagtttttttttcctagtggttatcatgagacttaggtaaaacatcttgtattttaatagtctagtttaagatgataacaatttatagtattctgaaattcagtatgtatttaccattttagtgacatttatactttagtatttttcatattgttagttagcatttcatcatatcaatgtgaagatttcttccagaccatggctggagaaggaaagaaggtgtgttttgcctgactcagtgactatagagagaaccaagttctgcaggcctgtcacctaagtctcaggtgagtatgaattctcttgtgtttttcacagattgttgcagtggcaggaccaaggtcaaatgagttatagccaagtctacagtaagatgtggcagtattctgttttgaagccgggaccatgattggcaagcttgccacttggtcaagtgctcaccctctgaaaatgtcttccttggtctttgcctccagctgggtgccacaaactctgaactggatttcaaggctttcatgaatgcacttacgtttgctgtggcagctgcattatgtcgtgggggatgtggatgcagaacctcacattctgtcgtcttgcttatgttactctcctttatgtttcactttctcaaatgaatgtcaagcaggtgattttcagattcaaaagttctaaaataaattgctcaaatttatacattatgtaagctgttaataaaatttcttgtaggtgctacatatttgttaaaatttttggttgtaattttaagctcactgtaggcagaaaggaatcattaagatttctattcttttttagtctgtatctaaatgaccatatattttaattccaaatatttactttatacttcagtaatgctcattgtattttgcaaaatttatattgttcttttatttgaaaatataaggctttttttagctcctgaaagctatattatagtcatatagttttattatagtatttgataagaagagcagcaacatattgagaacagataaaattctgctgtctttttaatgattatttattaaattcttctcattagagcctattattaatgattgtaatgtatttactgtataatttttctgcaatttattaaatgccaatgacttccaatgtctgcttttcatgactgcacacagtttaaagctgtagatatctaaagggttatttttcagcccggcatggtggctcacgcctgtaatcccagcactttgggaggccaaggtgggtggatcacgaggtcaggagatcaagaccatcctggctaccacggtgaaaccccgtctctactaaatatagaaaaaattagccgggcatagtggtgggtgcctgtattcccagctactcgagaggctgaggcaggagaatggcgtgaacccagtaggcggagcttgcagtgagccgagatggcaccactgcactccagcctgggcgacagggtgagactgtctcaaaaaaaaacaaaaagggcttatttttcattgtatatttatgttgtattcaggattttatgcattaaaatctctcttcttattttca

SEQ ID NO: 1186 - DNA, 5834 bp, Homo sapiens
tttggcgggatctgtgtctctcgctggtgctggccaggagcttgggatctgtctcctctttcgcctcctgcaccttgagagccctgggtactctgtcacagcccctgttgccctgcgatctgtaggtccttggggagcatagttaaggtgccaggacatcctggaagctgggaaatggtgagtatacggggttcgccatcccgagaggggagagcagactgtgaaaccggcaggaccggcctccccacggttagctccgagtctcccgcagcttggccttcagtcccctgtggctgcaagatggccgctgggccagcagcgaggacccccacatccggcctggccatccggtcctgtccctgggcagcgccctgctctgcgcccacagccatgagtatttcccagattgttcagggaggccagatgggtcatcagggaaaaaccgcgagtgggtgtttgcgtgggaggagctgcggcccgtggggtccccagtctctcttgttaaaaattaacgggagtctatgttaaaaggttcatcagtttatctgaacaaacagtgattggtgaaatggaaagcacccagccatgatttctgggccaccagaggggcataaaggaaaggcttttataagatgcatgagaaagcagcccaaattcaagaattggttccagttatatggtagccttatttgaactatccagatggaaatgtcctggttacatattcagaggttaattgcatgtttgtcatgggttaaacctgcattttgcttcaggctaagatagtgttttataggaaatgtatttgagttaggttttagatttttttttttttttttttttttttaacctatgaacacagggcactagagccactttagactaattttctgatctttaattattttaacactccagaggaggactggttttctcctgtgattttttaatgtatggcaagtggaacctctaatcgaccaccctgtttttcatcctaactcaggcttgcagtaaaattatcagttcccactttctttgctgcattctcaaacgcaacacatgagaccagctttcccttgccaatttacaatgctgttaactatatgtcctttattatacatttcattaaagttttctattattgggtttctttctacttctccctacagttctggcaatatttgctttttatatttagaagcctcccttttgggtgcataaatatataaagctatattctcttgagaaattaacctctattattgtatggtaaactcatttcattcttgtgagagacattgctagaaagtctattttgtctaatttaagcattaccatttcactcctttggttattatttgcatggaatatcattttctatcctttcacttttagcctatgctcttaattcataattgagtctcttgtaagcagcatattatgaggtttaaaagattaatttatccactctgtctgctttagtctcttttggctgctataacagaatatcacacactggtaattaataaagaatagaattttatttgactcatgattctggaggctgggaagccaaaacaacattatactggtatatgttgaaggtctagttgctggataataacatacacaaagatgtgagggagagagagctttttttttttaatatataacagatccattcttgttataattagcccattcccataataagaacgttaatccattcatgagggcagagtgcttatagcttaattaatttttaaaggttccacctcttaattctaacatgttggctattaaattttatcctaaattttggagatgacattcagtgtacagcagtatctgtttagtagatactttaatctttttatttgtaaggtagtgataggtaagcagttactattgtacatttgtagttttctgtccattttaagtttgcttcttttttttctggttctgtctttcctgtggtattgttcatttttgttgagacaaagttatgctttcttgctcagactgaagtgcagtggcatatcacagctcactgtagccttaacctcctgggctcaaataatcgtcccaccttagccacccaagtagcttggactgcagacatgtaccacaacacccaaggagatttgattcttccaccttgacctcccaaagtgttggaattataagcaggagacaccatatccaatgtgtaatttttgttgtttgtgtatgctttaattactttctctttttctttactattttttttttcctactggttatcatgagacttatgtaaaacatcttgtattttaatagtctagtttaagatgataacaatttatagtattctgaaattcagtatgtatttaccattttagtgacatttatactttagtatttttcatattgttagttagcatttcatcatatcaatgtgaagatttcttccagaccatggctggagaaggaaagaaggtgtgttttgcctgattcagggactatagagagaaccaagttctgcaggcctgtcacctaagtctcaggtgagtatgaattctcttgtgttttccacagactgttgcagtgtcaggaccaaggtcaaatgagttatagccaagtctacagtaagatgtggcagtattctgttttgaagcgaggaccatgattggcaagcttgccacttggtcaagtgcttaccctctaaagatgtcttccttggtctttgcctccagctgggtgtcacaaactctgaactggattccaaggctttcatgaatgcacttatgtttgctgtggcagctgcattatgtcgtgggggatgtggatgcagaacctcccattctgtcgtcttgcttatgttactctcctttatgtttcactttctcaaatgaatgacaagcaggtgattttcagattcaaaagttctaaaataaattgctcaaatttacacattatgtaagctgttaataaaatttcttgtaggtgctacatatttattaaaatttttggttgtaattttaagctcactgtaggcagaaaggaatcattaagatttctattcttttttagtctgtatctaaatgaccatatattttaattccaaatatttactttatacttcagtaatgctcattgtattttgcaaaatttatattgttcttttatttgaaaatataaggctttttttagctcctgaaatctatattatagtcatatagttttattatagtatttgataagaagagcagcaacatattgagaacagaataaaattctgctgtctttttaatgattatttattaaattcttctcattaaagcctattattaatgattgtaatgtatttactgtataattttactgcaatttattaaatgccaatgacttctaatgtctgcttttcatgactgcacacagtttaaagctgtagatatctaaagggttatttttcagcccggcacggtggctcatgcctgtaatcccagcactttgggaggccaaggtgggtggatcacgaggtcaggagatcaagaccatcctggctaacacggtgaaacccagtctctactaaatatagaaaaaattagccgggcatagtggcgggtgcctgtattcccagctactcgagaggctgaggcaggagaatggcgtgaacccagtaggcggagcttgcagtgagccgagatggcaccactgcactccagcctgggcgacagggtgagactgtctcaaaaaaaaacaaaaagggcttatttttcattgtatatttatgttgtattcaggattttatgcattaaaatctctcttcttattttcagttctgtgttgttgtgtttcttttctgggggggtatgttttctcagagcagttaattgtatttttgcttttaaagcttgatatcatgagttgaatgataattttttaactcggtacacattatgacaatgtgatatttaatttatatttgaattagctgtgtttgttgcttatagatatatctatgtgtttttcacctatgtaagtatgtcatgtttttcatcttttttccttgtttttttttttttaagtttcagatatgctttctttttcttttttttgtttttttttttttaaagagaattttaaaacagagtcaaatgaacaaaaatcagttatttgtcctcttgcagggcggggagaccttccttccccacgggtttgaggctatggctaagtggtgagccttggtgagacgcagaaaggatccatcccaggcacttggctagaggtaagtaaaaatagcctttgggccagaagacctgatagtttgggtactcgtctggacataagtccccatcttcccagaaatgtcgtcttttgtctgcaacaactggctggagaaatatttcagaaagatgtgtgcctggaacacccaaaggcatacctttcctttctccttggcataggccttgcagcactgaagaaagaccaggtttgcaacggagccttcaatactcttcatccctatggatctcaggggctcatagggtgacaggagaggagacaagctagcttgggaagagtctttgtccttcagcttctcctctactgaaacactatatacttggggccacagttcatagcaaaacacacatgctgtctttctttctctcacacccccatctcgggaacccaacaacttgatggcaggtagctctgggtatccttggtctggcattcacccactgggcatctaagctgtcctaaagctcttttcaatcacttctcactgtttccaggcccatgtgggtaggtgttccagccttcactctttcaggctgttcataaaggcacagtgtgggaaaatcccctactgtgatggccattgctgggaagcagggaaggttaagggcccactgctgcccaaggctagtgtagacaccctctgctcctccactcatctcctcaaataatgatatcaggtgcagcagctgctgtctggaatgttatcaaaccaggactgcacaggcactgcattctctgtgtggaagatgtaagaagcaggcgagttgtccaggatgagttttcctcaggtccctccccagatggctgacgtccttgacatagcagccctggtgaaacaaacatgactcatgggacaggcagccccagaccatcccatacccgtccagctcacccgtcacaggatctgcctacttgttcaggctgggaagaagagagcaatgacgaaaacacatttaaacatttcctccattcatgtcaggaactcatccatataaggcctcatgagcacatggatctggtgcatggtcccctcaagctctacaggcactaggcagtcagcattgctgattggcttaaaggagctatgcacaagggtttcatccaggtcagtgaccatacagatccttccttgatttttctctgtcacctctgggagcaggcaggttcctgggatctgataaaactgatattggagacgctggagctgatccgacatagcaatggtgttgactccctccttatgtgtggattgctcagcgggggaacttgactgtccaacatgctgggtgcaagaacagcagaaaggggacttttaagatgtggcaaacatgaggcctcttcggagaggactttggaaaccaggccttgcttggtaaggaccagggcatcttccctccatgcctgggtgatgatggagccttgttccatctaacaatcctgagggctgggctggggggcatgggctggggcctgattcagttcccgagattctgacctccacagctgttcacataccccttctcctttccatactggccgggaaggga

(The sequence listing continues in the following parts.)
